United States Patent Application Publication US 2005/0196754 A1 - sequence listing, part 2

SEQ ID NO: 2436 - DNA, 339 bp, Homo sapiens
  SIMILAR (13)..(339): 381254mologous to Zea mays ABA- and ripening-inducible-like protein,accession number U09276,Smith-Waterman Score=103.
gcgcgctgacaggcgccgcggggcacgacaccgtgcccacaccagacgcggagggatggatctgtccgcctgggtcctcccgccctgcgggccggagcgcgcggcgggagagccgggggagcgctctcggagggagcgcgctttctttggagtcggcgaaacccgggtgagttcgaagagcctgtgcgagggtctgcgggcaccgggcgccgctggggggactctccggcctttcctttttgtcctgttctctccgcttccgttaaccctgcggaccttccgtccgcccctcggagggaagcctgctagctcgggaccgcttcagcaccctgctgtgct

SEQ ID NO: 2437 - DNA, 495 bp, Homo sapiens
  SIMILAR (205)..(360): 361254mologous to Arabidopsis thaliana hypothetical protein,accession number AC009325,Smith-Waterman Score=70.
ccagtctctgacttaattggtataggcaaggatccaagcatggttattttaaacgctctccagaggagagcattcttatgtgcagccaatgttaagatccccagattgagaataaaagttaaaacaaaagaagctagtgctcaggtagtcaaagaagagtgcaataagtacttgctgttccttcttcctgttccttccgctggccttcttccctcaattatggaaatagctgatcccttttcatcattcgggtctgaggacaaatgttataccctcacaccgcccctcccgcgacatactgagaaatcgagtgactctcaagagaaaggccattttgaggctggggtcgaaccaaaatccagggggtccacaccaggtcagtaccccggaattggctgttttgcaagatttcgggagtaccaaattggcatgagacatttgacaacgaggccagccatgcaccgagctcaggttttatttccgttgtccttctga

SEQ ID NO: 2438 - DNA, 239 bp, Homo sapiens
  SIMILAR (130)..(213): 411254mologous to Streptomyces coelicolor AfsR,accession number D90155,Smith-Waterman Score=56.
atggtcaacaagcggggatactcttgcgtccggacagcctcttatgagggcaaatggtcacagggcacactggcacagcgtgcaggacccaactcctcagctgagcgggtctctccccagaaacaaactcgcattcgtaaccggcatcttggccttgcgctgggggtgacccgcccaagccgccatgaagggacgcttgcacaaagtgaagcccaggtacaaacagcccgacgggaaac

SEQ ID NO: 2439 - DNA, 751 bp, Homo sapiens
  SIMILAR (52)..(327): 271254mologous to Homo sapiens truncated epidermal growth factor receptor,accession number AF125539,Smith-Waterman Score=68.
tggcccttctgggtggtaggtgggcctgcccagggccatttttctggtcctggccctcactcattctgatgcctgagctcatggtccagtggtccatgggggttcaggttcagggagatggtatggcagtgctctctgatttggtccactgtccacctcctgcaccctcatcctaagggtctcatcagtgtggctggtagaagagttctcgggccagggaggaaggcactcagctgcctgccaccaacccttttctcctgcctgccttgcagatttgaaattgatggctcttcccccagcatgtccggttgctgtggggaggattgctcctatgagatcctgagccggaggaccaagtttggggacagccatcactcccacgcgggtgggcactgtggtggctgctgccactgaactctcagagccactttcaagtcacaatgctctctcctaaggcctttcctctttcctggtctcactgttcaccgggtgtcctcagagctgtggcctccccagccctgcacgtgccaggctgcgccctgagagcacagaaccctggggagaagtggtatcagctgctcctcctctcctaggagaccagagtgctagaagggaatgaaagggagagggaagagtaggtggggccgggcagtgaagctcatcctccacagtggctgcctcctcatttggctcctggggcctgcagtggaggttctcgcacctctgcagcccctagattcctgctcgtgcc

SEQ ID NO: 2440 - DNA, 531 bp, Homo sapiens
  SIMILAR (367)..(489): 681254mologous to Mus musculus myosin I beta; MMI- beta,accession number U96726,Smith-Waterman Score=146.
cattgcagtccacagataagagaaccaccatccagagagaggaagggctttcccctaaggtcgcctcatttcttagagcagggactgagattttgggaagtgaacatccagcacgaggatccagaaggaggaccactgagccttgtggccctgggagaagggaatggaatcttggctcatgtgggtgggagtgacccgattttccaggtgcgtccgtcacccctttctttgactcggaaagagaactccctgaccccttgcgcttcccagggtcattgtgccaaagagtcatccattagtgacaagaatgactggaaaactgtttccaacgccttttctgtcattgattttactgaagctgacctcgaggtgatctgcccgttgacactagaactctctgtctacgctagagatgcaatggcaaaggctgtttatggacgaacgtttacttggctggtcaacaaaatcaattcctccttagttaacaaggttggtcaacgcattttggatcccttgctcttgctcacgtaa

SEQ ID NO: 2441 - DNA, 812 bp, Homo sapiens
  SIMILAR (143)..(208): 581254mologous to Oryctolagus cuniculus interleukin-1 receptor antagonist intracellular form,accession number S68978,Smith-Waterman Score=53.
ttcgtacagtgcggtggaatttctttctccaaaagtagaccaactgcaaggctcagtgcctgttgtttacctaggaggtgattccaggaagaacatttgaggaagtgggtaaagtcattaaaggacatgtgttatgagtgggttattaccactgtgggcagctgggctctcctgtgccagaggaccctctggaaaccacacagaacataccagaagctgacactcaactcctgtccaacccctattgttgaaggtggcctggagtcattcccatcccccaactttccaagctgcatttcctggtcctgagaaagccctcatcaagagtaaatgagaaacacagacacctgagaagatggggactatgagatcttacggcatctcaaagggcagaagtctggacaggaagaccagttgcatagtggaggattcccaaggtagaccacgtgtgtgccagcccagcaggcaaactgccccgtatgagtttgtccatcaactgtgcgtgcagatctttactcgcatgcatgacacaggaagcccacgggacacttccccagcacgccccgcttcctctgcactcctggaaggaagacctgttcttgcttcttccgtactctcaggatctggcacagaacccgacaaaggaaatatttaatgaactatggcgtaagcctgggcctgaacgacaccctggggacccagcagcagcaaggtgcaacttctgccctcagcaacctcagggtctaatggacgcggcacagtggggcagaagtgacacccaagaagcttaggatttagaaggccggttcgac

SEQ ID NO: 2442 - DNA, 1318 bp, Homo sapiens
  SIMILAR (766)..(819): 771254mologous to Mus musculus stretch response protein 553,accession number AJ250188,Smith-Waterman Score=74.
ccggtctgaaaagcgcaatattcgggtgggaggacccgattttccaggtgcgtccgtcacccctttctttgactcggaaaggaactccctgaccccttgcgcttcccagtcatggcaaactttccagttgctccttgccaaactcaagaataaaagggcccaagctagagaggctgtcctcacaagcatagctgctgggggcttccactcattttcctctgaaacaacagagaaagagccatctctcattcgcagagcagcccaaggccttctgaggagacagactctggctctccgcacccagctcccgcaaaaggaagcatcaagaaaagaagaggcaaaggcggaggatagggtggaggaaactgccctgcatttgcctgcaagctctgggggttattttgcagaacaaaatggcaaaatggagaaggtatgtgaaactcttgaaaactgtaacacacgggaaacacaggtgctgatggtgctgctgtgccctggtgtcggtggctggcaggtgctcccagaaggcactgagccagccagcagtgactttcactatttccctgtcacatgctacttgcctgtctgtggccaagctcagccatttccaagcaaaattgagcaatcttgcaaacaaggtcacccatcagcagttgaaagtgcttttggttcattcactaaggtgcttataaaaatagctaagatacacattttttacagtggtattgtgagtgatgttcatgtgactgagcgtccagccagaggggcatcctgctggactacaacaaccagagacttatcttcatcaacgcaagagcgagcagttgctcttcatcatcaggcacagctagaaaatctgaactggatctgtaactgccttactagagccctggaggccattaccaccctgattgcagttccagcagttgctggcaagatgagtcttggtgaaactggagaagtaacttgctgctttgtggagaatgttatttcactttctcaatccttgaaaatgttatcctcagctgggctctcctgtccagaggaccctctggaaaccacacagaacataccagaagctgacactcactcctgtccaacccctattgttgaaggtggcctggagtcattcccatccccaactttccaagctgcatttcctggtcctgagaaagccctcatcaaggaagcagaaagaagggtgggcgatgggcacaaggttactccaagaaaggccactgtcctagcgcttctgaagtttacgataatgcagtcaaagaatgcagcagagtgcctggcgtatgataggaagcaatag

SEQ ID NO: 2443 - DNA, 815 bp, Homo sapiens
  SIMILAR (327)..(575): 841254mologous to Mus musculus stretch response protein 553,accession number AJ250188,Smith-Waterman Score=367.
  misc_feature (1)...(815): n = a,t,c or g
atcaaagcatttgggtcaagagttcacagagacgctgctctcatctccaccagaggaaccagatttctcttgttgagagaaacagctcatcctgctctacacatttcctcaagtgggacagcgatcatctttggtgagaggagacggctgacggaaatcccgtcagtgctgcgcgaggagctgccttcctgtggccagcattactgggaaaccacagtcacagactgcccagcatatcgactcggcatctgctccagctcggctgtgcaggcaggtgccctaggacaaggggagacctcatggtacatgcactgctcctgagccacagagatacacatttttctacagtgggtattgtgagtgatgttcatgtgactgagcgtccagccagagtgggcatcctgctggactacaacaaccagagacttatcttcatcaacgcagagagcgagcagttgctcttcatcatcaggcacaggtttaatgagggtgtccaccctgcctttgccctggagaaacctggaaaatgtactttgcacctggggatagagcccccggattctgtaaggcacaagtgatccttggctttcagaatttgcaagaacagcgatttgaattttgggggggtctgctgttcattcctttaggtgctatacattattcaaaaagtctcccgcgcatttgcactaatgatggctgcatgcatagcaatcagcatgtgagcaaaatcgacaagaaaaccttgactttacagagcagtgtgtgagtaaacagaatgaaaacaacaacctccactctttagntnatataaggtt

SEQ ID NO: 2444 - DNA, 3193 bp, Homo sapiens
  SIMILAR (1739)..(2449): 971254mologous to Homo sapiens p40,accession number U93564,Smith-Waterman Score=1186.
ttaagagccaataagtggttcactgagctctccactgcccaccccccaccccttgcctactgccatcaccttgcaagagatagtgatgttctggacggagcctgctctatcagcctgggtccagaggagatgatagaagagtgcaggtctgtgtctgtgctgcttacttccaacaggccctggctgatgagcctcagtgtcaagaactccaggcaattgactgagggggctcagacaggaagaacttggtatggggagagaggagaggagaggagaggagagccgaggggaggggagaagaggaggaggagaggggactgaaatgacttggggaaaatggcagcatcccacacagccagggtttggtgtgtaggtgtctgccgctgctgttcgacactcaaatgcatattttatccattttctggagctagaatccgggggctctatccccaggtgcaaagtacattttccaggtttctccagggcaaaggcagggtggacaccctcattaaacctgtgcctgatgatgaagagcaactgctcgctctctgcgttgatgaagataagtctctggttgttgtagtccagcaggatgcccactctggctggacgctcagtcacatgaacatcactcacaataccactgtagaaaaatgtgtatctctggcccacactcagcccagacccctttggactctggtggtaactcccctcaggactccttgccccagactggccacattcttcctggctgcccctcttcactgtgtcctgcaggtggtcccacccaagttctgacaccacttctcccattttgccattttgttctgcaaaataacccccagagcttgcaggcaaattgcagggcagtttcctccaccctatcctccgcctttgcctcttcttttctttgatgcttccttttgcgggagctactctggtggagatgagagcagcttcactctgttcacttgtcccaaatgcattgatggccctcacatagaaaaagtagttatcattgggttggaggttaactttcagctggagtcctttgattccagagaaagatctggaaaatcgggaaaatcgggtcactcccaccccgaatattgcgcttttcagaccggctttaaaaaacggcgcaccaccgagactatatcccacaccttggctcagaagggtcctacgccccacggaatcgccgcttgattgcttagcacagcagtcttgagattcaaacttgcaaggcaagcagcgaggctgggggaggggagcccgccattgcccaggcttgcttaggtaaacaaagcagccggggaagctcgaactgggtgcagcccaccacagctcaaggaggcctgcctgcctctgtaggctccacctctgggggcagggcacagacaaacaaaaagacagcagtaacctctgcagacttaaatgtccctgtctgacagctttgaagagagcagtggttctcccagcacgcagctggagatctgagaacgggcagactgcctcctcaagtgggtccctgacccctgacccccgagcagcctaactgggaggcaccccccagcaggggcacactgacacctcacacggcagggtattccaacagacctgcagctgagggtcctgtctgttagaaggaaaactaacaaacagaaaggacatccacaccgaaaacgcatctgtacatcaccatcatcaaagaccaaaagtagataaaaccacaaagatggggaaaaaacagaacagaaaaactggaaactctaaaacgcagagcacctctcctcctccaaaggaacgcagttcctcaccagcaacggaccaaagctggatggagaatgattttgacgagctgagagaagaaggcttcagacgctcaaattactctgagctacgggaggacattcaaaccaaaggcaaagaagttgaaaactttgaaaaaaatttagaagaatgtataactagaataaccaatacagagaagtgcttaaaggagctgatggagctgaaaaccaaggctcgagaactacgtgaagaatgcagaagcctcaggagccaatgcgatcaactggaagaaagggtatcagcaatggaagatgaaatgaatgaaatgaagcaagaagggaagtttagagaaaaaagaataaaaagaaacgagcaaagcctccaagaaatatgggactatgtgaaaagaccaaatctacgtctgattggtgtacctgaaagtgatgcggagaatggaaccaagttggaaaacactctgcaggatattatccaggagactttccccaatctagcaaggcaggccaacgttcagattcaggaaatacagagaacgccacaaagatactcctcgagaagagcaactccaagacacataattgtcagattcaccaaagttgaaatgaaggaaaaaatgttaagggcagccagagagaaagaggtctttgttccagagggaggaaccctgccacgaggaaacacaacaatgattccattaaactggaagttaagattgccacctggactctttgggctcctcctagctttaaggcaacaggctaagaatggagttacagtattggctggggtggttgacccggactatcaagatgaaatcagtctactactacacaacagagaaatcctcaatgttagtacattacagcaaagctatagttctggggaaaagcaggtatcttttttgatctcagactgctgtgctagcaatcagcgagattccgtgggcgtaggaccctccgagccaggtgtgggatatagtctcatggtgcaccgttttttaagtctgtctgaaaagcgcagtattcgggtgggagtgacccgattttccaggtgcgtccgtcacccctttcttcgactcagaaagggaactcctgaccccttgcgcttcccaaaaattcagaagctgctcaaactccagtgcagtcatggagcctccattacctgggaggcagcctccaagcagcatgcagccttgtcagaaactgcaccgccaagggtgagaatggcattagaagcaaagaggaaagattcaaacaggaacgagaatttggacaagcgaacactctgtgctgctcaagggaagagcacagtggaagtccaagggcgagtgtgtgcccagggcagggcaactgggctatgggctgattcccgggatgcatga

SEQ ID NO: 2445 - DNA, 650 bp, Homo sapiens
attttatagaagtgtgaacttgtataagcagctgttctgtgtccaaagacttgggatttgggcttgcagggttggactttgaacctaagcctgcagcagacagggcagcttgattcactcttcctgccattatttttcatttaattgcagaataacgagtgctctgttcatgaagtccaggaattgctaatataacaatggtgaatgcagtggcagtgcacgacttcaattttcatgattactattcattagcggtctgtcaaatggatagaataggctcttttcttctctaccagctagcaaagggcactgtacccgagagaagttgcatggcaggaagagtgaatcaagctgccctgtctgctgcaggcttaggttcaaagtccaaccctgcaagcccaaatcccaagtctttggacacagaacagctgcttatacaagttcacacttctataaaatcaggtgaggacaaatggacgatgatgcagcaagtacactcctggtggacttatgaattcttatttggtgagatgtctgcctcctcctgctcactcactgtgctagagctacaccagttggatctcaataactatcagcgtcacatgcaccaaaggtctactaaacaagaagctagaccaccaagctcttga

SEQ ID NO: 2446 - DNA, 234 bp, Homo sapiens
  SIMILAR (146)..(63): 421254mologous to Gallus gallus attachment region binding protein,accession number Y14166,Smith-Waterman Score=70.
atggcccgaggcagagcacaggcaggggcggtgttccctgggctcctcctgcagctgcagcagccgccgccgccgcggtctccggctcccgcagcccgaggccgatcgctccctgccgcgctatttggtgtttcatcagcttttgaagattacaaactcacatttaatgttatgggtgcagaaaaaggccaaaaacacaaaaagagtggcaacgagggacaggaactttcatga

SEQ ID NO: 2447 - DNA, 426 bp, Homo sapiens
  SIMILAR (128)..(3): 501254mologous to Homo sapiens Human secreted protein sequence encoded by gene 11 SEQ ID NO:72,accession number B24447,Smith-Waterman Score=78.
tcagtaatggcagacgtctctctccccatcaagcttgatcatctcaggttgacttcttactgctgtgctggcagcaagaatttcaagccagtggttctcagcttgctgggctctatgggggtgggacctattgagcaagacaacttggttctctggcttctgcccgctttccaggtgagtgaacagttctgtctccctggagttccaggtgccactggggtatgaaaaaaatactcctgcagctagctcagtgtctgcctgaacagctgcccagttttgtgcttgaaacccagggccctggtggtgtaggcacatgagggagtctcctggtctgcggattgcaaaaaccatgggaaaagtgcagtatctgtgctggttagcacagtccctcacagcttcccttggctgggaaagggaggctcccat

SEQ ID NO: 2448 - DNA, 1035 bp, Homo sapiens
  SIMILAR (275)..(385): 561254mologous to Homo sapiens Human secreted protein, SEQ ID NO: 6812,accession number G02731,Smith-Waterman Score=103.
atggggcctgctgtggctggcatggtgctactagaagccccaggtagatgtgatcagagtggcactggtgtatcagaagcccatgttgctgagggttacctgtcactgagagttgcttcaacagtgactaaaagggaccaaggtacaactcaggccgtaacttcagagggtgcaagccccaaggcttggcatctttcacggggtgttgagcctgcaggttcacagaagtcaagaattgaggtttgggaacgtctgcctagatttcagaggatgtatggaaacacctggctgtccaggcagaagtttgctgcaggggcagggctctcatggagaacctctgctagggcagtacagaagggaaatcgcattgttggcaccgcagaaccagaaggcggtgacccccctggacgcggctttcactatcttgttagtcgacgcagcagttgcgcgaccagcgaaccactacgatcgatagaggaggcaccagagaacaccacatatatatcctactttcagcagctgcgtgaagcaacttccgccgtcgttaccgacaccacacggcgctatctcgatatgtaccagctgtgtagatattggctctcctctataagaggaccacgtaccttcttaagtcagctgagtccagtgtcggtgccggagctaactaatcaaggtcgagatagcagagtgtcagttcaggattttgaccctcctcagccgacaataagaggcttaggagggaaaaatggtttcatgccaggcccagggtccccgtgctgtgtgcagtcaagagaatttttggtgccctgtgtcccagttgcttcaacagtgactaaaagggaccaagttacaactcaggccttaacttcagaggttgcaagccccaaggcttgccatctttcacgggttgttgaccctgcaggtccacagaagtcaagaattgagttttgggaacgtctccctagattccagaggatgtatgaaaacacctggctgtccaggcagaattttgctgcagggccaggcctctcatga

SEQ ID NO: 2449 - DNA, 564 bp, Homo sapiens
  SIMILAR (432)..(518): 481254mologous to Saccharomyces cerevisiae YOR29-04,accession number Z70678,Smith-Waterman Score=74.
atggtgtgggttgaagccaaaagaggagtggggccttacgagccctcggaagattttcctcatactgggggcactgggatgttgttggagagtaatttagcaagtgggataaagctgtggttggatgtggccaaggaggaggaatcatcgaaaccagggcctgctttgccagtggtggttctctccagtggcaggagctggtgctcagcaggttctgaatgtccctgctttctgtgctacttcctaaaggctgtgggagatgggcaaaatatggatcttgccctggagaagctctcagaagggagacagatccatgagcagtttctgcctcctgcagcaggaaagagagcatctggcaggatcattgtgaaagcaaagaggagagaggagagcagggttttccatgactatgaccacccccgtcaccactacactgtcaccgtcatcacgcccaccgtggcctccaccactatgaccacctctgtcactgtccaccccaccacagtaattacactcaccaatacaagatttcctgcgcaggacacatgcagtttctgtctttag

SEQ ID NO: 2450 - DNA, 894 bp, Homo sapiens
  SIMILAR (323)..(267): 421254mologous to Homo sapiens ORF; putative,accession number L34000,Smith-Waterman Score=40.
atggaggaagcagccatgcctgatgtgtgcgatgaatatgccttatcctcccgaaactggctttcccaaccaaatagttcctttcaaagcactgaaagcacccatgatgctgtgcctgggtccttagatttcatcgtgcatgttgctgtgggggaaatgtcagccatcagcaaccataagctcattcctaaaaaaggacagtttgccttcagttcaggaataaaacttaggttcttctcctgcatcaggacagtacatataactttcggtgtgggagacacaggctcaagaggccgagaacttgcttgcatggagcatggacggacagacagctggatggaaggtttctcacattactgtatttcccacaccgagcacctttcatctaaggagctccacaccatctcatacgtgcctgaggtctggctgctgactgctcctacgagatacatcacaggagcagacttccccaacatgccaacaattaatgtccaggttcaggagaaaactggatttccttcaaatgctactggagaacattccagaagaaaaaaggccacctgcttgtctgctgcccagcgtcagcaccggcagcggcagagggaagagatgagcacatccttgatagaccacaccagcttgcctgcaaggcccttcagccttggggagctggtgcccatcttcacaaagctcgcagcagatgacacctctgctgtcgtgggctctccccacttcacctcactactaccctttgttgtgctgctgtcaaacagcagctccacgaggggtacccaggccaggccacaacaggatggggacctgctctaccccacaaacactcaaaactgtgttgtactcatcgctggtggcacaggtccacccacaacagggtag

SEQ ID NO: 2451 - DNA, 207 bp, Homo sapiens
  SIMILAR (150)..(100): 581254mologous to Homo sapiens Human secreted protein, SEQ ID NO: 7174,accession number G03093,Smith-Waterman Score=55.
atgaatatccctgataatatgcctgctttcagtggacatggatatacaagcatatttgatttaaaagcaaaaaggagaagagggaagaagaaagaaggggaagaagagattgaagaagagaaagaacagccaaaaggagaagagctggaagtagacagttcttgttctcagtttgagagaaaacgagaaagaaacagtcctgtttag

SEQ ID NO: 2452 - DNA, 2742 bp, Homo sapiens
  SIMILAR (1387)..(2739): 1001254mologous to Cloning vector pBACe3.6 levansucrase,accession number U80929,Smith-Waterman Score=2385.
atgtcctggccgcgccgcctcctgctcagatacctgttcccggccctcctgcttcacgtcctgccccaggtggatggctcgcatagctccacaggctttgtgaacttgtctggctgggccagacctgtccagttgccaaggtgtactcagagccccagtgatcccagaattttaacagtcgggatggaaggcttgcagagggcaaaaagagagaagcttgaaggcttcgtgctggcatttcttgtagggcagctccacaggaatctggaaaataagggtcctgtggctgcttttgcaatcctagtacactttgagaacgtcatgttccacggcttgggccctccggccctccgtagccgctcgactgtcgcgctgcaccagcttcctcctcggcgttcccacgcctatttgggcggattcttggcgccggaggaagaggcagggtcaccctctctccacgtcagagacctgactgtggagatggcggctcagaagataaacgaggggctggaacacctcgccaaagcagagaaatacctgaaaactggttttttaaaatggaagccagattatgacagtgccgcttctgaatatggaaaagcaggtatttttgactatagtccagttgctccagagatgcagaaactaccagaggccgttcagctaattgagaaggccagcatgatgtatctagaaaacggcaccccagacacagcagccatggctttggagcgagctggaaagcttatagaaaatgttgatccagagaaggctgtacagttatatcaacagacagctaatgtgtttgaaaaaacaattgctcaagtcttagttcatctacacagaaatgactatgtagctgcagaaagatgtgtccgggagagctatagcatccctgggttcaatggcagtgaagactgtgctgccctggaacagcttcttgaaggttatgaccagcaagaccaagatcaggtgtcagatgtctgcaactcaccgcttttcaagtacatggacaatgatgagggggaatcaagaagaaatcacctgcaacaccacaggccaagcctgatggtgtcactgccacggctgctgatgaagaggaagatgaatactcaggaggactatgctagtattttgcttgctgaaaagaaaagggaaacaaaggtcagctctgccccatgtctgctgctctcagggcagaacaagggaccacagatcccggtgataggagaaaggaactcaagatggtcttgtaccagcaatgtgctgctcatcccagaaatctcaacatttatcttaattctgatccaagtagtaaaccataccgtggggaacatcagatgcagggcctggctggctggggagcatccttgcagaagcggcatcggaggagcgactcaagccttcgcgaaagaaaataaccaaaaagcatacaaagaaacgtacggcgtctctcatattacacgccatgatatgctgcagatccctaaacagcagcaaaacgaaaaataccaagtgcctcaattcgatcaatcaacgattaaaaatattgagtctgcaaaaggacttgatgtgtgggacagctggccgctgcaaaacgctgacggaacagtagctgaatacaacggctatcacgttgtgtttgctcttgcgggaagcccgaaagacgctgatgacacatcaatctacatgttttatcaaaaggtcggcgacaactcaatcgacagctggaaaaacgcgggccgtgtctttaaagacagcgataagttcgacgccaacgatccgatcctgaaagatcagacgcaagaatggtccggttctgcaacctttacatctgacggaaaaatccgtttattctacactgactattccggtaaacattacggcaaacaaagcctgacaacagcgcaggtaaatgtgtcaaaatctgatgacacactcaaaatcaacggagtggaagatcacaaaacgatttttgacggagacggaaaaacatatcagaacgttcagcagtttatcgatgaaggcaattatacatccggcgacaaccatacgctgagagaccctcactacgttgaagacaaaggccataaataccttgtattcgaagccaacacgggaacagaaaacggataccaaggcgaagaatctttatttaacaaagcgtactacggcggcggcacgaacttcttccgtaaagaaagccagaagcttcagcagagcgctaaaaaacgcgatgctgagttagcgaacggcgccctcggtatcatagagttaaataatgattacacattgaaaaaagtaatgaagccgctgatcacttcaaacacggtaactgatgaaatcgagcgcgcgaatgttttcaaaatgaacggcaaatggtacttgttcactgattcacgcggttcaaaaatgacgatcgatggtattaactcaaacgatatttacatgcttggttatgtatcaaactctttaaccggcccttacaagccgctgaacaaaacagggcttgtgctgcaaatgggtcttgatccaaacgatgtgacattcacttactctcacttcgcagtgccgcaagccaaaggcaacaatgtggttatcacaagctacatgacaaacagaggcttcttcgaggataaaaaggcaacatttgcgccaagcttcttaatgaacatcaaaggcaataaaacatccgttgtcaaaaacagcatcctggagcaaggacagctgacagtcaactaa

SEQ ID NO: 2453 - DNA, 1071 bp, Homo sapiens
  SIMILAR (1015)..(842): 351254mologous to Drosophila melanogaster Mst84Dc,accession number X67703,Smith-Waterman Score=70.
atggtggaaggcaaagaggagcaagtcacatcttacatggatggcagcaggcaaagagagagtgaggaagacataaaagtggaaacccctgataaaaccatcagatcttggctcccacatgcaacacccattgtggagcaccaaaatgatctcattgcaggcagtgtgagaatgcagaaccagccaaaaggaagcactctccagtgcattattctcatgccgcaaagacctcctgggcagacattagaagatatggactattattattcctgtttctcagatgagaaaaacctaggtacaaagaagctgagttccttcccatggtcacacagcaaagaagtgaaggccacattcaaaggcaggtatcctggctcccatgcccttaaccgccacaccacactacctggcactgcctggattctccttctaggtggggaacttgcattcctcacagtgaaggatggaagccctttggccttgccctcccgcccagctgatgggatgagaggcagaaccagtgtcatgaatttgattctggaagatcctgaagtggatgccatgaaaaagcaaaaacgcaaaaaagaggaattgagaaccacggcctcaaggacctctctgcgctttggggaaacagacctgatttggtcctcctgggttcctgaaaagaagtcctctttacagccccaggcatctcaccgcctgccgtcaaggcgccagcgccagcgccagagtcaaggcactctggtgcaaccagcctccctggtgctctttgcttcccgttcacaaagcataaaacacacatggaacagcccattctgtgggctcttccttctcgtacgtaacacagacaatccaggcctgctctgcaacaagaatagattcttctggaatgttttccccatggctcaccctcatggaagcacaaaggccatcccacagaggggcacaaaggaaacagctatgacgagcaaggccaacacaacacaaaacaacacccacaagtaccacagagcaacgtgtgctgagtacgcagacttagaggctctccaagaatacagggattgggagtag

SEQ ID NO: 2454 - DNA, 1228 bp, Homo sapiens
  SIMILAR (223)..(188): 581254mologous to Drosophila melanogaster structural sperm protein,accession number Y00831,Smith-Waterman Score=48.
ctgcaggcctgagtggactgctcccgggaagccactttcatggcgtcccctctcaagggtgcccatctacctggagcgtcatcatcgtcactgctggagtcatgtctcctgttgccaatccaagctctggagacacaagtaccacaagaaaggtgttacccagaggcacttacccatcctccctgctgcaggggaggccacaccagctgccacagcaactccctgctccgtcctctgctttctcagaactaacctgggctctctggaatcagagaccttcaacaagtcactgctcacatttgcaaacgttcacatcaagagaggaccccctttccacgtgccactcccctctcttccggatcattgcagctctccctaccagccttatcaatgtggggctccaaccctacaggtcggtgattcacaaacaggcactgtcccaggttggagccactgccacgagcctgttctgcacagacgggaatgtttcctctgccttgtgagcgcagggctatcgggcactggaaatatgcctgatgtgatgagtggtccacagaacattggaccaactaaggcattaaagctctacattggggacaatccaggcctgctctgcaacaagaatagattcttctggaatgttttccccatggctcaccctcatggaagcgcaaaggccatcccacagaggggcacaaaggaaacagctatgacgagcaaggccaacacaacacaaaacaacacccacaagtaccacaggtattctttcatcttcaagatttgcaaacaggagcacattaatcttcacaacatccgtgttggggcctatgacaaggttctccgtgctccccagaggagccaggcactgggccgggatctcaacatttatcttaattctgatccaagtagtaaaccataccgtggggaacatcagatgcagggcctggctggctggggagcatccttgcagaagcggcatcgggccttcagagtgtgggccttgtacatttgcactggccacctgcctgtggagctaccgggactccagcacaaggtgtctgagccagacttcagcatgtggaagccaggtgtcaggggcttcagcctaggctgtgtgtccagcagcagccatgagccccctgcttacagacggaatgaaggaaacagggcagagagggcacattgcaagtctgtggagaagcagccacaaggggtgcgacatgagtag

SEQ ID NO: 2455 - DNA, 364 bp, Homo sapiens
  SIMILAR (180)..(13): 281254mologous to Bos taurus DR-beta chain MHC class II,accession number X87657,Smith-Waterman Score=61.
actcaaagccagatattgatgtctgcaggatccgtccttctgcacaacccatgctgtcaaccaggagctattctgtccccaccgactcaacgaggcagcaaccagttctgtacatgaagattccaagggatcccaaatggcacgtgttagaacagacacagagaaggcttgcccattgaagattggttcttcagccactgcttttcattctcataccaaacaagtgcatttttaagaactcgcgagagtcttgctactcttcaacagagaaagtcatctccaaattaatccacagtcaggagcacctcgtgctgcttttatatatcattaaagtcctgtaaaagcaagctcacggatctctgcc

SEQ ID NO: 2456 - DNA, 1119 bp, Homo sapiens
  SIMILAR (222)..(494): 301254mologous to Xenopus laevis homeobox-containing protein,accession number L36805,Smith-Waterman Score=85.
atggccctagctccccacggcctgtctccttcaatctggcctctcccctctgtccaggctttagagaaagcagctggtgaggtttccacaacaaggaaaagagaaagccaattcccagaagtattgggttggcagcttctcgagagcccatccctgggttaccggctccctgtgctttcggatggaggtcatgttgctcgtccacataaaagcccattcgagaatcattatcacccaagcagcttccagattggcggcttatcacttctgaagggtcccaaggcggccatggagaagtgccccaaagccttgtttgcttccttgggccaaagtttcctccaagccctaccagcttctctgcttctgcaggaagtttaccaggaaacaggtgcacaaaaggaagaatttgctgaggccctggcaaactggaaactgaatccaggtggccaaggtctaatcctcccctacaccagagtagcaagactctcgcgagttcttaaaaatgcacttgtttggtatgagaatgaaaagcagtggctgaagaaccaatcttcaatgggcaagccttctctgcttccctcttcctcccccaaatgcgaagatgtctccactataattgagcaatcacaaacggccccttccaatgtctcagggctccccgttgaacacccatgtggaataaggagtgaaggtgagctcactgaaatgcactcgatgccagttccaccttccacaccggagcagcgtcccgcagaccagggctggggcctatttgagggagtggagagagaagggttgcgggcttccagccaagctttaccctcactgaaagttcaggttcagggcccagtcccccagcgtgaaaaagggacccttataaagagacacagaacttccctggcagctctgatctgggggcttcctgtaggtgcaaagacctggttcttcagactccatccatggaaggagggaacaccagtcacggggagttcttcattcagtccccagaaagccttgagcacagttagctgtcacctaattgctgacaagcctattcaacgtgaaaacaacaaggatgaaggcctttatgatgatccacttccacttaatgaagagtaa

SEQ ID NO: 2457 - DNA, 585 bp, Homo sapiens
  SIMILAR (544)..(350): 341254mologous to Saccharomyces cerevisiae ORF YGR018c,accession number Z72802,Smith-Waterman Score=73.
ttaagaaaataaattgggatgcaaattgagaaagatatgtctcatttaaatttttttctaccatttacagaacttgaaggtctcttcacagactaatttcttatctcgagcatggtggttccccatcttttatttttttgagaaaaatgtacaaggctcaattccttgctgcttctcctggccgctgtcttggcctcctggctgcttcaaatcatcatgcaaaaagtattcacgggttcagaagattggtgaagacaatgagaaatcgactctgttctctgtgccagccctttcctttgccaaagcacttgctgtctctgagttggttcggtgaccagggtcatacttcccaatacttcactctttccacacagagaaatgaagcacaactccaataacagggtgagggtgcaagtcagggaccacagaagtcactactgggctcctgaaagcccaaggccacatttgggaaacgatctgcacttctggcaaaagtgcaagaggggcagtggtggccccagaagaaatattttaataaagaagatacacgaatggctaataagcacataaaaatgctctcgtgcc

SEQ ID NO: 2458 - DNA, 504 bp, Homo sapiens
  SIMILAR (238)..(360): 921254mologous to Homo sapiens embryonic lung protein,accession number AF006621,Smith-Waterman Score=192.
  misc_feature (1)...(504): n = a,t,c or g
atgaacagacacttctcaaaagaagatatttatgcagccaacaaacatatggaaaaaagctcatcatcactggtcattagagaaatgcaaatcgaaagggggtctttagagtcgcccaaagggctttcaagtcctcgaaggtctatccagcctgcagaactcaatacgaggaactgccttaacaagctagatagcaaatatttcatgctttggaggccaagaggtaatataaaggccatgatgaagganattcaagaagtgaaaactcctgaagaactagagacctttatgcttaaacatggagaaaatattattgatactttaggagctgaagtagatagacttgagaaggaactgaaagtcatggcaacagcaggtcagcagctgccgcagtcggaagggtgggcggcttcgcggcacgccctcgtgttctctgaggtgttgctcattgtctctggcctggctctccgcagacaggacacaccactgccactgcggatctga

SEQ ID NO: 2459 - DNA, 470 bp, Homo sapiens
  SIMILAR (383)..(454): 461254mologous to Peromyscus leucopus MHC cell surface glycoprotein,accession number M60613,Smith-Waterman Score=67.
gtgatggcattcaagtgggccactactacagccaaggcaacacatgctagaacctgtcaggtacctggggaatatcagaactgctgtctgatctctgaaattgaaattaatttcctcagtgactcaatacctactgccactcactcaagccctgcaagttcaagccaaatcatcctgccaccgcaggaatgtgatgggtcacgctgctacctactgaaaatggggatttgggttaactagagtaaaatacagtaagaatgggtgagaggagagaaaaagaatacttcagtttaggaagcataatactacttaaaatttcctgagaaagaatttcttcccttggaaggtgcgtcttcccaggaggttgtgtcctcacagggggtgtcctcacaggggaaatagcccacagagaggatcaggttggaattggatttggagctgtcgtcctctatgtcgctgttagaggatga

SEQ ID NO: 2460 - DNA, 604 bp, Homo sapiens
  SIMILAR (2)..(55): 881254mologous to Homo sapiens Alzheimer's disease protein encoded by DNA from plasmid pGCS11037,accession number W21581,Smith -Waterman Score=78.
gcactccagcctgggtgacagagcaagactccgtctcaaaaaaaaccccaaaaaacctgtggcttctgccttgtcttctgtccctgggattactccctctgggagaaagcaggtgtcatgtcaaggggacacccaaacagctctgtggagagttcagtgccatgagggactaagatctcctccctacagcctgtgcagccagtgtcgggaacttgagggtgaatccccaagcacagtgaaatcttcggatgacagcagccccagcagcatcttgattgccgcctcccttcctggtgtcacagatcagccaaaacaatctgttgacctcaatcctaaaggtggattgttcgctcttgcctccagtggtttggaacaaaaggcagcactggtaatagcccctgacgaggttcatcttcttaactgtaacagtgaggcaattcaggggcagacagagtgtcccccagagctatgcatggcacaggacatgctcaggccccatgcccactctgacaatgcgcggtgcttggagaagcttcctccccaccggggagataggcagttcctcactcccagagccctagctcaggccaagacttggatctaa

SEQ ID NO: 2461 - DNA, 594 bp, Homo sapiens
  SIMILAR (28)..(147): 921254mologous to Homo sapiens Human secreted protein, SEQ ID NO: 6516,accession number G02435,Smith-Waterman Score=200.
atggagagtcgattctgtcagaacagtttctgcctggatatgacaaatgtcgacctggagctgttggggccatctgggcagaaaggctgtccgggaatgaagtcaaagagatggaagaagagaaaaagaggccggcgtctggggtcatggtttgagcccccgaatccaactgtacctgaagccctgtctgtttcagaaacagaaggcaataaattcagcctttgccttaagcccgtcaagccagtctgggcacctgatcagaacctgtggctcatcctctgcaaagtgggcatgaggcaccaccagaggctgcggagtggccagaatgaggcaacatatggagggggtgtggcacacgccttgctgctggggctacctttcacccacatgcaggcttacttgcctgcacccccggcatggcccaagaaccagttctctgagttcagccaggacttccaagaacctagcacagccagggtggttgtgagggccgtaggcagcgacccaacactccctgccatccaggtgggctgcggggccctggttctcaaccctaatggggcctggggctggtctaacgcgcaggggagctaa

SEQ ID NO: 2462 - DNA, 477 bp, Homo sapiens
  SIMILAR (134)..(475): 951254mologous to Homo sapiens FKSG67,accession number AF338195,Smith-Waterman Score=587.
  misc_feature (1)...(477): n = a,t,c or g
gcccactgccaatttatttatttatttatttatttatttttattgatcattcttgggtgtttctcgcagagggagatttggcagtgtttgtgtccctgggtacttgagattagggagtggtgacgactcttggcatgctgccttcaagcatctgtttaacaaagcacatcttgcaccgcccttaatccatttaaccctgagtggacacagcacatgtttcagagagcacagggttgggggtaaggtcacagatcaacaggatcccaaggcagaagaatttttcttagtatagaacaaaatgaaaagtctcccacgtctacctctttctacacagacacagcaaccatccgatttctcaatcttttccccacctttcccgcctttctattccacaaaaccgccattgtcatcatggcccgttctcaatgagctgttgggtacacctcccagacagggtggtggccgggcagagggggn

SEQ ID NO: 2463 - DNA, 2328 bp, Homo sapiens
  SIMILAR (121)..(2292): 951254mologous to Homo sapiens putative p150,accession number U93563,Smith-Waterman Score=3595.
atgactcttaaggagcatgctgccttcaagcatctgtttaacaaagcacatcttgcaccgcccttaatccatttaaccctgagtggacacagcacatgtttcagagggcacagggttggggaaatacaaactaccatcagagaatactacaaacacctctatgcaaataaactagaaaatctagaagaaatggataaattcctcgacacatacactctcccaagactaaaccaggaagaagttgaatctctgaatagaccaataacaggatctcaaattgtggcagtaatcaatagcttaccaaccaaaaagagtccaggaccagacggattcaaagctgaattctaccagagatacaaggaggaactggtaccattccttctgaaactattccaatcaatagaaaaagagggaatcctccctaactcattttatgaggccagaatcatcctgataccaaagccaggcagagacacaaccaaaaaagagaattttagaccgatatccttgatgaacattgatgcaaaaatcctcaataaagtactggcaaaccgaatccagcagcacatcaaaaagcttattcaccatgatcaagtgggcttcatccctgggatgcaaggctggttcaacatacgcaaatcaataaatgtaatccagcatataaacagaaccaaagacaaaaaccacatgattatctcaatagatgcagaaaaggcctttgacaaaattcaacaacccttcatgctaaaaactctcaataaattaggtattgatgggacgtatctcaaaatattaagagctatctatgacaaacccacagccaatatcatactgaatgggcaaaaactggaagcattccctttgaaaactggcacaagacagggatgccctctctcaccactcctattcaacatagtgttggaagttctggccagggcaatcaggcaggagaaggaaataaagggtattcaattaggaaaagaggaagtcaaattgtccctgtttgcagacgacatgattgtatatctagaaaaccccactgtctcagcccaaaatctccttaagctgataagcaacttcagcaaagtcttgggatacaaaatcaatgtacaaaaaccacaagcattcttatacaccaataacagacaaacagagagccaaatcatgagtgaacttccattcacaattgcttcaaagagaataaaatacttaggaacccaacttacaagggatgtgaaggacctcttcaaggagaactacaaaccactgctcaatgaaataaaagaggatacaaacaaatggaagaacattccatgctcatgggtagaagaatcagttatcatgaaaatggccatattgcccaaggtaatttacagattcaatgccatccccatcaagctaccaatgactttcttcacagaactggaaaaaactactttaaagttcatatggaaccaaaaaagagcccgcatcaccaaggcaatcctaagccaaaagcacaaagctggaggcatcacactacctgactgcaaactatactacaaggctacagtaaccaaaacagcatggtactggtaccaaaacagagatatagatcaatggaacagaacagagccctcagaaataacgccacatatctacaactatctgatctttgacaaacctgagaaaaacaagcaatggggaaaggattccctacttaataaacggtgctgggaaaactggctagccatatgtagaaagctgaaactggatcccttccttacaccttatacaaaaattaattcaagatggattaaagacttaaacgttagacctaaaaccataaaaaccctagaagaaaacctaggcattaccattcaggacataggcatgggcaaggacttcatgtctaaaacaccaaaagcaatggcaacaaaagccaaaatggacaaatgggatctaactaaactaaagagcttctgcacagcaaaagaaactaccatcagagtgaacaggcaacctacaaaatgggagaaaattttcgcaacctactcatctgacaaagggctaatatccagaatctacaaagaactcaaacaaatttacaagaaaaaaacaaacaaccctatcaaaaagtgggcaaaggacatgaacagacacttctcaaaagaagacatttatgcagccaaaagacacatgaaaaaatgctcatcatcactggccatcagagaaatgcaaatcaaaaccataatgagataccatctcacaccaattagaatggcaatcattaaaaagtcaggaaacaacagggacatggatgaaattggaaatcatcattctcagtaa

SEQ ID NO: 2464 - DNA, 924 bp, Homo sapiens
  SIMILAR (553)..(810): 681254mologous to Mus musculus Pro-Pol-dUTPase polyprotein,accession number Y12713,Smith-Waterman Score=291.
atgactcttaatgagcatgctgccttcaagcatctgtttaacaaagcacatcttgcaccgcccttaatccatttaaccctgagtggacacagcacgtgtttcagagagcacagggttggggaagaaacagcttccccatccccagtagtggcaagatcccctccaagacccatgctgccatcagcctttccacctttgtctgaggagataaaccctgcactaactgaggcaacagtgatggcctctcctgaggcagctacgaggcaagataatgttgattctcctcaatacccaccccgaacacccttgtgtgcttctagacctataactagattgaagtcccagtgggcccatagaggtatcacactcgttcattacattgatgacattacactgattggatccagtgagcaagaagtagcaaacatactggacttattgcagagacgaacactgagccctcaatatggccctagtcctcagggtgttcagccagttatctggtggcaggttgattatactgggcctcttccattatggaaagggcagagagccaggaatcatgggtccaggaatcaaggagtggaattggaagtggcaacactcaccatcacccctagtgacccactaacaacatatttgcttcctgtttctgtgacattatgttctgctggcctagaggtcttagtttcagagggaggaatgctgccaccaggaaacatagcaatgattcaattaaactggaaattaagattgccacctggacactttgcacttctcctacctttacaccaacagcctaagaagggaggccatgtaaaatgtacctgcttccctttcaccttccccgataattgtaagtttcctgaggcatccccagaagcagaagctgctatgcttcctgtacagcctgtagaaccatga

SEQ ID NO: 2465 - DNA, 2703 bp, Homo sapiens
  SIMILAR (1183)..(1953): 951254mologous to Escherichia coli UDP-N- acetylmuramoylalanine-D-glutamate ligase,accession number D10483,Smith-Waterman Score=1297.
atgactcttaacgagcatgctgccttcaagcatctgtttaacaaagcacatcttgcaccgcccttaatccatttaaccctgagtggatacagcacatgtttcagagagcacagggttggggacacaccacagacagagaggaggaagacaagaacaaagagaaagagccacagacaaacaaccaagacacaaacacgaaagaaacaaacaaacaagaaacaaacacaaaacaaaacaacaggacaaacacagagagagccccaagaagagaggacgaaaaccacaccccacaacagcaaagaacacaggaacaggaaagcaaagggacacgaggcactaactgacagcaccaaggacggggaggcagagaagaccgaaagaggaagaacgtcgcggcacacagggactgcctgcgttacaagcaggacgggaaacgccggacaggcagacacgggggaccgcgagcgggagcgggcggacgacgagagacccaacgaacaaaaaacagccgaaccgaaggagggagcgaaagcgccgcaagcctatccaaatcaggcagtaagggcagagacagaagctgtgtgcttgggggagagagagaaggaagtttgcagacagctttgccttggaagctactaccagcacccacctcccctccccgccacccacaataaatcacagtactgggtccaactccaaacagtaaagcacaaagagaaattccttccatatgagggaagagaaaaaaccggagatagtaaagaacggaactttcgcttcgcctgcaatcgctttcgccagcagcgttttaccggtacccggaggaccgaccatcaagacgcctttcgggatcttaccgccgagtttctggaagcggctcggctcgcgcagatactcaaccagttcagcaacttcttcttttgcttcgtcgcagcccgcaacgtcagcaaaggtcgttttgatctgatcttccgtcagcatgcgcgctttgctcttaccaaacgacatggcacctttgccaccgccgccctgcatttgacgcatgaagaagatccagacaccaatcagcaacagcatcgggaaccaggagatgaagatagaagccagcaggcttggttcttcaggcggttcaccgacaaccttgacgttcttggtcaacaggttaccaacgaaatctgcggtagcagcgacattctgaacgtgactgaagatcatatggatcgctatccgtttggtttacaacagtatcgtgcagcaaaactgcgcatttacgaaaacgcgaaagtttgcgtggttaatgctgatgatgccttaacaatgccgattcgcggtgcggatgaacgctgcgtcagctttggcgtcaacatgggtgactatcacctgaatcatcagcagggcgaaacctggctgcgggttaaaggcgagaaagtgctgaatgtgaaagagatgaaactttccgggcagcataactacaccaatgcgctggcggcgctggcgctggcagatgctgcagggttaccgcgtgccagcagcctgaaagcgttaaccacattcactggtctgccgcatcgctttgaagttgtgctggagcataacggcgtacgttggattaacgattcgaaagcgaccaacgtcggcagtacggaagcggcgctgaatggcctgcacctgggtggcgatggtaaatcggcggactttagcccactggcgcgttacctgaatggcgataacgtacgtctgtattgtttcggtcgtgacggcgcgcagctggcggcgctacgcccggaagtggcagaacaaaccgaaactatggaacaggcgatgcgcttgctggctccgcgtgttcagccgggcgatatggttctgctctccccagcctgtgccagccttgatcagttcaagaactttgaacaacgaggcaatgagtttgcccgtctggcgaaggagttaggattcagtatcctggtctggatctccacggcgctaaagggctgggtgatgggctcgcgggaaaaagataccgacagcctgatcatgtacgatcgcaccttactgtggctgaccttcggcctcgcggcgattggctttatcatggtgacctcggcgtcaatgcccatagggcaacgcttaaccaacgatccgttcttcttcgcgaagcgtgatggtgtctatctgattttggcgtttattctggcgatcattacgctgcgtctgccgatggagttctggcaacgctacagtgccacgatgctgctcggatctatcatcctgctgatgatcgtcctggtagtgggtagctcggttaaaggggcatcgcgttggatcgatctcggtttgctgcgtatccagcctgcgagactacaagcggtccgctaccagatctacgttggcactgatgaacctgtctccacaaaaaatacaaaaattagccagacatgcagacaacacaaatctaggcgtttgccatttcccacgttgggggtccctttgttgttcgccgttttcggccacgtatcgccctcgactaagttacgggactttttggggaatttaggtttcgcgtggaccggcgagtaccctggcacccacgtctcagattttactcaccgcgttctgtgctttagtgatggagctgtggagtttttgtttaatgatatagcttcagttttacaagataaaaagagttacagagatggatggtag

SEQ ID NO: 2466 - DNA, 1659 bp, Homo sapiens
  SIMILAR (1565)..(1657): 961254mologous to Homo sapiens FKSG65,accession number AF338193,Smith-Waterman Score=166.
tgagttcccttagtatttattgatcatctgtgggtgtttctcaaagagggggatgtgtcagggtcacaagacaattgtggggagagggtcagcagacaaacacgtgaacaaaggtcttggcatcatagacaatgtaaaggattaagtgctgtgcttttggatatgcatacacataaacatctcaatgctttacaaagcagtattgctgcccgcaggtcccacctccagccctaaggcggtttttccctatctcagtagatggagcatacaatcgggttttataccgagacattccattgcccagggacaggcaggagacagatgccttcctcttgtctcaactgcaagaggcattccttcctcttttactaatcctcctcagcacagaccctttacgggtgtcgggctgggggacggtcaggtctttccccttccccaggaggccatatttcaagactgtcaacatggggagaaaccttggacaataccctggctttccctaggcagaggaacaaaagcacccaaggaggaaaaagaggcctgagatttccacgaattacaagtgaacttcctgtcctgggtaaacttccggaatcaacaacaggaagacccaatcagaatcttcctccgggagccaatgggagagcacattacaaagagccaatcccagcgccgctgtcactgttatggtcctgtcagggtgccggcgtcgtggtgcttgggtggtcgccaccaagaagactttggtggggtagtctcggggcagctcagcggcccgctgtgcccgtttctggcctcgctcgcagcttgcacgtcgagactcgtaggccgcaccgtagggcgagcgtgcgggtcgccgccgcggccgcctcggggtctgggcccagccgcagcctcttctaccgcggccggttgggagtcgccgcgagatgcagcctccgggcccgcccccggcctatgcccccactaacggggacttcacctttgtctcctcagcagacgcggaagaaagagtctccggggtacagtgaagagtatggattggaaggagacaagaatgactggggggagggcagtttgtacaccattataatcatgcagacaggagttgatggtttgcatgagcttgctactggtggtagaaatgatctcagtggttcaatagcatccccagatgtcaaattaaatcttggtggagattttatcaaagaatctacagctactacatttctgagacaaagaggttatggctggcttctggaagttgaagatgatgatcctgaagataacaagccactcttggaagaattggacattgatctaaaggatatttactacaaaatccgatgtgttttgatgccaatgccatcacttggttttaatagacaagtggtgagagacaatcctgacttttggggtcctctggctgttgttcttttcttttccatgatatcattatatggacagtttaggcatctgtttaacaaagcacatcttgcaccgcccttaacccatttaaccctgagtggacacagcacatgtttcagagagcacaggtttggggacacggcaaccatccgatttctcaatcttttccccacctttcccccctttctgttccacaaaaccgccattgtcatcgtggcccgttctcaatga

SEQ ID NO: 2467 - DNA, 1757 bp, Homo sapiens
  SIMILAR (456)..(833): 531254mologous to Homo sapiens FKSG64,accession number AF338199,Smith-Waterman Score=259.
ccttctgggttcgggcggttctcctgcctcggcctcccgagtagatgggattgtaggctcctcccaccacgcccggctaatttttgtgtttttagtggagacggggtttccaccatgttggccagcgtggtcttgaactcctgacctcaggtgattcaccagcctcggcctcccaaggtgctgggattacaggtgtgagccactgcacctggcctattattatttttaaatttttttttttaattgatcatttcttgggtgtttctcaccagagggggatttggcagggtccataggacaatagtggagggaaggtcagcagataatctgcaagtgaacaaagaaacaagtgaacaaagggtctctggttttcctaaggcagaggaccctcgcggccttcccacagtcgtttagtgtcccttgggtacttgagatcaagggagtggtgatgactcttaacggagcatgctgcctttcaagcatctgtttaacaaaagcacatcttgcacccgccccttatccatttaaccctgagtgggacacagcacatgtttcaggagagcacggggctggggggtggggggtaaaggtcacagattcaacaggatcccaagggcagaaagaaattttccttagtacagaacaaaaatgggagttctccctattgtctacttctttccacacagacacggcaaccatccggttttctcaatcttttcccccacctttcctggcctttctattccacaagtaccgccattggtcatcctggccagttcctcaatgagctgttgggtacacctcccagacttggtggtgggccgggcagaggggctcctcacttctcagactgggcagctgccgggcggaggggctcctcacttctcagacggcggtggccgggcagagacgctcctcacctcccagacggggtcgcggccgggcagaggcgctcctcacatcccagatggggcggcggggcagaggcgctccccacatctcagacgatgggcggctgggcagagacgctcctcacttcctagacgggatggcggccgggaagaggcgctcctcacttcccagactgggcagctgggcagaggggctcctcacatcccagacgatgggcggccaggcagagacgctcctcacttcccagaaggggtggcggccgggcagaggctgcaatctcggcactttgggaggccaaggcaggcggctgggaggtggaggttgtagcgagccgagatcacgccactgcactccagcctgggcaacattgagcattgagtgaacgagactccctctgcaatcccggcacctcgggaggccgaggctggcagatcactcgcggttaggagctggagaccagcccggccaacacagcgaaaccccgtctccaccaaaaaaatagaaaaaccagtcaggcgtggcggcgcgcgcctgcaatcccaggcacttggcaggctgaggcaggagaatcaggcagggaggttgcagtgagccgagatggcgggagtacagtccagcttcggcttggcatcagagggagactagggaaaggggagaggggagaggttagtattttcaaaaatcatcatatagtacgtggttacacaactctgaatatactaaaacacattgaattgtatactttaaaggagtgaactatatctcaatatataaggggtgagttatagctcaataaagctgttaacaacaaaacaaaaatgccataccaaaaaaaaaaaaaaaaa

SEQ ID NO: 2468 - DNA, 1358 bp, Homo sapiens
  SIMILAR (1204)..(1287): 711254mologous to Homo sapiens Human secreted protein encoded by gene 75,accession number Y76198,Smith-Waterman Score=96.
gctattcaatatgaacttcagtttttgttggaatccaatgcacaaatgatgatcgttgccagcccaacagaaaatggacaggtacttcgtgtaattccacctacccagacaggaatggcacaagtgattatacctcaggggcaacttgtggatgtgaatagtcctcgggatgtccctgaagagaaacccagaaacagaaacttaccaactgtaagagtggatactctatcaaacaataccagcaattacattcttcatcctcaaacatccttcccattgcccaaaaagacagtgatcggaatgctggaacaaccccttctggggcctcttcagccactttcttctaatacacctatatgggcctgccgtcttatgagctgtgagaaaattggagattcataccgtggctactgtgtaagtgagactgaattagaaagtgtcctaacatttcacaagcagcaaacacagagtgtttgggggacccgtcagtctccaagcccagccaagcctgctacacgcttgatgtggaaatcccagtatgttccatatgatggaatcccatttgttaatgcagggagtagagctgtggtaatggagtgtcagtatgggccaagaagaaaaggtttccagttaaaaaaagtcagtgagcaggaaagcaggtcttgtcagctctacaaagccacttgtccagctcggatttacattaaaaaggtacagaagtttcctgaatatagagttcctacagaccccaaaattgacaagaaaattatcagaatggagcaggagaaagcttttaacatgctaaagaagaacttggtagatgctggtggtgttcttaggtggtatgtacagttacctacacagcaagctcatcagtatcatgaattagagactccctgcctcactttgtcaccttctccttttcctgtgtcttctcttgaagaagaggaaactgcagttagagatgagaattgtgcattaccctcacgtttacatcctcaagtagcacataagattcaagaattagtatcacagggaatagaacaagtgtatgcagtaaggaaacagctaagttcatgtgagagctggctgtttaacagagttcggcccccttccctctctcacccatgcgatgcctgctcccacttcaccttcctccatgatggaagaaacttgaacccctcatcagatgcagatgctgcaccatgcttcttgtacagcctgcagaactgtgagccaaataaactgcttttctttataaattacgcagtctcaggtattcctttatagtaacacaaaatggactaacagaggtgccaaagcaattcattggtggaaaggactgacttttaacagac

SEQ ID NO: 2469 - DNA, 776 bp, Homo sapiens
  SIMILAR (26)..(253): 331254mologous to Arabidopsis thaliana putative protein,accession number AL137082,Smith-Waterman Score=118.
ggatgaacctgacttcaaaaggagctgtgctgtaggtttctcaggagttttgtttgctttgaaaggtcttaacaaccattattgccctggaggctttgtcaacattttgggctttcctgtaccgaacagatttgcttgttgggtcgaacttgtggctattcatttattctcaccagggacttccttcgctgggcatctggctgggattcttgttggactaatgtacactcaagggcctctgaagaaaatcatggaagcatgtgcaggcggcttttcctccagtgttggttacccaggacggcaatactactttaatagttcaggcagctctggatatcaggattattatccgcatggccggccagatcactatgaagaagcacccaggaactatgacacgtacacagcaggactgagtgaagaagaacagctcgagagagcattacaagccagcctctgggaccgaggaaataccagaaatagcccaccaccctacgggtttcatctctcaccagaagaaatgaggagacagcggcttcacagattcgatagccagtgaggtggcatcttgggaagacatggcctattcgtgtaattattgcccatttggctcattccccaagcccctaattcattttaattcattttaaacaaaagcagagtacaccggtattgctccagatcgctcacatcacctgggacagtcccatggcccctatgagtcaactcacagcttgcggggagtgggccttctcctggccttgttcttgctcata

SEQ ID NO: 2470 - DNA, 554 bp, Homo sapiens
  SIMILAR (237)..(371): 401254mologous to Homo sapiens Human secreted protein, SEQ ID NO: 7725,accession number G03644,Smith-Waterman Score=66.
ctgccccctgggtttccccccagcccatgcccgtcaattaccctttccttgagccccctctgtgtcggggaccaatgctttggatactgggataggcaaaccatgagtaaggaagagaaatggccccacattttgtggcacccccagtctgaaactgcaaattgcatgccagaaagacacacaaagggcagagaaaggagcagctagaaactctagatatccatgttgaggagcctggtggggggttggggggcttcatggaggaggggagtatgaagcagattcgggacagtgaagcagaacagggctggagagaaaggaaggaggtgagaaggacccatgtgaagttttcgaggttggaaagaacaaaacctataccgcagtcctcttaagtgcttttagtctgacagtgtctgtatcagtggccttgtgcagctagccatgtggctcctgtgggtgtatgtgcggcttggcaggggctgtggcatgggagcaggggcctgggttcctgtttgtctactattatactaaatttgcacaagcggacgcgtggg

SEQ ID NO: 2471 - DNA, 387 bp, Homo sapiens; identical to SEQ ID NO: 536
  SIMILAR (1)..(351): 481254mologous to Homo sapiens HSPC164,accession number AF161513,Smith-Waterman Score=189.

SEQ ID NO: 2472 - DNA, 400 bp, Homo sapiens; identical to SEQ ID NO: 1054
  SIMILAR (391)..(2): 931254mologous to Homo sapiens protein x 0001,accession number AF117231,Smith-Waterman Score=593.

SEQ ID NO: 2473 - DNA, 861 bp, Homo sapiens
  SIMILAR (1)..(861): 871254mologous to Homo sapiens dJ1153D9.1 (A novel protein (protein X 0001)),accession number AL109806,Smith-Waterman Score= 1285.
ggaacaatccccaagaggcatgaactggtgaaggggccgaagaaggttgagaaggtcgacaaagatgctgaattagtggcccaatggaactattgtactctaagtcaggaaatattaagacgaccaatagttgcctgtgaacttggcagactttataacaaagatgccgtcattgaatttctcttggacaaatctgcagaaaaggctcttgggaaggcagcatctcacattaaaagcattaagaatgtgacagagctgaagctttctgataatcctgcctgggaaggggataaaggaaacactaaaggtgacaagcacgatgacctccagcgggcgcgtttcatctgccccgttgtgggcctggagatgaacggccgacacaggttctgcttccttcggtgctgcggctgtgtgttttctgagcgagccttgaaagagataaaagcggaagtttgccacacgtgtggggctgccttccaggaggatgatgtcatcatgctcaatggcaccaaggaggatgtggacgtgctgaagacaaggatggaggagagaaggctgtagagcgaagctggaaaagaaaacaaagaaaacccaaggcagcagagtctgtttcaaaaccaggatgtcagtgaaagaagccccagggccatcaaaagttaagacaggggaagcctgaagaagccagcctttgattctagagagaagaaaaccaacttggctcccaaaagcacagcaatgaatgagagctcttctggaaaagctgggaagcctccgtgtggagccacaaagaggtccatcgctgacagtgaagaatcggaggcctacaagtccctctttatcactcacagctccgccaagcgc

SEQ ID NO: 2474 - DNA, 1322 bp, Homo sapiens
  SIMILAR (1072)..(731): 401254mologous to Homo sapiens dJ1153D9.1 (A novel protein (protein X 0001)),accession number AL109806,Smith-Waterman Score= 145.
  misc_feature (1)...(1322): n = a,t,c or g
acatcgatacgactttttttttttttttttttttttttttttggaagaggcagaccagctttattttttgacctcaatcaccgggtgcccaactatgactttgctatcttcgagaatgatgagatgggggcacactcccctaacagtatttagctagaccaacaaggatcctggctcctcccagggctggtagcagagggacgaggcccttccgaagcttctagtgggcacaggggtttttaaaatccatcctttttaaagcccagtttcacttggccttacttgattttattgctggtagcaagatcattaggaattttagttaattaatatgtgccaactcttgcaccgggtgagggactctgggagtctcttgttactgccaaggcattaaaaagtgccaggcccacaggcnttacctggggccatggaaaaggacccaaatggcaccctggcagggtgggaaggcaaggcatggacctcggggccactgtgcaagcccctccccatgtcccccccctgggaaccgaacacgccctcacatcaaagaggtggcccacacccagcttgaaggctggcccaggaacaccttttatgaacaacaaaaactaatagaaaagaacacacaagcagcgcaactcagaggccacaaagcggacctgccctacgtggaaaacttaaacaaccttctggggcaggagccggtggcagtgcgggctttcagaagcaagtaggacgtgtggggtgaaccccagtgggccagactcctcccttggaggcgctttggcggagctgtgaagtggtaaaagagggacttgtaggcctccgattcttccactgtcaagcgatggacctctttgtggctccacacggaggctttcccagcttttcccagaagagctctcattcattgctgtgcttttgggagccaagttggttttcttctctctagaatcaaggctggcttcttcaggcttccctgtcttaacttttgatggccctggggcttcttgcactgacatctggttttgaaacagacctctgctgccttgggtttctttgttttctttttcccacgtcgctctcagccttctctcctccatccttgtcttcagcacgtccacatcctccttggtgccattgagcatgatgacatcatcctcctggaaggcagccccacacggctttctggtcaaagccttggtttggaaagttcccgcacacagcaaagtgtcagcgtagcaggttaagagtgctatcacttgcaaggctggtgcctggatggtgtctgggaacttggattttgggagggttcccgccat

SEQ ID NO: 2475 - DNA, 634 bp, Homo sapiens
tggtagtgcaatggattatcaatggcatatgacaaatgttgagataaaatttggctttgtaatcagcgaggcacactcctgaatcagaaactgtgtctgatggaaatctttgccactgcttttaccatcgccactgaaatccacatgtgaaaataggcagcgtaataaatgcctgtctgcctcaggaccgtgccgattcacaatatgctgtatttcctgctggctggctcaggtaggtttttcttggttaaattgtccaccaggtagctgatttgagacaaggccagcgagagcgagtcaagattcattgctggttggggcggaagcacggcggccgagcccggcgcaaaatcaccattattcccctttagtcacctcagaggcaggttaatgctttctttgtaattaggctatatctggtatctgtataatatcttcagttcttctttaccaggggtcttactctgttctgaaacatggcacctcaggcggctccggcagcgctgcacacaggacactcctgggtccccgactccggctctcctcgaacccctcttcggttacactccgctatgtttctctacaaaatggcgccggaggtcgcgcgctcacgtcgcggcctttccccacgaaa

SEQ ID NO: 2476 - DNA, 450 bp, Homo sapiens
  SIMILAR (347)..(424): 421254mologous to Drosophila americana texana transformer,accession number AF208156,Smith-Waterman Score=48.
gttttttttcccaaatcagcaaaacctggtgttcaggaacgccaaaatattccaagcctctcttcttagatatccaagtatgagagacattgatgaagcaaatacagaagccaattcaaaggaacattatcagtttcttggtgccttcctccgaagccgagcccccgggaatcaccagaacatcaagcggagggcgttaggaatcctcaatcaaattccagactgcgccactccttgtgcagatcgctcagacgtctacccagacctcgacccagtttccacccgcgcgcctcggcttgcagccacaggcggtaacgatgccctcagcgaggaataagaggtcaacccggtgcccagccctggagcctcacgctcagccagggtaatgttatgggaagcgcgcccccgtcctcctgcgcccaaccaacccacctgctagtccctacgaaa

SEQ ID NO: 2477 - DNA, 1233 bp, Homo sapiens
  SIMILAR (283)..(936): 651254mologous to Homo sapiens BRCA1 modulator protein 091- 132Q20,accession number W37883,Smith-Waterman Score=681.
atggaatactatgcagccataaaaaaggatgaattcatgtcctttgcaggaccctcagctgcaggtctgttggagtttgctggaggtccactccagaccttgtttgcctgggtatcaccagcagaggctgcagaacagcaaatattgcagaacagcagatgttgctgcctgatccttcctctggaagctttgtctctgagggacacctggctgtttgaggtgtcagtcggcccctactgggagtttgtgaatagcacaatggaagaagctggactttgtgggttaagagagaaagcagatatgttgtgtaactctgaatcacatgatattcttcaacatcaagactcaaattgcagtgccacaagtaataaacatttattggaagatgaagaaggccgtgactttataacaaagaacaggagttgggaggaacatatgcagcagaaaaaagaggaggaagaagttcttaaagaagtaactgcacatttccaaattactttaactgaaactcaagcccagctggaacagcatgaaatacacaatgccaaactgcagcaggagaacatggaaatgggagaaaagctaaagaagctcactgaccagtatgcactgagggaagagcaaattaataaagcgttcaaacataaggaattacgacaacagcttgtagatgccagacttcaacaaacagcacagctgataaaagaagctgatgaaagacatcagagagagagagagtttttattaaaagaagcaacagaatcgaggcacaaatatgaagaaatgaaacaagaagaagcacaactgaaagagcagcttttcctttatatggataagtttgaagaattccagactaccatggcaaaaaccaatgaactttttacagccttcaagcaggaaacggaaaagaaaactattcgtgataaaaattataaggtctttcaaataaaattggagcggttagagaagctgtacaaggctcttcaaatagaaaggaatgaactcagtgagaaactgggaattctgaaagggcaggtctctgtgaaagtagcagatgtagatttagcagtgcctgtgacgcattcctgtgctgacctggattcttccaatatgctgaacacttcctctaaaagagccccaggagtccatctggaggctgaccccaaaggaatgaatgaagtaaaatgctactcaaaagccctctccacaggatctcctctaggcattgattaa

SEQ ID NO: 2478 - DNA, 2526 bp, Homo sapiens
  SIMILAR (2349)..(2393): 801254mologous to Homo sapiens BCL-6 corepressor,accession number AF317391,Smith-Waterman Score=58.
atgggatataatctcctggtgtgccctttgctaaggccattggaaaagctcggtattagggtggtagtgtcccgaatttccaggtaccttctgtcacagcttccctttgataggaaagggaattccccaaccccttgtgcttcccggtttgtgaatagcacaatggaagaagctggactttgtgggttaagagagaaagcagatatgttgtgtaactctgaatcacatgatattcttcaacatcaagactcaaattgcagtgccacaagtaataaacatttattggaagatgaagaaggccgtgactttataacaaagaacaggagttgggaggaacatatgcagcagaaaaaagaggaggaagaagttcttaaagaagtaactgcacatttccaaattactttaactgaaactcaagcccagctggaacagcatgaaatacacaatgccaaactgcagcaggagaacatggaaatgggagaaaagctaaagaagctcactgaccagtatgcactgagggaagagcaaattaataaagcgttcaaacataaggaattacgacaacagcttgtagatgccagacttcaacaaacagcacagctgataaaagaagctgatgaaagacatcagagagagagagagtttttattaaaagaagcaacagaatcgaggcacaaatatgaagaaatgaaacaagaagaagcacaactgaaagagcagcttttcctttatatggataagtttgaagaattccagactaccatggcaaaaaccaatgaactttttacagccttcaagcaggaaacggaaaagacccctcttcgcagcaccttaagtctgcccaggttctcagccttcctctggcagttgtttccctctgctgattttgcaggcaactgccatgtcctggaccatgggccctatggaagagatgattacttctgcccattaaggcatagtcctggaaacaaacagcacaattcctttaaagccctaaaggatgaagatcttcctgtagagaagtatttaatggaaaggcagcctgtaggtgagccagctgccgaccaggtagctatggatgtgatgcacagccccatcctccaactggaaaggaaacacaaagtctcaagtgacagcaaccagacagagactactgcagagaagttgccagaggactctttcctaaaaaacaagcaaaaacaggtttatatagaccacagtgcaattaaactagaactagaactcaggattaagaaactcaataaaaactgctcaactacacggaaactgaacaacctgctcctgaatgactactgggtacataatgaaatgaaggcagaaataaagatgttctttgaaaccaatgagaacaaagatacaacataccaaaatctctgggacacatttaaatcagtgggtagagggaaatttatagcactaaatgcccacaagacaaagcaagaaagatctaaaattgacacccttatgtcacagttaaaagaactagagaagcaagagcaaacacattcaaaagctagcagaagactaaaccaggaagaagttgaatccctgaatagaccaataacaggctctgaaattgaggcaataattaatagcttaccaaccaaaaaaatccaggaccagatggattcacagccaaattctaccagaggccctccaccgaagaataaggttttatccaacaatgcaagcagccaaaagccgactcactcaagctgcataccattgttgaggctgcctgataagcagcagaaagttaatgagagcattaagacagacatgctgtgcacagacaaggaagaggagtgccctgctgcctccctgctgcagaaatacaccaataacaaactgatggatgtgacgcctgtaccaatcaacagcttcaacaaattccacatctatacatctttaggccccaaagcctttgatggcacaggtgattttgagattgtttatgtaaggatggctgtcatcgttgctttagatttctggcctctccatggtgcagttgaaaatgattgtttggaaattgtccgcctcctcctttcctatggcgctggccccactttggccacctactcaggcagaaccattatgaaaatgacccacagcaaagttatggaaatgtttctaacagattacttaaatgacctacagggttgcagtgacagtaagctgaatagctcttgggagttctacggcagctctgtctgtgaaccagataatggaggggaatccaatgttttggcagaccccccaggaccagaggaccaggatgatgacaatgaggcttgcagtgatgtgtttgaatttaaattttcagataccccctcttaccttgttaaaacattcaagtttcatctttgcagggacttggaagccttcaatctggaaagcaacaaactactagatttactagaatgtacaaatgaactccagattctccttggctcctctctggaatgcttaaatcccagggatgtggccttggagaaggaccactga

SEQ ID NO: 2479 - DNA, 3444 bp, Homo sapiens
  SIMILAR (2814)..(2584): 681254mologous to Homo sapiens BRCA1 modulator protein 091- 132Q20,accession number W37883,Smith-Waterman Score=260.
cgactactaactactaaattgcggctgcgtcgacttttttctttttttttttccaagaagtagcacacttacacactctctctctctcccatctctttcatcagcttctattatcagctgtgctgtttgttgaagtctggcatctacaagctgttgtcgtaattccttatgtttgaacgctttattaatttgctacaggaaaacagaatttcttgcaccactaaccaaagaaataaatacagtggggagaaaacataacacaaatttctagaaccctgcttacccttcttttctgctgctaccactgtagttaagaacactgactccttctgtccccgtcactgcagaagtggctacaacatatcatcttgcaaactatcccacactagaaagagcacaaccctctaactgctgccccatgtcccaccctatcagacgtgggctgtccccatcaaaatatctgtacttcttgcttctgccctacattggaaaaaaaaaagctgatattttatcaagaaaaagatggataaggagatcaaaatatcaaattcatttattacacacataattcctggacattttttgttcacaaaatcttctgaaattccttaattgtaggtagcctgataaaatggaaaaaaatggtctggagcaaatcctagcttattgtatgatccaggacaatttcttctccttgtgaaacacagtttccttatctgcaaaggttcatgaccatacctaacttgcagagttgctgtccaaatctatgcaataattaaactgtgtaaggtgcttgatgcctggcacatattaaacatttggtaaaatcctgttattatttaaaagctatgtcattaagtgctattgttacatacaatagactcatttggaaatccttccacacatggaggttctatgtgaaggatgaaatgctagctgaacataatgtacttaaattaagttttgagtagactgcaacagataatctgtcttaatctgcaactgattttatcattattcaattattttctgataaaagaaaaagactgtaatatctaaacaagacatacaagtagtacaacttgaacacatgtcctctcccaatctgctacttctatagcaaatttggagagtttaatacagttaaaataatataaatcctaaagagtaaaataataaaaaataaaataaaattaatcatttttaataccattatttaaaacaatggaatttaaaggattcttttaaaaaaactgatgatattcataatatgctttataatataaaacaaatttaattttaaaagttcactatataggcctaaaaaatttctttaataaatacattccaaggaaaaaaaagaggggggggaagcttatatactaaaaagacttgagacatattaaaacaataaaatgtataaaccttattttgatgttgatgtaaacaacctgaaggaaaagggaagtaacagatatttaaatagtacagtgagaaggtatgtgattacatagcaattgtttaaccttttggagtaaaaatagtacagtgattatggcttaaaaagaatcttatttcatgatgcatatttgaatagtaataaataaaatgatataatatcttggatttgctcaaaaatagatggaaacaagagttgctagaaacaaaagtaaataattgctaaagccaagtgatatattctactataagtttgcagcttccataataagtttgaaatgttcttgaaacatagaggaaaatggtttaaaagatactcaaaatcttaaagaaaaatgttttcaaaagtagcatgaaaaggtgtaactcaaaataacattttgatatgcataaagtaatatttactgttttattaatttctaagttgtcactttctatttccaattttaatctactaagtaaggatttaaatatatattttactagcttaaagcataataaaggaaggggatgcatcctttgaaaattgaaatcttaccctatgtatagacctctaaaagtaaagaaaaaataaaaacaaataagcaggttatcacctatttgttcttttatttagccatcatacaacttccacatcaatttataaaataactccaatgactaggttcgacaactattgagtcctccacaaactttttacttcattgattacacaaacaatgtgacttggtgatgcgtaattagtacgttccttattctcacaaatagcacacttctcctattcatattgtccagattgtcacagacatctgagatacagagtatttagggaacaaatctgtattattcgactgcataagagaaaaatatctgtatgctatattgacaatcttgtagcatcatatgggagacaagtggtacacatctcctagaaatccctttacttatcctactccactgacacttgggccaagtgatgctccaatttagtcattctgtttacaggtttctactcttttcctaataaacatgtaatttccactgtgcatacacaaaagttctaaaatactgtcctgtgaaagagtttttactttacggtagggtgtagcttttgctactggtgagcagctgtctataaacaaaccaaacgccgtttacctcttccctcagtgcatactggtcagtgagcttctttagcttttctcccatttccatgttctcctgctgcagtttggcattgtgtatttcatgctgttccagctgggcttgagtttcagttaaagtaatttggaaatgtgcagttacttctttaagaacttcttcctcctcttttttctgctgcatatgttcctccttattatccaaaataatgtatgttaaaagtacagacctacagataaagctcccgaaaaagaagctactgctatgtgagttcatttattgctcccatgaggtgttgcttttaaactataattcctcccccttatttatgaccagaaatctctcatttaaaagcaagcagctttttctaagtagataattagagaaaagcaaatgccctactataaaataagtatcatctgctgatccagatattcactatactataattaaatataagtaagatgctgctccacagttagtttcttccacattattttcccaaaagtcatcctcactggttaggcagtataccatcctacatcagcctgaagatcttacagcctactttctgagttacactttcaattttataagagggaagggacaaactaaatcattattttacaaagtttactttcaaagtcttactaggatacaagagtcaacagacctttacctaaacagttatcagtacagtctaaatattgacagtgctatctacttttattatatttaaatccaagatttcaaaagcaagaaaaataaatacaaaccttacaagtaagaacctatttcacaagctgtcctatgttcttgagtcca

SEQ ID NO: 2480 - DNA, 921 bp, Homo sapiens
  SIMILAR (385)..(918): 731254mologous to Homo sapiens p40,accession number U93567,Smith-Waterman Score=667.
atgaacatcaatgcaacaatcctcaataaaattctggcaaaccgaatccagcagcacatcaaaaagcttattcatcacaatcaagttggcttcatccccaggatgcaagctttgaagagggtagtggttcttccggcatggagtttgagatctgagaatgaacagactgcctcctcaagtgggtccctgacccctgagaagcctaactgggaggcatctccctgtaggggcagactgacacctcacacggccaggtacccctctgagacaaaacttccacaggaacgatcaggcagcaacatttgctgttcagcaatattcactgttctgcagcctctgctgctgatacccaggcaaacagggtctggagtggacctccagcaaactccaacagacctgcagctgaggacggagaatgactttgatgagctgagagaagaagccttcagacgatcaaacttctccaagctaaaggaggaagttcaaacccattgcaaagaagttaaaaaccttgaaacaagattagacgaatggctaactagaataaccaatgcagagaagtccttaaaggacctgatggagctgaaaaccatggcaggagaactacgtgatgcgtgcacaagattcagtagccgattcaatcaactggaagaaagggtaacagagattgaagatcaaatgaatgaaatgaagcaagaagagaagtttagagaaaaaagaataaaaagaaatgaacaaagcctccaagaaatatgggactatgtgaaaagaccaaatctacattggcttggtgtacctgaaagtgacagggagaatggaaccaagttggaaaacactctgcaggatattatccaggagaacttccccaacctagcaaggcagaccaacattcaaattcaggaaatgcagagaatgccataa

SEQ ID NO: 2481 - DNA, 1650 bp, Homo sapiens
  SIMILAR (199)..(1062): 511254mologous to Mus musculus domesticus ORF2,accession number AF081110,Smith-Waterman Score=718.
atggccgggtactcctctgagacaaaacttccagaggaacgatcaggcagcaacatttgctattcaccaatatccactgttctgcagcctccgctgctgatacccaggcaaacagggtctggagtggacgtccagcaaattccaacagacctgcagctgagggtcctgactgttagaaggaaacctgacaaacagaaaggacatccacaccaaaaccacatctgtatatcaccatcatcaaagaccaaagactttaaaccaacaaagatcgaaagagacaaagaaggccattacataatggtaaagggatcaattcaacaagaagagctaactatcctaaatatatatgcacccaatacaggagcacccagattcataaagcaagtcctgagtgacccacaaagagacttagactcccacacattaataatgggagactttaacaccccactgtcaacattagacagatcaatgagacagaaaggcaacaagggtatccaggaattgaactcagctctgcaccaagcagaccaaatagacatctacagaactctccaccccaaatcaacagaatatacaatcttttcagcaccacaccacacctattccaaaatcgaccacatagttggaagtaaagcattcctcagcaaatgtaaaagaacggaaattataacaaactgtctctcagaccacagtgcaatcaaactagaactcaggattaagaaactcattcaaaaccactcgactacatggaaactgaacaacctgctcctgaatcactactgggtacataacgaaatgaaggcggaaataaagatgttctttgaaaccaatgagaacaaagacacaacgtaccagaatctctgggacacactgaaagcagtgtgtagagggaaatttatagcactaaatgcccacaagagaaagcaggaaagatctaaaattgacaccctgacatcacaattaaaagaactagagaagcaagagcaaatacattcaaaagctagcagaaggcaagaaataactaagatgagagaagaactgaaggaaatagacacaaaaaacccttcaaaaaaatcagtgaatccaggagctgaaatacaaactaccatcagagaatactataaacacctctatgcaaataaacaagaaaatctagaagaaatggataaattccttgacacatacaccctcccaacactaaaccaggaagaagttgaatctctgaatagaccaataacaggctctgaaattgaggcaataattaatagcttaccaaccgaaaaaactccaggaccagatggattcacagccgaattctaccagaagtacaaggaggagctggtaccattccttctgaaactattccaatcaatagaaaaagagggaatcctccataactcattttatgagaacagcatcatcctgatactaaagcctggcagagacacaaccaaaaaagagaattttagaccaatatccctgaagaacattgatgcaaaaatcctcaataaaatactggcaaaccaaatccagcagcacatcaaaaagcttatccaccatgatcaagtgggcttcatccctgggatgcaaggctggttcaacatacacaaatcaaataaatgtaatccagcatataaacagaactaa

SEQ ID NO: 2482 - DNA, 1587 bp, Homo sapiens
  SIMILAR (1090)..(1584): 901254mologous to Homo sapiens putative p150,accession number U93570,Smith-Waterman Score=795.
atgtatgggaatgcctggatgcccaggcagaagtttgctgtaggggtggggtcctcatggagaacctctgctagagcaatgcagaagggaaatgtggggtgggaaatcccacacagagtccctactggggcaccacctagtggagctgtgagaagagggccaccatcctccagaccccagaatggcagatccactgacagcttgcactgtgtgcctggaaaagctgcagacactcaacaccagcccatgaaggcagcagggagggaggctgtaccctgcaaagccacagggctggagctgcccaagactatggaaacctacctcttgcatcagtgtgacctggatggcatagcagaacaaaaggcagcagaaacctctgcagactttccctgtctgacagctttgaatagcctaactgggaggcaccccccagtagggggcagactgacacctcacacggccgggtacccctctgagacaaaacttccagaggaacgatcaggcagcaacatttgctgttcagcaatattcactgtttggcagcctctgctgctgacacccaggcaaacagggtctggagtggacctccagcaaactccaacagacctgcagctgagggtcctgactgttagaaggaaaactaacaaacagaaaggacatccacaccaaaatcccatctgtacgtcaccatcatcaaagactaaagagaagtccttaaatgacctgatggagctgaaaaacatgacacaagaactacgtgatgaatgcataagcttcagtagccgattcgatcaactaggagaaagagtatcagtgattgaagatcaaatgaatgaaatgaaaccaaatctacatcggattggtgtatctgaaagtgacccggagagtggaaccaagttggaaaacactctgcaggatattatccaggagaaattccccaacctagcaaagcaggccaacattcaaattcaggaaatacagagaatgccacaaagatactccttgagaagagcaactccaagacacataattgtcagattcaccaaagctgaaatgaaagaaaaaatgttaagggcagccagagagaaagacagatcaatgagacagaaaattaacaaggatatccaggaattgaactcagctctgcaccaagcggacctaatagacatctacagaactctccactccaaatcaacagaatatacattcttctcagcaccacatcacacttattccaaaactgaccacatagttggaagtaaagcactcctcggcaaatgtaaaagaacagaaattgtaacaaactgtctctcagaccacagtgcaatcaaactagaactcaggattaaggaactcactcaaaaccactcaactacatggaaactgaacaacctgctcctgaatgactactgggtacataacgaaatgaaggcagaaataaagatgttctttgaaaccaataagaacaaagacacaacataccagaatctgtgggacacatttaaagcagtgtgtagagggaaatttatagcactaaatgcccacaagagaaagcaagaaagatctaaaattaacaccctaacataa

SEQ ID NO: 2483 - DNA, 657 bp, Homo sapiens
  SIMILAR (102)..(1): 651254mologous to Homo sapiens Human secreted protein, SEQ ID NO: 7420,accession number G03339,Smith-Waterman Score=118.
atgtgggaaagtttggaacctcctagtgacttgttgaatggctttgacaaaaatgctgatagtgaaattaacaataaagtccaggctgaggaacttgttgggaactggagcaaaggtgactcttgttgtgttttatcaaagagactagtggcattttgcccctgccctagagatttgtggaactttggacttgagagagataatttagggtatctggtggaagaaatttctaagcagcagagcattcgaaagatttcagaagatttatggaaacacctggatgctcaggcaaaagtttgctgcagcggtggggccctcatggagaacctctgccagggcagtatggaagggaaatgtggagtcggagcctcaacacagagttctactggggtactgcctagtggagctgtgagaagagggccaccatcgtccggaaaccagaatgatagatccactgacagtttgcactgtgtgcctggaaaagccgcagacagtaaatgccatcccaagaaagcatcaggaaggaaggctgtaccctgcaaagccacagaggtggagctgcccaagaccttgggaatccacatcttgcctcagtgtgacctggatgcgagacctggagtcaaaagaaatcattttggatccttaaaatttgactga

SEQ ID NO: 2484 - DNA, 1260 bp, Homo sapiens
  SIMILAR (268)..(1257): 831254mologous to Homo sapiens p40,accession number U93567,Smith-Waterman Score=1399.
atggccgggtactcctctgagacaaaacttccagaggaacgatcacgcagcaacatttgctgttcaccagtatctgctgttctgcagactccgctgctgatacccaggcaaacagggtctggagtggacctccagcaaactccaacagacctgcagctgagggtcctgactgttagaagggaaactaacaaacagaaaggacatccacacaaaaccccatctgtacatcaccatcatcaaagaccaaaggtagataaaaccacaaagatggggaaaaaacagagcagaaaaactggaaactctaaaaagcagagcgcctctcctcctccaaaggaatgcagctcctcagcagcaatggaacaaagctggatggagaatgactttgacgagttgagagaagaaggcttcagacgatcaaactactccgagctaatggaggaagttcgaacccatggcaaagaagttaaaaaccttgaaaaaaaattagacgaatggctaactagaataaccaatgcagagaagtccttaaaggacccaatggagctgaaaaccatggcacgagaactatgtgatgaatgcacaagcctcaaaagggtatcagtgatggaagatcaaatgaatgaaatgaagcgagaagagaagcttagagaaaaaagaataaaaagaaacaaacaaagcctccaagaaataagggactatgtgaaaagaccaaatctacatctgattggtgtacctgaaagtgacggggagaagggaaccaagttggaaaacactctgcaggatattatccaggagaacttccccaatctagcaaggcaggccaacattcaaattcaggaaatacagagaatgccacaaagatactccttgagaacggcaactccaagacaaataattgtcagattcaccaaagttgaaatgaaggaaaaaatgttaatggcagccagagagaaaggtcgggttacccacaaagggaagcccatcagactaacagctgatcttttggcagaaactctacaagccagaagagagtgggggccaatattcaacattcctaaagaaaagaattttcaacccagaacttcatatccagccaaactaagcttcataagtgaaggagaaataaaatactttacagacaagcaaatgctgagagattttgtcaccaccaggcctgccctgaaagagctcctgaaggaagcagtaaacatggaaaggaacaaccggtaccagccactgcaaaaacatgccaaattgtaa

SEQ ID NO: 2485 - DNA, 762 bp, Homo sapiens; identical to SEQ ID NO: 988
  SIMILAR (250)..(759): 921254mologous to Homo sapiens p40,accession number U93564,Smith-Waterman Score=805.

SEQ ID NO: 2486 - DNA, 729 bp, Homo sapiens
  SIMILAR (379)..(726): 901254mologous to Homo sapiens p40,accession number U93572,Smith-Waterman Score=523.
atggctgggttctcctctgagacaaaacttccagaggaacgatcaggcagcaacatttgctgttcaccaatatccgctggtctgcagcctctgctgctgatacccaggcaaacagggtctggagtggacctccagcaaactccaacagacctgcagctgagggtcctgactgttagaaggaaaactaacaaacagaaaggacatccacaccgaaaccccatctgtatgtcaccatcatcaaagaccaaaggatattatccaggagaacttccccaatctagcaagacaggccaacattcagattcaggaaatacagagaacaccacaaagatactcctcgagaagagcaactccaagacacataattgtcagattcacaaaattgaaatgaaggaaaaaatgttaagggcagccagagagaaaggtcgggttacccacaaagtgaagcccatcagactaacagctgatctcttggcagaaactctacaagccagaagagagtgggggttaatattcaacattcttaaagaaaagaattttcaacccagaatttcatatccagccaaactaagcttcataagtgaaggagaaataaaatactttacagacaagcaaatgctgagagattttgtcaccaccaggcctgccctaaaagagctcctgaaggaaacactaaacgtggaaaggaacaaccggtaccagccactgcaaaaacatgccaaattgtaa

SEQ ID NO: 2487 - DNA, 1299 bp, Homo sapiens
  SIMILAR (253)..(1296): 891254mologous to Homo sapiens putative p150,accession number U93567,Smith-Waterman Score=1580.
atggctgggtactcctctgagacaaaacttccagaggaacgatcaggcagcaacatttgctgttcaccaatatccgctgttctgcagcctccgctgctgatacccaggcaaacagggtctggagtggacctctggcaaactccaacagatctgcagctgagggtgctgactgttagaaggaaaattaacaaacagaaaggacatccacaccaaaaccccatctgtacatcaccatcatcgaagaccaaaggccagatcagagcagaactgaaggaaatagagacacaaaaagcccttcaaaaaatcaatgaatccaggaactgggtttttgaaaagatcaacaaaattgatagaccaccagcaagactaataaagaagaaaagagagaagaatcaaatagatgcaataaaaaatgatagaggggatatcaccatcgatcccacagaaatacaaactaccatcagagaatactataaacacctctatgcaaataaactagaaaatctggaagaaagggataaattcctcaacacatacactctcccaagactaaaccaggaagaagttgaatctctgaatagaccgataacaggctctgaaattgaggcaataattaatagcttaccaaccaaaaaaagtccaggaccagatggattcacagatgcattctaccagaggtacaaggaggacctggtaccattccttctgaaacttttccaatcaatagaaaaagacagaatcctctctaactcattttatgaggccagcatcttcctgataccaaagctgggcagagacacaacaaaaaaagagaattttagaccaatattcctgatgaacatcggtgcaaaaattctcaataaaatactagcaaaccgaatccagcagcacatcaaaaagcttatccaccatgatcaagtgggcttcatccctgggatgcaaggctggttcaacatatgcaaatcaataaatgtaatccagcatataaacagaaccaacgacaaaaaccacatgattatctcaatagatgcagaaaaggcctttgacaaaattcaacagcgcttcatgctaaaaactcacaataaattaggttttgatgggacatatctcaaaataataacagctatttatgacaaacccacagccaatatcatactgaatggacaaaaactggaagcattccctttgaaaactggcacaagacgggaatgtcctctctcactactcctattcaacatagtgttggaagttctggacagggcactcaggcaggagaaaaaaataaagggtattcaataa

SEQ ID NO: 2488 - DNA, 1096 bp, Homo sapiens
  SIMILAR (178)..(1095): 831254mologous to Homo sapiens ORF2 contains a reverse transcriptase domain,accession number M80344,Smith-Waterman Score= 1290.
atggccgggtactcctctgagacaaaacttccagaggaacgatcaggcagcaacatttgctattcaccaatatccactgttctgcagcctccgctgctgatacccaggcaaacagggtctggagtggacgtccagcaaattccaacagacctgcagctgagggtcctgactgttagaaggaaacctgacaaacagaaaggacatccacaccaaaaccacatctgtatatcaccatcatcaaagaccaaagactttaaaccaacaaagatcgaaagagacaaagaaggccattacataatggtaaagggatcaattcaacaagaagagctaactatcctaaatatatatgcacccaatacaggagcacccagattcataaagcaagtcctgagtgacccacaaagagacttagactcccacacattaataatgggagactttaacaccccactgtcaacattagacagatcaatgagacagaaaggcaacaagggtatccaggaattgaactcagctctgcaccaagcagaccaaatagacatctacagaactctccaccccaaatcaacagaatatacaatcttttcagcaccacaccacacctattccaaaatcgaccacatagttggaagtaaagcattcctcagcaaatgtaaaagaacggaaattataacaaactgtctctcagaccacagtgcaatcaaactagaactcaggattaagaaactcattcaaaaccactcgactacatggaaactgaacaacctgctcctgaatcactactgggtacataacgaaatgaaggcggaaataaagatgttctttgaaaccaatgagaacaaagacacaacgtaccagaatctctgggacacactgaaagcagtgtgtagagggaaatttatagcactaaatgcccacaagagaaagcaggaaagatctaaaattgacaccctgacatcacaattaaaagaactagagaagcaagagcaaatacattcaaaagctagcagaaggcaagaaataactaagatgagagaagaactgaaggaaatagacacaaaaaacccttcaaaaaaatcagtgaatccaggagctg

SEQ ID NO: 2489 - DNA, 369 bp, Homo sapiens
  SIMILAR (187)..(351): 831254mologous to Homo sapiens Human secreted protein HLYES38, SEQ ID NO:220,accession number Y86305,Smith-Waterman Score =247.
atgtggccaaaaggaaactatgtggtcacacgcagtgttactttgggaagccattttattccactggagaccttgaaaaacaatagaagagaggcaatcctaagagggaaatcaataggaagccttgaaggagaaaaactggaggacggacttgtttttccagaggaactggaagaggaaactggtatcattgtgatcaggaccctcagctgcaggtctgtcggagtttgctggaggtccactccagaccctgtttgcctgggtatcagcagcagaggctgcagaacagcggatattggtgaacagcaaatgttgctgcctgatcgttcctctggaagttttgtctcagaggagtacctgggcatgtga

SEQ ID NO: 2490 - DNA, 573 bp, Homo sapiens
  SIMILAR (229)..(420): 751254mologous to Homo sapiens Human secreted protein HLYES38, SEQ ID NO:220,accession number Y86305,Smith-Waterman Score =249.
atggtaagagggggactgcacatgtgggaagcccacactaagggaagaatcatgggaaagagccaaatactttcttatgaagagggcgggactgaagttcctgcagaccaatctaagtatgtcaacagtaactcaggcttccaacaggtcttcagggaatataggttacaaacaaaccctaaattgaagggagaaagatccccacctctgtattcttcaagctcattggttcttattaaagctttggaagtgaggaccctcagcttcagttctgttggaatttgctggaggtccactccagaccctgtttgcctgggtatcagcagcagaggctgcagaacagcggatactggtgaacagcaaatgttgctgccaaatcattcttctggaagttttttctcagaggagtacccagccatccttgacagtgccatggaatttgccatgggtagaatcataccggaatatgtagaccacatagttgatgtcaatgaagtggtcactgatggtgacaatattcactttaccatacttaaaagcagccctaacaataaggtgcccaatatggcctaa

SEQ ID NO: 2491 - DNA, 570 bp, Homo sapiens; identical to SEQ ID NO: 995
  SIMILAR (226)..(567): 821254mologous to Homo sapiens p40,accession number U93574,Smith-Waterman Score=478.

SEQ ID NO: 2492 - DNA, 2376 bp, Homo sapiens
  SIMILAR (10)..(129): 601254mologous to Arabidopsis thaliana putative glycine-rich protein,accession number U93215,Smith-Waterman Score=124.
atgcggcccggcggcggcggcggcgggagcggcagcggcagcgagggcggcaggggcagcggcagcagcggcggcgttggctgcggcggcggcggcggcggcagcaggagccggagcgacggcggcggcatccccgagactctccgcactatccttacccctcaccctcctgctcctcaatcccgcttccccccaaccaaccagctgcgacggcgtgaagagcccgtcagtgcccggcgagctgcggcccgagaggcgcggaactttgcagaaaacaccatgaatgaactccttggctggtatggctatgataaggttgaattaaaagatggtgaggatattgaattcaggagctaccctacagatggggagagccggcagcacatttctgttctcaaagaaaattctttgccaaaaccaaaattacccgaggacagtgttatttcaccatacaatataagcacaggctattcagggcttgccactggaaatggactcagtgactcacctgcagggtcaaaggatcatggcagtgtgcccattattgtacctttaattccaccacctttcataaagccaccagcagctgcatacagaattgtgggtgtagcttacttctgggcctggagaactgctcttctggccctgccctcccttttctctggagaaggggagctcccgtgtcttggtggttaccacagcattgaccctgctctggccacacatagacagcctctggcccttggtatggtttgtgacagcacaggcattactatggaggtggccccacgtggcctgctgcttggcaggactggctggagcagcgaggagggacttggcttgctcttctgtcatgatgggctgcttgtgctcccctccagtggagatgcttacacctgcctactacagtcaccaagaacatctggctcctatgatccttcatggtctttcattgattatctggatgtgtgcattctaggaactgttggaggagatagatgtcccagcaaatactttcggaatttcccctcagtcttggactcccatgaaagttacaaaggggtggtaaatctacagtttaattgcctggagtccattaatgccctactgattttctttgggcactggtcagaagatgatgtgtcaaatgtacaaataatgtgtgcctggtgccagaaagtgggaatcaagcgctattccctgagtatgggaagtgaggtgaaaagcttctgcagcgagaagtgctttgcggcctgccgacgagcctacttcaagagaaataagtgtttgtgttctgagagggtgaatgaatctgatgaggacactgtgatcacagctggtatcctcatggccagtgtctttccagcagtagagtgcagactgcactctgagtacatgaaagataagtgtgagcggaaggaagagagggagtttttcataaatcagaatccggtcacctggggatcaatacacagtgctattgacatatatgctggaatgttaattttcagacatagtacatctctggccatccttctggtgaaggctaatgctgttcacttaaatcaagttttttctcatcggaactgccgcaaagagactggtgtcattttgccctgccctagagatgtatggaactttgaacttgagagagatgatttagggtatctggtggaagaaatttctaagcagcaaagcattcaagaggaagcagagcataaaagtttgaaaaaattgcagcctgatgatgctgtagaaaagaaaatcccatgttctggggagaaattcaagcccatagcagaaatttggataagtaatgagaagccaaatgctaattgccaaaacaatggggaaaatggctccaggacatatcagagaccttctggagagcccctcccatcacagtcccatggcctaggagggaaaaatggtttcttgagcctggtccagggctcccctgctgtgtgcagctgctggacttggtggaaatggtgccctgcatcccagccgctccagccatggctaaaaggggccaagatacagctcaggctgtggcttcagagggtgcaggccgcaagtcttggcagcttccatgtggtgttggtcctgtgggtgtgcagaaaacaagaattgaggttggggaatctctgcctagattttggaggatgtatggaaacacctggatgtccaggaagaaatttgctgcagaagaagggaaatgtggggtcagagccaccacccaaagtccccactggggcactgcctaatggagctgtgagaagagggtcaccatcctctagacaccagaatggtagatccattgacaacttgaaccatgtgcctggaaaagctgcagacactcagcgccagccatga

SEQ ID NO: 2493 - DNA, 786 bp, Homo sapiens
  SIMILAR (109)..(62): 751254mologous to Homo sapiens Human secreted protein, SEQ ID NO: 7420,accession number G03339,Smith-Waterman Score=58.
atggacaataaagtccaggttgaggtgatctcagatggagatgaggaacttgttgggaactggagcaaaggtgactctcgttatgttttagcaaagaaactggtggcatctctcccctgccctagagatctgtggaactttgaacttgagagagatgatttagggtatctggtggaagaaatttctaagcagcaaagcattcaagaaaagaaaaacccattttctgaggagaaattcaagccagctgcagaaacttgcataagtaacagggaaccaaatgttaaatcaccaagacaatgggggaaaatgtctccatggcgtatcagagatcttcacggcagcctctcccatcacaggcccagaggcctaggagaaaatggtttcgtgggccagggacttggtgccctgcatcccaaccactctaatcatggcttcagagggtgcaagcccaagccttggcagcttccacgtgatgttgagtctgcgagtgcacggaagtcaagaattgaggtttggaaacctccgcctatatttcagaagatgtatggaaacgtctggatgcccctgcagacgtttgctgcaggggcggggtcctcatggagaacctctgctagagcagtgcagaagggaaatgtggggtgggagcccccacacagagtccctactagggcaccgcctagtggagctctgagaagagggcctctgtcctccagaccccagaatggtagctccactgacagcttgcaccatgtgcctggaaatgccacactcaatgccagcccatga

SEQ ID NO: 2494 - DNA, 810 bp, Homo sapiens
  SIMILAR (221)..(3): 891254mologous to Homo sapiens Human secreted protein HLYES38, SEQ ID NO:220,accession number Y86305,Smith-Waterman Score =347.
atggccgggtactcctctgagaaaaaacttccaaaggaacgatcaggcagcaacatttgctgttcaccaatatctgctgttctgcagcctctgctgctgatacccaggcaaacagggtctggagtggacctccagcaaacaccaacagacctgcagctgagggtcctaactgttagaaggaaaactaacaaacagaaaggacatccacaccaaaaccccatctgtacgtcaccatcatcaaagaccaaagggcccaactgttctgatttgaagcagcctatgtacttgggatttgaaaaagatgtctttaaaaccatagctgattactatggtcacttgaaagagcctctacttacatttcatctttttgatgcttttgtcagtgtactgggcaggagctggatattctgggcaaagttccgtgtggccgctgggcctgacttcgcagagggggcgctctggccagatgggtggaggttgcaggatttggggctgagtgggaccaggctccaatcaaggcaggtggcctggcttgctgctcagtttgcagcagccgcctttccccagcgtgcctgtggtggtggcatcaatgatcctagcacctgggatgatgcctggcagccgatttggggtgaggagtggcttccaggacacgggcatggagtgctccagccaagcattgccatcgccgtggccctgtgtgctctgagtggcctgggctgccccgacagatggccttttagtgcccctggtgccccaggttcaggcagagggcacagtgcccaggcatgcagtctcatagtgaattaa

SEQ ID NO: 2495 - DNA, 714 bp, Homo sapiens
  SIMILAR (247)..(200): 621254mologous to Homo sapiens Human secreted protein, SEQ ID NO: 7420,accession number G03339,Smith-Waterman Score=49.
atgtggaagcaactttggaactgggtaacaggcagaggttggaatagtttggagggctcagaagacaagaaaatgttgggaagtttggaacctcctggagacttgttgaatggttttgacaaaaatgctgatagtggtatgaacaataaggtccatggtgcggtggtctcagatggagatgaggaacttgttgggaactggaacaaaggtgactcttgctatgttttagcgaagagactggtggcattttactcctgccctagagatctgtggagctttgaacttgaaagagatgatttagggtatctggtggaagaaattcctaagcagcaaagcattcaaaagtggagctgcgagaagaggaccaccatccttcagaccccagaatgtcccgtcagcttgcactgtgcacctggaaaagctgcagacactcaacgccagcctgtgaaagcagccaggagggaggctgtaccctgcaaagccacaggggtggaacttcccaagaccatgggaacccatctcttgcaacagtgtgacctggataacccagttccttttccctctttccgttcatttcgagaagacaatgtcagaaaacagaatgacgttgaggatgatgaatggcagtttccaaatgtatttctgaaaaagatgaataagaaagagctgtttctgattcaaccttccaattcctgggagaaatggatgaagtag

SEQ ID NO: 2496 - DNA, 2976 bp, Homo sapiens
  SIMILAR (754)..(2319): 881254mologous to Homo sapiens putative p150,accession number U93568,Smith-Waterman Score=2308.
atgcctggcactccagcagccaaattggatgctaaagacaaagaccaaaccctaagaatggcagataagggtactggaaggaacctggaggtccttggtaaatctgtagcagaggctatttggaggacaaaacccacccatccaggactcagaggggttagtggtgagctatttagtgcctgctccctgtctcttgtgctctacctgtgcatgctgcatcccatggaccttcagatcctggcactgacagtcatttgtaaggagactgcaagtaaagagtctctagccatgttcgactacgacaagagcaaggacagtgggctgccaagtcaaggacttagttttaaatatggagatattctccacgttatcaatgcctctgatgatgagtggtggcaagccaggagagtcatgctggagggagacagtgaggagatgggggtcatccccagcaaaaggagggtggaaagaaaggaacgtgcccgattgaagacagtgaagtttaatgccaaacctggagtgattgattcgaaagggcctaactgggagtcaccccccagtaagggcagactgacacctcacatggccgagtactcctctgagacaacactgccagaggaacgatcaggcagcaacatttgctgttcaccaatatccgctgttctgcagcctctgctgctgatacccaggcaaacagggtctggagtggacctccggcaaactccaacagacctgcagctgagggtactgactgttagaaggaaaactaacaaacagaaaggacatccacaccaaaaccccatctgtacgtcaccatcatcaaagaccaaagaaacacaaactaccatcagagaatactataaacacctctacgcaaatagactagaaaatctagaagaaatggataaattcctggacacatacaccctcccaagactaaaccaggaagaagttgaatctctaaatagacgaataacagaatctgatattgaggcaataattaatagcttaccaaccaaaaaaagtccaggaccagatggattcacagccgaattctaccagaggtacaaggaggagctggtaccattccttctgaaactattccaatcaatagaaaaagagggaatcctccctaactcattttatgaggccagcatcatcctgataccaaagctgggcagagacacaacaaaaaaagagaattttagaccaatatccctgatgaacatcgatgcaaaaatcctcaataaaatactagcaaaccgaatccagcagcacatcaaaaagcatatccacggtcaagtgggcttcatccctgggatgcaaggttggttcaacatacgcaaatcaataaacgtaatccagcatataaacagaaccaatgacaaaaaccacatgattgtctcaatagatgcagaaaaggcctttgacaaaattcaacaacccttcatgctaaaaactctcaataaattaggtattgatgggccgtatctcaaaataataagagctatctatgacaaactcacagccaatatcatactgaatgggcaaaaactggaagcattccctttgaaaactggcacaagacagggatgtcttctctcaccactcctattcaacatagtgttggaagttctggccagggcaatcaggcaggagaaggaaataaagggtattcaattaggaaaagaggaagtcaaattgtgcctgtttgcagatgacatgattgtatatctagaaaaccccatcgtctcagcccaaaatctccttaagctcataagcaacttcagcaaagtctcaggatacaaaatcaatgtacaaaaatcacaagcattcttatacaccaacaacagacaaacagagagccaaatcatgagtgaactcccattcacaattgcttcaaagagaataaaatacctaggaatccaacttacaggagatgtgaaggatttcttcaaggagaactacaaaccactgctcaatgaaataaaagaggatacagacaaatggaagaacattccatgctcacgggtaggaagaatcaatatcatgaaaatggccatactgcccaaggtaatttatagattcaatgccatccccatcaagctaccaatgactttcttcacagaattggaaaaaactactttaaagttcatatggaaccaaaaaagagcccgcattgccaagtcaatcctaagccaaaagaacaaagctggaggtatcacgctacctgacttcaaactatactacaaggctacagtaaccaaaacagcgtgccatagagtgggccgtgcacagcagcattccatcagcaaatggaagtggtatatacatgattggtctcaagtaggtcctgaaggcacaaatgattctgcacgatatccagataccacccaaaagtggacagctgcagcactacagcccctttctaggacatccctgaaggacagccatgaagggaaatcttcccagtgggcagaacttagagcagtgcacctggttttgcgctttgcatggaaggagaaatggccagatgtgcaattatatactgattcatgggctgtagccagtggtttggctggatggtcagggacttggaagaagcatgattggaaaattggtgacaaagaaatttggggaagagccacccctgtcatcgcccaatgggcccatgaacaacgtggccatggtggcagggatggagattatgcatgggctcagcaacatgggcttccactcaccagggatgacctggctacagccactgctgagtgccccatttgccagcagcagagaccaacactgagccctcaatatggcaccattcctcaggccaggattcacgggtccaggaatcaacgggtggaagtggaagcggcaccactcaccatcactcctagtgatccactagcaaattttttgcttcctcctcccacaacattacattctgctggcctagatagtctgctggcctag

SEQ ID NO: 2497 - DNA, 1245 bp, Homo sapiens
  SIMILAR (349)..(302): 751254mologous to Homo sapiens Human secreted protein, SEQ ID NO: 7420,accession number G03339,Smith-Waterman Score=58.
atgctttgcagtatttgttggaagccaggcactgccagattcaatgcaattgcagaaattcattacacatccaaatctctaaaatgccgagtagaaaattacttacatcgagcctcagcagtaggaaaaggcagacattggaacacttcggagggctcagaagaagacaggaaaatgtgggaatgtttggaacctcctagagatttgttgaatggctttggcaaaaataccgatagtgatatgaaaaataaggtccaggctgaggtggtctcaggtggtgatgaggaacttgttgggaactggagcaaaggtgactgttgttatgttttagcaaagagactggtggcattttgcccctaccctagagatttgtgggactttgaacttgagagagatgatttagggtatcaggcagaaggaatttctaagcagaaaagcattcaaaagaccccagaatatagatccaccgacagcttgcaccatgtacctggaaaggccgcagacattcaatgccagcccatgaaggcagccaggatggagggtgtaccctgcaaagtcacaggggtggagctgcccaagaccacaggaacccacacctctggcatcagcgtgacctggagatactattctaggtttggagattcaggagtgaagaagacaaataagattttactccagaaagaacttaaccttccagagaaagagaaagtcaatcagaaagtccagaggcaggcagaggatgaaacatcttggattgtccctgacggtcagagatctgcgttaccagaaagcccttctcaggatttgtattctggccacgtgtggaacttaactgcatatcagaaacgtgctgtctacgtaagacatttgtgggaaaagcaagaagacaagacatatctttgtggtttagttgctataggagtaacccataaggcacatagaaaacatgagcaccaagtcatggagagacggctgggaacttcagctacaacagtggttctccatgaggtacttttcccaggtgacgtttggcaatatccagagatatttttgattgccacagtgtgggggtgggggagtttggcatctagcaagcagaggtcaggggaggtgctaaacctcttgcatacacaggacagccccacaacaaagaattattcaattgatgtcacgagtgccaaaaatgagaaactctggtctagaaggagagactggattgtgatgagtttacaggacagaacgtag

SEQ ID NO: 2498 - DNA, 1386 bp, Homo sapiens
  SIMILAR (775)..(1326): 951254mologous to Homo sapiens putative p150,accession number U93563,Smith-Waterman Score=891.
atgacggatatacagtacaataataatatccctatgtttgaaataaggggtggactgacacctcacacggccaggtactcctctgagacaaaacttccagaagaacgatcaggcagcagcatctgcggttcaccaatatccgctgttctgcagccactgctgctgatacccaggcaaacagggtctggagtggacctccagcaaactccaacagacctgcagctgagggtcctgtctgaggaagttcaaaccaatggcaaagaagttaaaagctttgaaaaaaaattagatgaatggataactagaataaccaatgcagagaagtccttaaaggacctgatggagctgaaaaccaaggcacgagagctacgtgacgaatgcagaagcctcagtagccaatgtgatcaactggcagaaagggtatcagtgatggaagacgaaatgaatgaagtgaagcgagaagagaagtttagagcaaaaagaataaaaagaagtgaacaaagcctccaagaaatatgggactatgtgaaaagaccaaatctacatctgattggtgtacctgaaagtgacggggagaatggaaccaagttggaaaacactctgcaggatataggaaaacttccccaatctagcaaggcaggccaacattcaaattcaggaaatacagaggacgcgacaaagatactcctcgagagagcaactccaagacacataattgtcagattcaccaaagttgaaatgaaggaaaaaatgttaagggcagccagagagaaagtgttggaagttctggccagggcaatcaggcaggagaaggaaataaagggtattcaattaggaaaagaggaagtcaaattgtccctgtttgcagacaacatgattgtctatctagaaaaccccatcgtctcagcccaaaatctccttaagctgataagcaacttcagcaaagtctcaggatacaaaatcgatgtgcaaaaatcacaagcattcttttacaccaataacagacaaacagaaagccaaatcatgagtgaactcccattcacaattgcttcaaagagaataaaatacctaggaatccaacttacaagggatgtgaagggcctcttcaaggagaactacaaaccactgctcaatgaaataaaagaagatacaaacaaatggaagaacattccatgctcatgggtaggaagaatcaatatcgtgaaaatggccatactgcccaaggtaatttatagattcaatgccatccccatcaagcaaccaatgactttcttcacagaattggaaaaaactactttaaagtttatatggaaccagaaaaagagcctgcatcgccgagtcaatcctaagccaaaagaacaaagctggaggcatcacgctacctga

SEQ ID NO: 2499 - DNA, 1239 bp, Homo sapiens; identical to SEQ ID NO: 1384
  SIMILAR (1133)..(954): 811254mologous to Homo sapiens Human secreted protein HLYES38, SEQ ID NO:220,accession number Y86305,Smith-Waterman Score =247.

SEQ ID NO: 2500 - DNA, 1740 bp, Homo sapiens
  SIMILAR (361)..(948): 871254mologous to Homo sapiens putative p150,accession number U93563,Smith-Waterman Score=845.
atgtggtgccaatcttctgagaccatctttcaggcccatggagagaaactagcagcaacttccaagccaccagaagcctctaaaacaatacattttcactttcactccattctgtctataaattttaaattcatatccaattatggtaaaaatattttatgccccagactgacacctcacacggccgggtactcctctgagacaaaacttccagaggaacgatcaggcagcagcatttgttgttcaccaatatctgttgttctgcagcctctgctgctgatacccaggcaaacaggatctggagtggacctccagcaaactccaacagacctgcagctgagggtcctgactgttagaaggaaaactaacaaacagaaaggacatccacaccaaaaccccatctatatgtcaccatcatcaaagaccaaagtattggaagttctggccagggcaatcaggcaggagaaggaaataaagggtattcaattaggaaaagaggaagtcaaattgtccctgtttgcagatgacatgattgtatatctagaaaaccccatcatcccagcccaaaatctccttaagctgataagcaacttcagcaaagtctcaggatacaaaatcaatgtgcaaaaatcacaagcattcttatacaccaataacagacaaacagacagccaaatcatgagtgaactcccattcacaattgcttcaaagagaagaaaatacctaggaatccaacttacaagggatgtgaaggacctcttcaaggagaactacaaaccactgctcaatgaaataaaagaggatacaaacaaatggaagaacattccatgctcatgggtaggaagaatcagtatcatgaaaatggccatactgcccaaggtaatttatagattcaatgccatccccatcaagctaccaatgactttcttcacagaattggaaaaaactaaagttcatatggaaccaaaaaagagcctgcattgccaagtcaatcctaagccaatagaacaaagctggagatatgtgaaacagagcaagaaaatagctgtctatgcagaaagaagcaggtgctcaccaggcactgaatttgctggcaccttgatcttggacttcccatcctccagaactgcaccctccagtaggggcagactgacgcctcacacggccaggtacccctctgagacaaagcttccagaggaacgatcaggcagcaacatttgctgttcagcaatattcgctgttctgcagcctctgctgctgatatccaggcaaacagggtctggagtggacctccagcaaactccaacagacctgcagctgagggaacgcagctcctcgccagcaacggaacaaagctggatggagaatgactttgacgagttaagagaaggcttcagacgatcaaactactccaagctaaaggaggaagttcaaacccattgcaaagaagctaaaaaccttgaaaaaagattagacgaatggataactagaataaccaatgtagagaagtccttaaatgacctgatggagctaaaaaacatggcaaaagaactacgtgatgaacgcacaagcttcagtagcgaattcaatcaactggaagaaagggtatcagtgattgaaaatcaaatgaacgaaatgaagcgagaagagaagtttagagaaaaaagagtaaaaagaaatgaacaaagcctccaagaaatatgggactatgtgaaaagaccagatgagatctacatctga

SEQ ID NO: 2501 - DNA, 915 bp, Homo sapiens
  SIMILAR (361)..(912): 831254mologous to Homo sapiens p40,accession number U93566,Smith-Waterman Score=743.
atgggaacagctccagtctacagctcccagtgtgagcgacgcagaagatgggtgatttctgcatttccaactgaggtaccaggttcatctcaccggggagtgtcggaaagtaggtgcaggggcagactgacacctcacacggccgggtactcttctgagacaaaacttccagaggaacgatcaggcagcaacacttgctgttcaccaatatccgctgttatgcagcaaccgctgctgatacccaggcaaacagggtctggagtggacctccagcaaactccaacagacctgcagctgagggtcctgactgttagaaggaaaactaacaaacagaaaggacatctacaccaaaaccccatctgtacgtcaccatcatcaaagaccaaagagaagtccttaaaggacctgatggagctgaaaaccaaggcacaagaactacgtgacgaatccacaagcctcagtagccgattcgatcaactggaagaaagggtatcagtgatggaagatcaaatgaatgaaatgaagctagaagagaagtttagagaaaaaagaataaaaagaaataaacaaagtctccaagaaatatgggactatgtgaaaagaccatatctacgtctgattggtgtacctgaaagtgacggggagaatggaaccaagttggaaaacactctgcaggatattatccaggagaacttccccaacctagcaaggcaggccaacattcaaattcaggaaatacacagaattccaccaagatactcctcgagaagagcaactccaagaaacgtaattgtcagattcaccaaagttgaaatgaaggaaaaaatgttaagggcagccagagagaaaggttgggttaccaacaaagggaagcccatcagactaacagctgagctcttggcagaaactctataa

SEQ ID NO: 2502 - DNA, 1393 bp, Homo sapiens
  SIMILAR (123)..(1): 851254mologous to Homo sapiens Human secreted protein, SEQ ID NO: 7420,accession number G03339,Smith-Waterman Score=171.
atgtgggaaagtttggaacttcctagagacttgttgaatggctttgacaaaaatgctgatagtgatatgaacaataaggttcaggctgaggtggtctcagatggagatgaggaacttgttgggaactggaacaaaggtgactcttgttatgttttagcaaagacactagtggcattttgcccctcacctagagatttgtggaactttgaacttgagagagatgatttagggtatgtctttatcagcagcatgaaaacagatgaatacagtaaattggtaccagtagagtggggtgctgctgaaaatatacccaaaaatatggaagcgactttggaactgggtaacaggcagaggttggaacagtttggaaggctcagaagaaggcaggaaaatgtggaaaagtttggaactccctagagacttcttgagtagctttgacaaaagtgccgatagtgatataaacaataaggtccaggctgaggtggtctcagatggagatgaagaacttgctgggaactggagcaaaggtgactctcgttatgttttagcaaagagactggcagcattttgcccctgccctagagatttgtggaactttgaacttgagagagatgatttagggtatctggtggaagaaatttctaagcagcaaagcattcaaaatgtcacttgggtgctgttaaaagcattccactttaaaagggaaacagagcataaaatttcagaaaatttgcagcctgctgatgcagcagaaaagaaaagcccatttgctgagaagaaattcaagccagctgcggaaatttgcataagtaatgaggagccaaatgttaatgggggaaatgtctccaggacatgtcagaggtcttcacagcagcctttcccatcacaggccttgaggcataggaggaaaaagtggtttcatgggcaggtcctagggtccccatgctgtgcggcgcctagggagttggtcccctgtgtcccagccactccagccatggctgaaagaggccaatgtagagcttgggccatggcttcagagggtgcagtccccaagctttggcagcttccacatggtattgagcctgcgagtgcacagaagtcaagaattgaggtttgggaacctccgcctagatttcagaggatgtatggaaatgcctgcgtgcccaggcagaagtttgctgcagaggtggggccttcatggagaacctctgccagtgctcagcccaaaggaggtgctcaggaagagctgctgaatgaaatgaccgagtgtatcacaaatgtgcaaactcctgaaagttataaacattatcgtagttccttgtttcttcctgtttcactgcatattctgtgcaaaggaattaaatgtacagtgaatagaagggaaggggattaa

SEQ ID NO: 2503 - DNA, 5231 bp, Homo sapiens
  SIMILAR (3112)..(4656): 951254mologous to Homo sapiens putative p150,accession number U93574,Smith-Waterman Score=2566.
atgaaagtccagaagcttctggcagccaccttttccatcacagtacagccagccttggggggcagactgacacctcacacggccgggtactcctctgagacaaaacttccagaggaacgatcaggcagcagcatttgctgttcaccaatattcgctgttctgcagcctcaactgctgatatccaggcaaacagggtctggagtggacctctggcaaactccaacagacctgcagctgagggtcctgtctgttagaaggaaaactaacaaacagaaaggacatccaccccaaaaacccatctgtacgtcaccatcatcgaagaacaaagttgcaaagctaacagctccttatgagaactcaaaaggcactccttatgttcccagcaataaagatctaaggcccaacagatttgtgagtatccaagagatcgaattctttcttctgaggggggcaagaattgaggttgttgcagacccgtatagaagtgaatttgccactgatgcagaaaaagcagttgacaaaatccaccatctctttatgattaaaaccctcagcaaaatggacattaaagggacgtaccttaaggtaataaaaatcatctatgacaaacccacagccaacatcatactgaatggggaaaagtttaaagcattccctcagagaactggagcaaaacaaggatgccctctctcaccactcctattcaacatagtgttggaagttctggccagggcaatcaggcaggagaaggaaataaagggcattcaattaggaaaagaggaagtcaaattgtccctgtttgcagatgacatgattgtatatctagaaaaccccatcatctcaacccaaaatctccataagctgataagcaacttcagcaaagtctcaggatacaaaaacaatgtgcaaaaattacaagctttcttatacaccaataacagacaaacagagagccaaatcatgagtgaactcccattcacaattgcttcaaagagaataaaatacctaggaatccagcttacaagggatgtgaaggacctcttcaaggagaactacaaaccactgctcaaggaaataaaagaggatacaaacaaatggaagaacattccatgctcatggataagaagaatcaatattgtgaaaatggccatactccccaagaggactccattattatcgctgcctagtacattatatgaggagctgtggagacttaggtcctacttcccattgtgccctcaactttacaacatggagcagaataccacagactgggtaatttataaagaacagtgcatttggctcacagctctggagactggggagtccaagagcactgcaccagcatttggcaagggttatcccatggcagaatacatcatatggggcagattgacacctcacatggctggctactcctctgagacaaaacttccagaggaacgatcaggcagcaacatctgctgttcaccaatatccgctgttctgcagcctctgctgctgatacccaggcaaacagggtctggagtggacctccagcaaactccaacagacctgcagctgagggtcctgactgttagaaggaaaactaacaaacagaaaggacatccacaccaaaaccccatctgtacgtcaccatcatcaaagaccaaaggatcaaattcacacataacaatattaaccttaaatgtaaatgggctaaatgctccaattaaaagacacagactggcaaattggataaagagtcaagacccatcagtgtgctgtattcaggagacccatctcacgtgcagagacacacacaggatcaaaataaagggatggagggagatctaccaagcaaatggaaaacaaaaaaaggcaggggttgcaatcctagtctctgataaaacggactttaaaccaacaaagatcaaaagagacaaagaaggccattacatgatggtaaagggatcaattcaacaagaagagctaactaccctaaatatatatgcacccaatacaggagcacccagattcataaagcaagtccttagagacctacaaagagacttagactcccacacattaataatgggagactttaacaccccactgtcaacattagacagatcaacgagacagaaagttaacaaggatatccaggatttgaactcagctctgcaccaagtggacctaatagacatctacagaactctccaccccaaatcaacagaatatacattcttctcagcactacaccacatttattccaaaattgaccacatagttggaagtaaagcactcctcagcaaatataaaacaacagaaattataacaaactgtctctcagaccacagtgcaatcaaactcgaactcaggattaagaaactcactcaaaaccgctcaactacatggaaactgaacaacctgctcctgaatgactactgggtacataacaaaatgaaggcagaaataaatacattatttgaaaccaacgagaacaaagacacaacataccagaatctctgggacacattcaaagcagtgtgtagagggaaattcatagcactaaatgcccacaagagaaagcaggaaagatctaaaattgacaccctaacatcacaattaaaagaactagagaagcaagaacaaacacattcaaaagctagcagaaggcaagaaataactaagatcagagcaaaactgaaggaaatagagacacaaaaaatccttcaaaaaatcaatgaatccaggagctggttttttgaaaagatcaacaaaattgatagaccactagcaagaccaataaagaagaaaagagagaagaatcaaatagatgcaataaaaaatgataaaggggatatcaccactgatcccacagaaatacaaactaccatcagagaatactataaacacctctatgcaaataaactagaaaatctagaagaaatggataaattcctcaacacatacaccctcccaagactaaaccaggaagaagttgaatctctgaataaaccaataacaggctctgaaattgaggcaataattaatagcttaccaatcaaaaaaagtccaggaccagatggattcatagccaaattccaccagaggtacaaggaggagctggaggccagcatcatcctgataccaaagcctggcagagacacaaccaaaaaagagaattttagaccaatacccctgatgaatattgatgcaaaaatcctcaataaaatactggcaaaccgaatccagcagcacatcaagaagcttatccaccatgatcaagtgggcttcatccctgggatgcaaggctcgttcaacatatgcaaatcaataaacgtaatccaggatataaacagaacgaatgacaaaaaccatatgattatctcaatagatgcagaaaaggcctttgacaaaattcaacaacccttcattctaaaaactctcaataaattaggtattgatgggacgtatctcaaaataataagagctatctatgacaaacccacagccaatatcatactgaatgggcaaaaactggaagcattccctttgaaaactggcacaagacaggggtgccctctctcaccactcctattcaacatagtgttggaagttctggccagggcaatcaggcaggagaaggaaataaagggcattcaattaggacaagaggaagtcaaattgtccctgtttgcagatgacatgattgtatatcgagaaaaccccatcgtctcaacccaaaatctccataagctgataagcaacttcagcaaagtctcaggatacaaaatcaatgtgcaaaaatcacaagcatttttatacaccaataacagacaaacagagagccaaatcatgagtgaactcccattcacaattgcttcaaagagaataaaatacctaggaatccaacttacaagggatgtgaaggatctcttcaaggagaactacaaaccactgctcaaggaaataaaagaggatacaaacaaatggaagaacattccatgctcatgggtaggaagaatcaatatcgtgaaaatggccatactgcccaaggtaatttatagatttaatgccatccccatcaagctaccaatgactttcttcacagaattggaaaaaactactttaaagttcatatggaaccaaaaaagagcccgcattgccaagtcaatcctaagccaaaggaacaaagctggaggcatcacactacctgacttcaaactatactacaaggctacagtaaccaaaacagcatggtactggtaccaaaacagagatatagaccaatggaacagaacggagccctcagaaataatgccacatatctacaaccatctgatctttgacaaacctgacaaaaacaagaaatggggaaatgattccctatttaataaatggtgctgggaaaactggctagccatatgtaggagaaagctgaaactggatcccttccttacaccttatacaaaaattaattcaagatggattaaagacttaaatgttagacctaaaaccataaaaaccctagaagaaaacctaggcaataccattcaggacataggcatgggcaaggacttcatgtctacaacaccaaaagcaatggcaacaaaagccaaaattgacaaatgggatctaattaaactaaagagcttctgcacagcaaaagagaaactaccatcacagtgaacaggcaacctacagaatgggagaaaatttttacaatctacccatctgacaaagggctaatatccagaatctacaaagaactcaaacaaatttacaagaaaagaacaaacaaccccatcaacaagtgggtgaaggatatgaacagacacttctcaaaagaagacatttatacagccaaaaggcacatgaaaaaatgctcatcatcactggccatcagagaaatgcaaatcaaaaccacattgagataccatctcataccagttagaatggcgatcattaaaaagtcaggaaacaacagaccaagctccaatgtcttctctgtgaaactttctgagatccaatccttggctctcatagagactaggtgcttaatgaatgctgatgaacagggtgtgccactgattcaagaaatgctggaatcttgggcaagtatttgcaaagttcccaagtatccaaatgccgaagcagtgcggccagaagagcaaacacgtacagacagagacacgggaatgccattagctttaatatatgaacaagagattgctaaagtcatctaa

SEQ ID NO: 2504 - DNA, 2667 bp, Homo sapiens
  SIMILAR (229)..(1242): 891254mologous to Homo sapiens putative p150,accession number U93563,Smith-Waterman Score=1543.
atggctgggtactcctctgagacaaaacttccagaggaacgaccaggcagcaacatctgctgttcaccaatatctgctgttctgcagcctccgctgctgatacccaggcaaacagggtctggagtggacctccagcaaactccaacagacctgcagctgagggtcctgactgttataaagaaaactaacaaacaaaaaggacatccacaccaaaaccccatctgtacgtccccatcatcaaagaccaaagacagatcaacgagacagaaagttaacaaggatatccaggaattgaactcagctctgcaccaagcagacctaatagacatctacagaactctccaccccaaatcaacagaatatacattcttcgcagcaccacactgcacttattccaaaatcgaccacatagttggaagtaaagcactcctcagcaaatgtaaaagaacagaaattataacaaactgtctcttagaccacagtgcaatcaaactagaactcaggattaagaaattcactcaaaactgctcaactacatggaaattgaacaacctgctcctgaatgactactgggcacataacgaaatcaaggcagaaataaagatgttctttgaaaccaacgagaacaaagacacaacataccagaatttctgggacacattcaaagcagtgtgtagagggaaatttatagcactaaatgcccacaagagaaagcaggaaagatctaaaattgacaccctgacatcacaattaaaagaactagagaagcaagagcaaacacattcaaaagctagcagaaggcaagaaataactaagatcacagcagaactgaaggaaatagagacacaaaaaacccttcaaaaaatcaatgaatccaggagctggttttttgaaaagatcaacaaaattgagaccgctagcaagactaataagaaaagagagaagaatccaatagatgcaataaaaaatgataaaggggatatcaccaccaatcccacagaaatacaaactaccatcagagaatactataaacacctctacgcaaataaactagaaaatctagaagaaatggataaattcctggacacatacaccctcccaagactaaatcaggaagaagttgaatctctgaatagaccaataacaggctctgaaattgaggcaataattaatagcttaccaaccaaaagaagtccaggaccagatggattcacagccgaattctaccagaggctaaaacagtgccgaaaagcacatctagacccagtgtctctcacacaccggagcggccccggagcgcgggaggaccggctgagtgacagcggagacgcgtcccgaggttgttggaacctgtcacagcacgccgccgtcacgtcgcccgagtctgaggagcggcgcatcaggaccctcagctgcaggtctgttggagtttgccggaggtccactccagaccctgtttgcctgggtatcagcagtggaggctgcagaacagtgaatattggtgaacagcaaatgttgctgcccgatcgttcctctggaagttttgtctcagaggggtaccgtccgtgtgaggtgtctgcccctactggggggtgccctccagttaggtgtctgatgatcaacactgtgtccttaataggtgtcaagtttactgaagtgtttgattcaataaacatatctgaacatctagagcttgcatgcctgcaggatcacaactccttgctagcaagggaacaaaactggacagaggatgagtttgacgaattaacagaagtaggcttcagaaggtgggtaataacaaactcctctgagctaaaggaggaagttcgaacccattgcaaagaagctgaaaaccttgataaaaaattagacgaatggctaactagaataaccaatgtagagaaggccttaaatgacctgatggagctaaaaaccatggcacgagaactatgtgacgaatgcacaagcttcagtagccaattcgatcagctggaagaaacggtatcagtgattgaagatcaaatgaatgaaattaagcgagaagagaagtttagagaaaaaagaatgaaaacaaatgaacaacgcctccaagaaatatgggactatgtgaaaagaccaaatctacgtctgattggtgtacctgaaagtgacagggagaatggaaccaagttggaaaacactctgcaggatattatccaggagaacttccccaacctagcaaggcaggccaacattcaaatacaggaaatacagagaatgccacaaagatactcctcgagaagagcaactccaagacacataactgtcacattcactaaagttgaaatgaaggaaaacatgtcaagggcacccagagagaaaggtcaggttacccacaaagggaagcccatcagactaacagctgatctctcagcagaaactctaaaagccagaagagagtgggggccaatattcagtattcttaaagaaaagaattttcaacccagaatttcatatccagccaaactaagcttcataagtgatggagaaataaaatcctttacagacaagcaaatgctgagagattttgtcaccaccaggcctgccctacaagagctcctgaaggaagcactaaacatggaaaggaacaaccggtaccagccactgcaaaaacatgccaaattgtaa

SEQ ID NO: 2505 - DNA, 825 bp, Homo sapiens
  SIMILAR (365)..(318): 811254mologous to Homo sapiens Human secreted protein encoded by gene No. 47,accession number Y27613,Smith-Waterman Score=60.
atgagggctctcaaacttcagaggaggaaatcgttttggattgtcgtggcctgggaagcttttgtgcagctggtaaattatgaatgtaaagtaggagaatggaaaggcctagctcactgtgtttcacaaaacaataaatacagaaccacatacatcatagcaggggtccccaatccccaggaaccaggatacacagcaggaggccagttaaaaggaaatgatctgactgttctgcatctgctagtgattgaaggcaaatgggaagcagtgcgcaagttcccgttcaagaaatatatagtgaacacggctattgtgaaggaggcaaggaaatactgggtagaagagggcagttccctggcaaaggccacacgctcaaaccctggatacctgcagccctacatgagaacaggcattcctgtttttgcacccccaaagttgccttttggcccaccatgccctctatcctgcacgcatataaaccccaaaccccaagctccagaagcagaccagcagctccccatccatcttgctgaaagccatttccaccactcaataaaacctcgcatacatccttcaagtccgtgtgtgacccgatttttcctggatgctgaaagagagctcgggatacagaaagctgtcccctggtcctttacccttgtgaaaaagcagaagtcactgggacttccatcagtgcaagatttcggcagtgtctacaaaatgaacatttggtctgatgtagcgtgctgtgacccacagctgcaacaaccagctgcgtctgctcaaacttcagccatcagccagctcagtcgtgtaacggaatcttag

SEQ ID NO: 2506 - DNA, 735 bp, Homo sapiens
  SIMILAR (345)..(554): 501254mologous to Homo sapiens novel transcript; similar to transcription factors activation domains; linked at 5' end to AT hook motif of HMGI-C; Method: conceptual translation supplied by author,accession number U28131,Smith-Waterman Score=145.
atgctggatgtgcctcgcattgccttgaccacagacactgaccacaaccagtgtattgttctgagctaccagcatgatgaagtctacattcagaaaaaaatgttacatccgaaactggacactcagccagaactgaagcaaagttccctggactgggaaataagctctcccttgtattcttgtttcctttcctactgtcacccaaaagacatctgcaatggctccctatcagagaaggagggagaatgggttagtgtagagttgcgtattgaaaagggggacaaagtaataggacaggtggtggaatctcagatgtcagaaagactacgacagaaatggcagacagcataccagcaggtgaggagatacgaggcaagccgactgacggcaaaacgacgtagcagagaaagagagaagaggagggacgtctggacaccgagagatgtttggctcggggcagtcagagcggagtccagcccctgggcggcccaactccaggggaagatcaccttcccacttcatccatccccacccttccagctccccatccatcctgctgaaagccatttccaccactcaataaaacctcgcattcatccttcaagtccgtgtgtgacccgatttttcctggattctggaaaagagctcggaatacagaaagctgtcccctggtcctttgcccttgtgaaaaagcagaaggtttttcctgatgaggactctctcagtaattcatag

SEQ ID NO: 2507 - DNA, 469 bp, Homo sapiens
gcaaaggcagacacgcagagctgagcaggtcaccactatacccagcgtggagacagcatgcccttcaagcccaggggcaacctgcagccctgaattagatcactcagaaatcacagacctcaggattcaagaacttcgggtctttcacaagttcacaggtgtagtggctgatgggagcttcaggttccaggtccggggcttcagaaatcaaggctccatggacagtgtctatatcatggacttcttgccttcagaaagtgatcaagtagtctggactggttactatggcttagtgtataacctggtgaaaatttcatgggaacttcaaggagacgaagaacaggatggacttagaaacatgatatggcaaacattgcagaaaacaaaggattatgaggaagatgtacgaatccaaaatgcaatcaatatagctcagttcagtgaccagaaataccaggaagaaggctga

SEQ ID NO: 2508 - DNA, 390 bp, Homo sapiens
  SIMILAR (9)..(59): 471254mologous to Caenorhabditis elegans Hypothetical protein Y45G5AM.c,accession number AC084155,Smith-Waterman Score=43.
atggaggagcctcaagaggaggaacatggcgctgcctccagaggctgggagggggtcctggctgacagccagcaaggatctgtggactcaagtcctacaaccacaagaaacccaatctgccaatcacaggcatgtgtttggaaaagggccccaagtccagaaaaactatctgcagcatctctcaaaggcttatgcccagttcaagtacgtttgcagattgagaacctgagcatgtgcaaaacgcaatgcgtgaaagtgggaagaactggaaggggagacaagaaaattatgatcagataccaacagagacccaagtctgaagagtgtggttctagcaccccaccccaaatggacgatgtcaaccaaggttctgtgggaagtcctctttag

SEQ ID NO: 2509 - DNA, 425 bp, Homo sapiens
  SIMILAR (167)..(274): 341254mologous to Homo sapiens SDF-1 alpha/RANTES cross-over chemokine molecule SSRS,accession number Y06743,Smith-Waterman Score=61.
atcatgcagagtattttcactgccctaaaagtcctctgtgttccctgcactcatctttcccaccttgtcttgcctgtttctgttaggtttagtccgaggcctagcagagggaatgggcagaagtttccagttccaggcttcaccccaggctcgcagcttcaagcagagcctgtcgcttaggctcccttgcacctggagtcgaaaccatggctcccattcacctgtctcttattttcctgtccttcccactcctcactcacctactattcatttccatttttggatgaggattctcctttattgctttttaactaaaaacctgttttagttagcatctttattctaatttctttaaatgctatgtcatactcagcaaggacatgctcatattaggggaagcacataaagtaagatatccctgagag

SEQ ID NO: 2510 - DNA, 848 bp, Homo sapiens
  SIMILAR (24)..(113): 531254mologous to Homo sapiens Human secreted protein, SEQ ID NO: 6220,accession number G02139,Smith-Waterman Score=68.
catctagaggctgggaatacctaactttctgggaatgcagcccagcaagcctcagcttcattttcctagccctcactcggaatggagtcgctctggttcaaacgcctctgacaatatcaccccgttttattttctatcacttaccactatctgaaattaagtagataatttgtttactctctgtccccacccactagaatgagaacgcggcccttgcatccttacgtgtgtctggcatataaggggtgctcaatgattatttgtttcatggatgaacagatttatggatggctgggtggatgacgatcttagaaggggttccagggctagctggctttctgtttctcccactcaagcacccaagccctgacccacaaagtaaaggaacaggcgaaacttctcgccaaatagcttcaaggcagaaactacgcagctggcttgggaattccgtacaacgcgaacgcgcatgcacaggcaggactgagcgtgtccatcttcgcattactcccggagatgactctcggaaacgttcatctgcatctcattaccgggtagcaggaataagtaggctgaccctcagtttggaccgggaacagctgtatctggagcagtccactgagggacctgaacaagataaacgggaagggaaaagcgccagaagttcgagcagagaacccaccgggcagccgcggacgttactgggaggaatgagggcgaggaagagaaagacgttagtcctcggaccgtttccgagagtcatctccgggagtaatgcgaagatggacacgctcagtcctgcctgtgcatgcgcgttcgcgttgtacggaattcccaagccagctgcgtag

SEQ ID NO: 2511 - DNA, 1482 bp, Homo sapiens
  SIMILAR (645)..(872): 291254mologous to Homo sapiens immunoglobulin heavy chain,accession number AJ253037,Smith-Waterman Score=68.
atgctggcatctcaactggggaaacatgaccctttcctcacaacacccttgaccttggcatttgttggctctcctctgaatcaccttcatgccttccattcagatcccggattagctgaactccccgtggtacctgctacagggtgcatcactgtctgcaggcttcatcctggcagtcctgctgcacctcagctctgcaactcccttctcctactggggactttcaaggatttccctaaaattggtaggagagttaaagaaggaatgatgatgggagtattggacagacacattaagtccaggacaagtatttcaaaccaggaatttttcctagagaaacataaatgtcttagaatgtgcccatttgtagcttcataccagcagctttgtatcagctgcactgagggtcttcagtttgcagcccaagtgccgggggacatttgggattctcagagactatcttatgcatccatggcaaagcaagaaaagtgtctttggcctggagaaccagatcccttccatctacatgtgaactggggcgacacaggggacactatctccagtcctttctatgatgagcatcttccggcagtgaggttcacctactgtgtggctgatgccatgttggggggtccgattccccagtttccccaacttgtggttatgcgggaggttcaaccaatgggtggtgctggcagaaaagtggcaggtggcgcttccagcagcagctctgcttccttcaaggcctgtcccatgctggccagcctgccttttgggggcaggcgccgagtcttgattccgtcgagtgcaaagcgtgcactgaacccggagtacattttcttcctctcagagcaacagaagcctgtgaaactcttgttggccaagcccagcagtaaatattcagaaataaaagaagagcaaacttttgcgtgtgcactttctactttgtacactaaaaggtcaaggctcaattggaataatctggagaagcttttctacaatgtctacactccagggcccacacctgccaatgaaatctgtaccttaaacctgaagaggaccaggtatcaatattctttgaaaagcagcccagatgatgcagctagtggcattaagtcctccaaatacatcgtccagccaataaatattgattctgacctggttgccacttgttctcctaacatcttctttcattccaagtcttctcgaaactataaaaagctaatttccagattcccaatctggccagaaggactcagtttttcaatcagatctcccagaggcctgagagcaatcattatgaatgagaaaaggcattttgtattctccccagcttgctcgcagacagaaggagcagggctggttacctacggaggtaatgctgaaattaaaacacttgtacctgctacgcatcttggacagatcaaagaagacgctgggcagcagcccgacacccaaacagagggtcagccgtcatcgtaa

SEQ ID NO: 2512 - DNA, 593 bp, Homo sapiens
  SIMILAR (437)..(556): 1001254mologous to Leishmania major probable levansucrase precursor,accession number AL160371,Smith-Waterman Score=211.
gactgccagctcttgatggcagccagtgtggcctacaagatatggaggcctctggtgagtgtgagcagctgcctcaacccagtcctgtactttctttcaaggggggcaaaaatagagtcaggctcctccagaaactgaggcagaacaagttgggaatcgattgtgcctcatatcctcaggcgcaggagaagggagcatttattcagcagcttctgtcttcttctgggcagggccacacttcctggatgagcttcagggctgctcttcctgcaggggctttgagaagttctcttcaaaggggcgtgtgcagcgggtgcctggccatcctggagaacaaaaaagataccagaattgcagaatggataagaattcaccaaccaactatctgctgccttcaagaggcacacctaacacataaggagtcacataaacttaaggaggagcgactcaagccttcgcgaaagaaaataaccaaaaagcatacaaagaaacgtacggcgtctctcatattacacgccatgatatgctgcagatccctaaacagcagcaaaacgaaaataccaagtgcctcaattcgatcaatcaacgattaa

SEQ ID NO: 2513 - DNA, 1477 bp, Homo sapiens
  SIMILAR (1442)..(1383): 451254mologous to Human immunodeficiency virus type 1 tat,accession number Y16018,Smith-Waterman Score=55.
ctcaaaaaaaaaaaaaaaaaaaaaaaattatttgttctgtctcaggtcttagggaccccttacctcagctaatgtctctgtcccctaaatgcacatcggtgggcagggcaaacccgtaggtgcccttatccctcccaaggctgcactgcaaagctcctgtgtttccattgcccactttcttctccctctcctttcttttctgattataccaaacaggaatgactcgtgtacttgagtcaaaatcctgatggcattgggaaaagtaaactgaaggaatttttgtacacttataccagctaagatgttctgactgcaacgacagaaaactccagctcaactggcttaaacaagaacagggctctctcacgtgagaagccaagagttagaacaactccaggcccagaatggtccggagctcaagctgcagttctcttagctcagtcttcctccgtactggtgggcttttaattggagactaagctctcctcatggtgacaagatggctgcaggagttcaggtatctcatccagaagcaagaaaagggcatgtcttgcttgcgtctctaggcgtaagggaactggtccagatgtccccgccccacatcccttcagatcccaattggccagaatatggcacgtgcccatgtttcaaccaatcatgggcaaggacatgggaccagcatgattggcctagacccctggagcctggggctgggcccagcatcccctgaatacacggccatctggaggagaaggtaactgaatttcactggggatctgtgataaaagggagcatgggtgttggggagacacctgttccagttgggtttcctatgaggtccaggacagggcttggtgggcactcggaagccagtgtctgaagtgctcagcatcctcctcttcctcggtggtgggtgtccaccgcccaggccccacccctggccttggacacttcatggaaacactgctggtttgctgtggtgttgggtggctcctatctattccccgtaagtgctggcctctgttgacaccatttctgctacctcatctgagattgttctcatcagctcacagagattcatttcagtgaatgaaccaaatctaagctccatctggatacaattagctggctccccacttcctggactgacggtaaccaccttttccaatgacccactcggctgaatgatcacattccttttctgcacccagtcgtggccccctgcaggctccacaccgcggggagtggccccaccaacctggactcttcgggcctgatggcggcctgagtcctctacaagtgaaaattcctcagaccacggttgcagctgagcatcctgggactgcctctcctccagccctggagactcctcattctggggaatggcaacttcgggctggactctgtggatgagtttctcagatgcctgggtgacaccaaggtagagcgggggacctgcagacttcgttccctgcat

SEQ ID NO: 2514 - DNA, 560 bp, Homo sapiens
  SIMILAR (143)..(181): 461254mologous to Pseudomonas phage D3 Orf92,accession number AF165214,Smith-Waterman Score=41.
gctgtatttcattacatcttaaatatctggatacccctaatgtctttcaagatgtcactgagagttcgttctggtcccgcaggtcgcggcagcgtgtgtctttgtcctgctcaggccccggacccttactccactcttggacactcatcttggaaagccgcggcaatggcaggagaaatggctgccccagcaaagtgtcacaggaatcatgcctggtcacctttacacaaacagaaccaccggtttacctggcttaaaagttttgctggacccaagaaacgggtagatttcggatacttctgcgcttccgaggggtcgggaaaggctctgcggttctaactaacccacgactgcccgggggtaccgagcattttagctgtggggtctcccccgcgccagcctctgggcgcccggtcccacaaatctcattgtgtcctcggttctgcccgcgccggctaggcgttcgtcttcgcgtttctggctgaaacccactgtctttggagattccgacccaacgaggccgaaactaagccgggagacctcccaaagtaaggagcacc

SEQ ID NO: 2515 - DNA, 576 bp, Homo sapiens
  SIMILAR (1)..(90): 651254mologous to Homo sapiens ribosomal protein S12,accession number X53505,Smith-Waterman Score=98.
atggccgaagaaggcactgctgctgctggtgtcatggatgttaatactgctttacatgaggatggcctagcacgtggaattcacaaagctggcaactttagacaagcaccgagcccatcttttggggaacaaaaaaatgttgaaaactgccacaagagtaagcagaagctgcagcatcaacccaatggccaattaggaaccagagaacgagaagaacccagagatccccgcttactcaccaggagaaagaagagtaagcaggccagcagccctgccactcacagggctgtcccagattcacaggcaatggactccaggaaactactgaaggatgtgctctacaaaatggaggcaggaaaccaagaagaagggaaggaaaatagaaaaataggagattccacacagaagacaggtcaagggaatcccctgaatgatggtgtgggaaacccctgggaggcaaccgctccaagccaagagggctaccagatcacaacagaacacgtgagtgactctggtgtaggtactggatccacaagtatctttgaatcccctatgctgagcatggtactgaaatga

SEQ ID NO: 2516 - DNA, 1761 bp, Homo sapiens
  SIMILAR (1360)..(1512): 941254mologous to Homo sapiens Human secreted protein, SEQ ID NO: 5341,accession number G01260,Smith-Waterman Score=257.
ccgagtctgcagctccacactttaaatcatactcgaatgcaggacaagtcctaaatatttgccccttcccttgcagtaatttattttctgtatggactgtccctcccccagaggcttccccaccctccattgcctggcccaggtgagcagcttggcaggtctccaagtggaacccggtccagacagggctgcctcgacttcacctttccccctaacttcctccaagggatgctgccccttctcagccccctgcgtggtgtatattggtgggaggcatagaggatggatgttctagaaatgacgtaagacacagtggcccacccccaagttagggtggaaaaaagtttccagaggtttttaaagaaattggattaagctgggtccctaacttcaagaaattcccattatgctccttctcacctttcttttttgctaattatggaaaatagggcccatttcatcatagcctccttcccccgtgctccactacaatcgccgcattctttctagctgcagctggtttcttcaaggctcctgcttaaagtccacacgttattatggccgaaagcaacctggtgcttcggcctggataagagccccttctgcatcttattcacagcttgcaaccctcagcccctttgaatgagggcccctcaggggaaagggtcattacccttggaccctgcaaaccccagactcgttgagcagcaacgcaaatcacccatcatccccactgccccaatcctagaatatgtctgctctcctatgctctctgcagctgtaagccagaggggattcaaggtaaataggctttacagggctcccctcctccaaacacacacagaatgggctggtttctttacaagtttaaaaaaagcccccttctccatgcacaagttcaattccctccaatgctgtcgtcatcgacatatacaggtgtgtacgtaggtgtatgtgtgtactctgcacgtatatctcttctgtcttgaagaccctgttaactttgtgaaataacttccacatttcaacacacttcacagtacaggaaataaagtaatatgaaaaacaaaaaaaaaaaaaaaaaaaaaattgacgccgcgccaacaaatttccgttttcctactcgtttcgggccaggggttattttatgagcatctccgatgttgcacacgtggcgtgtgaaccgagagaaagaagatggagagatcaccctccagacgtcgtcgcctggaagaggccccaaaattgccatataagaacccaacacaccttgctcagcagcaggaaccctggagtcggctcaactcaacccccacaattacttccatgaggcgggatgcctactattttgatcccgagataccaaaggatgacctggacttccgcttagcagccttgtacaaccaccacactgggacattcaagaacaaaagtgagatactgttaaaccagaaaaccacgcaggatacctatagaaccaagatccaattccctggagaaatttttaacccctcccactccacccatcactttcctggctaacatcagacactggatcaaccctaaaaaggagtccatccacagcatccaaggatccatagtgtcccctcacactgcagccaccaatggaggctactcccgaaagaaagatggtggcttcttctccacctagtgttgacagatccctgaactaattatagtgaaacatactgcggcccacttccattaaatagatttgtgcaagaaaaaaaaaaaaaaaaa

SEQ ID NO: 2517 - DNA, 486 bp, Homo sapiens
  SIMILAR (418)..(374): 801254mologous to Homo sapiens Human secreted protein, SEQ ID NO: 4372,accession number G00291,Smith-Waterman Score=70.
atgggagatattacaactgatactaaagaggcttcattgtctgaggtaaatatccgaggttcattgtctcatgccaagaaaatcaaggacgtggacacacaagaacccagatccaataggtaccaggaccttcaaggtagcaatgctgaaaatgagttaaccaccaatgaactaacatcgcagctgtctagctggaggcagtggttacaacatcaatgtcttcaggttcctctgaaatccacaggaagtgacgctgccattccacctctgcccttcctgctgccttcctctgcttcttctttgctgccacttcagacagactggctcaaaggagtgtcaaagtggaagaagtccaaagctgagagaaaaggactcttccccaaaaccctcctgctcctgtcacaaggcagctccagcccgtcatggccatccaaagtagcaggaatcactcaccaggaaacagaagatgctggggagcagatctga

SEQ ID NO: 2518 - DNA, 1654 bp, Homo sapiens
  SIMILAR (247)..(399): 531254mologous to Homo sapiens 3 beta-hydroxy-5-ene steroid dehydrogenase,accession number M27137,Smith-Waterman Score=117.
aactaatgccctctccagggtcaccctagaatcggatctggtccccagcatcttctgtttcctggtgagtgattcctgctactttggattggccacgatgggctggagctgccttgtgacaggagcaggagggcttctgggtcagaggatcgtccgcctgttggtggaagagaaggaactgaaggagatcagggccttggacaaggccttcagaccagaattgagagaggaattttctaaactccaagaacaaggaccaagctgacagtgctggaaggagacattctggatgagccattcctgaaggagagccttgccagggaccgtcttcggtccatcatccacaccgcctgttttcatttgatgtctttcggtgttcactcacagagagttttttcatgaatgttcaatgttgaaaggtacccagctcctgttaagaggcctgtgtccaagctagtgtgccagtcttcatctacaccagtagcatagaggtagccgggcccaactcctacaaggaaatcatccagaatggccatgaagaagagcctctggaaaacacatggcccgctccatacccacacagcaaaaagcttgctgagaaggctgtactggcggctaacgggtggaatctgaaaaacggcggcaccctgtacacttgtgccttacgacccatgtatatctatggggaaggaagccgattcctttctgctagtataaacgaggccctgaacaacaatgggatcctgtcaagtgttggaaagttctccactgttaacccagtctatgttggcaatgtggcctgggcccacattctggccttgagggccctgcaggaccccaagaaggccccaagcatccgaggacagttctactatatctcagatgacacgcctcaccaaagctatgataaccttaattacaccctgagcaaagagttcggcctccgccttgattccagatggagctttcctttatccctgatgtattggattggcttcctgctggaaatagtgagcttcctactcaggccaatttacacctatcgaccgcccttcaaccgccacatagtcacattgtcaaatagcgtattcaccttctcttataagaaggctcagcgagatctggcgtataagccactctacagctgggaggaagccaagcagaaaacggtggagtgggttggttcccttgtggaccggcacaaggagaccctgaagtccaagactcagtgatttaaggatgacagagatgtgcatgtgggtattgttaggagatgtcatcaagctccaccctcctggcctcatacagaaagtgacaagggcacaagctcaggtcctgctgcctccctttcatacaatggccaacttattgtattcctcatgtcatcaaaacctgcgcagtcattggcccaacaagaaggtttctgtcctaatcatataccagaggaaagaccatgtggtttgctgttaccaaatctcagtagctgattctgaacaatttagggactcttttaacttgagggtcgttttgactactagagctccatttctactcttaaatgagaaaggatttcctttctttttaatcttccattccttcacatagtttgataaaaagatcaataaatgtttgaatgtttaatgtgaaaaaaaaa

SEQ ID NO: 2519 - DNA, 388 bp, Homo sapiens
  SIMILAR (205)..(381): 251254mologous to Kaposi's sarcoma-associated herpesvirus K1 glycoprotein,accession number AF152366,Smith-Waterman Score=65.
gacttttttgacaattctgcccaggttaccattgcaggcattccatgtgatattagacacgtgtctcccaggaagattgagtgcaccactcgggctccaggaaaagatgtgaggctcaccacccctcagccaggcaatcgagggcttctttttgaagttggagatgctgttgagggactggaactgactgaagccaccccagggtacaggtggcagattgtccctaatgccagttctccatttgggttttggtcacaggaaggacaacctttcagagcacggctcagtgggttctttgtggctccagagacaaataattacactttctggattcaggcagacagccaagcttccttgcatttcagttggtcagaggaaccaaggacta

SEQ ID NO: 2520 - DNA, 687 bp, Homo sapiens
  SIMILAR (80)..(9): 481254mologous to Rattus norvegicus NF1-C2,accession number AB012233,Smith-Waterman Score=67.
atgcaaaggcataagaatgatacaatggactttggggactcaggggaaagggtgggaggaaaactaatacatgtatatggctggattatcactggaagattggaaacttttgattttgatgctgagtacattgatagagcacggctcagtgggttctttgtggctccagagacaaataattacactttctggattcaggcagatagccaagcttccttgcatttcagttggtcagaggaaccaaggactaaggtgaaagtggcctccatcagcgtcggcactgctgactggtttgactcctgggagcagaatagggatgaagggacctggcagcagaagactcccaagttggagctgttgggtggagccatgtactacctggaagcagagcatcatgggatagccccaagcagggggatgaggattggtgtccagattcacaacacctggctgaatcctgatgtggtcaccacttacctacgggagaagcaccagatccgagtccgagcccagaggcttccagaagtacagattcaaacaaccattgaggagttacttgcagtaaaatgcaaactggaacccctttggtctaacatccttctccggcttggatttgaacgaggtgctgtccgtggcttcattctgattgtctttttcatcatggtcttctttctttctataaaatga

SEQ ID NO: 2521 - DNA, 807 bp, Homo sapiens
  SIMILAR (398)..(694): 381254mologous to Human T-cell lymphotropic virus type 1 X protein,accession number M37301,Smith-Waterman Score=89.
ccgtggcccactgtgctcagtgtgtcctgcagcagccacgggtattcccaaggacactgcagcatcccacctggggcactgcagttatctcaggtccatgcctcactgcagcttgaagcctgatgctgatgagtgtgcagaagagctatttgtgacaatgaagattttcctttgcaaatgcagcaacttaacggtaaaattgtggaaaggaggctgtgtgtgttcaccttggtcggtgctgcagcccaagcacagctggcgcctctagggcgcattcaagtgagggaatagttatacttggcaggcagtcctgaccagccattttgcccaggtacaagtagctcggttctgtgtgggaaatctggacagcacaccctttgcaccaccagttcacttgcttcacagcccaagtgtgccctttctgggagcaacttcactgttattctggctgctctcttcacctggggaaattctcagtgggatactaataggaccaatcgccattactgctctgatcttgaggctgccactgagtcttacgctgcccctcctctactatcctttccagagtcctctcacccttggcccacgcttctgctggcctacatgtctggtggggtgactcgagccctcatcactgaggacactgagcccctggtcaccacactgttctctggccgtagctgctacatttgtacatttacctcaaattgggcaggggagtatcaagagacaccccaatgtagcccctgaatgccaaacaggttatctcccgccctctttaaataacagcagcactgatatcct

SEQ ID NO: 2522 - DNA, 384 bp, Homo sapiens
  SIMILAR (270)..(326): 431254mologous to Homo sapiens Human secreted protein encoded by gene 152 clone HTLAD94,accession number W74880,Smith-Waterman Score=50.
cgatgttgatgtgggctctgtaatgcactttcctaatttcccttttaaggacgaggtactcactcccccagctgtcaaagtgttggctgctgaggactcagccaagtccctcttcaggcatttactgtggctgaagagagccacccatgatgagctgggctcttttaggtgagtctataagatgcaagtggttcattcagtatgaagtacaagcagagccagagatccccaggagctatatgagcaggtggctcagacccccacatcaccactattgtttcctctccctcagcaagtacccatgcctatggctgcagtggaggctccctgatgaacagctgagagaggagaaaaaaggtcaagatggatcacagatgggttcta

SEQ ID NO: 2523 - DNA, 693 bp, Homo sapiens
ctgtgatccatcttgaccttttttctcctctctcagctgttcatcagggagcctccactgcagccataggcatgggtacttgctgagggagaggaaacaatagtggtgatgtgggggtctgagccacctgctcataaagagggacttggctgagtcctcagcagccaacactttgacagctgggggagtgagtacctcgtccttaaaagggaaattaggaaagtgcattacagagcccacatcagcatcgaatctccaacacaagtctatgaagaagctagggatggcattaatactgccatcttgcagatcaagaatctgaagtatcacaaggttaaacaacttcttcagttcatggaaaatcaatccagcctcagaacaacagtgtctgaaccaggactgtccaataggaatacaatgtgagtcacaaatataatgctaaattttctagtaaagtgcctgttcccagggaaagggtccttcagtgctgcttcctgcccttttctcccctctgcaaagccacactgtgctccggggacacttggctgcagtgccctcactcttcacttgcagagaagcatctgtctctggcagatcttggctgtccagctccccccactgcaggctgaaatgattcattcctcaagaaggtgcccagcttgtgccttgggacctgtcaggatgaaggattcc

SEQ ID NO: 2524 - DNA, 1185 bp, Homo sapiens
  SIMILAR (643)..(693): 441254mologous to Carassius auratus=goldfish, liver, Peptide, 60 aa metallothionein, MT,accession number S75039,Smith-Waterman Score=43.
atgaatcatttcagcctgcagtggggggagctggacagccaagatctgccagagacagatgcttctctgcaagtgaagagtgagggcactgcagccaagtgtccccggagcacagtgtggctttgcagaggggagaaaagggcaggaagcagcactgaaggaccctttccctgggaacaggcacttccacccatctgctccccgaggtctctgaacatccctcaggggctcagtggactgtcctggttcagacactgttgttctgaggctggattgattttccatgaactgaagaagttgtttaaccttgtgatacttcagattcttgatctgcaagatggcagtattaatgccatccctagcttcttcatagacttgtgttggagattcgatgctgatgtgggctctgtaatgcactttcctaatttcccttttaaggacgaggtactcactcccccagctgtcaaagtgttggctgctgaggactcagccaagtccctcttcaggcatttactgtggctgaagagagccacccatgatgagctgggctcttttagcaagtacccatgcctatggctgcagtggaggctccctgatgaacagctgagagaggagaaaaaaggtcaagatggatcacagatgggttggctttgtaaatgtacaaatgtagcagctacggccagagaacagtgtggtgaccaggggctcagtgtcctcagtgatgagggctcgagtcaccccaccagacatgtaggccagcagaagcgtgggccaaggaaagcagcagagctgagatttggacccagacttcagtctgccacgttgtctgggtatatccccttcaccatctctgaatctgtaacatcactgattaggggcaaggtgcaacagtggctgcctggcgaatggacgtcctcaatgcttgtgtccttgggaatacccgtggctgctgcaggacacactgaacacagtgggccacggttgggtctgagctgccagctgcaggtcagctctctgacttacgctatagagcctagtgatgcttacactatagaactctctggcactatgggcacttgcacatcccttaccttatttgatcctcctaagagccttgtaagggaaaacagcaggtatgatcgtgtccattgtattcatgaacagactgagatgcagacaggataa

SEQ ID NO: 2525 - DNA, 429 bp, Homo sapiens
  SIMILAR (411)..(94): 351254mologous to Homo sapiens 7-60,accession number AF109134,Smith-Waterman Score=100.
ctgctcctagaggcccagcttctgtggcctcgttacctgcaggtattgggagatccacagctaagacgccaggacccactggaagcctagaaatggtgagagtgccgggtccgacatcccgagagagggggcggggctggttggaactggtgggaagtggctgtggcgggactctggcctccccgcagctggctccaaaatccgcggccccgagttctccttggcgcagctcggccctcagtccccttcagtcataggatggcggccgggctgacagctcggaccccgggcattctgtctcctccctgcgcagagactgtgccttggtctggagtcctctgtgggcagctctgcccccactgccgcagctctccccgattgtgcagggaccactggacggtcgtcaggggagaatactgactcaggatg

SEQ ID NO: 2526 - DNA, 375 bp, Homo sapiens
  SIMILAR (200)..(352): 381254mologous to Homo sapiens type III collagen alpha 1(III) chain {alternatively spliced},accession number S79877,Smith- Waterman Score=64.
ggtggtccctgctcaatctgggagagacgcggtgctgcgaatgcagagctgcccagagagggctccagtccagggcacagtcactgcgcagggaagagacaggacgcccgggccggctgtcagcgcagccgccatcttatggctggaggaactggggccgagctgggcaaaaagaactggagcgcagattgtggagctgactacagggaggcctgagtcccgccacagccgcttcccaccggtttcaaccaacccctttccccctcgggatggcggacctggcactctcaccatttctaggcttccagggggtcccggcgtcttagctgtggatctcccaatacctgcaggccacagggccacagaggctgggcg

SEQ ID NO: 2527 - DNA, 579 bp, Homo sapiens
  SIMILAR (231)..(335): 451254mologous to Rattus norvegicus alpha A- crystallin,accession number M96950,Smith-Waterman Score=67.
tccagtgatacatcacagttttttattgggcagagtccaagctgtagagagagtcatatcacctagttgctgtgtgtgacaatatataataatactccctgagaagtgggctcaagcaggagattcacatcacttaggtgagaggttcagagatatgtcacaatgcccccaggtgagtagcagtcaggaagaaaagttacataaactagggccagagcccagctatatgtcacaattaccgcagtggggagcactcaggtatgacaggagagtcacatcacataggagctgggccaagcaatatgtagcaatctgcgctgcagacaagtatttctttgaagctgggaccaccaacatatcacaatgccttctgagggcagtgagaaggcaaaaagtaacatcaccgtggtgttgcaaccagcaatatgtcacaatcttctttgcaggcagaaccatttttctaggcttcccaaggggtcctggcatcttaactgtggatctcccaatacctacaggtcacagggacacagaagctgggcctctaggagcagaagacacagaacagagaagaaagacctg

SEQ ID NO: 2528 - DNA, 375 bp, Homo sapiens
  SIMILAR (73)..(360): 301254mologous to Streptomyces coelicolor A3(2) putative membrane protein,accession number AL109849,Smith-Waterman Score=91.
atgacactgcccgaacacctcggaggccccatggaccatcatggacctcgggtaactcttaaggtggaggtcccaaacccagatcacacttggtttattgatggtagttcttcaagacccaaccaattttcgccagccaaggcaggcttcccagggggtcctggcatcttagctgtggatctcccaatacctacaggtcacagggacacagaagctgggcctctaggagcagaagacacagaacagagaagaaaagacctggagctacgactgcagccagagacaaaggccgcgccaaatctcgaaagccgtcctgtccactccagctgcgtgcctgattggatggatcccagcccagagtccctgattggataa

SEQ ID NO: 2529 - DNA, 547 bp, Homo sapiens
  SIMILAR (538)..(500): 531254mologous to Homo sapiens Human 5' EST secreted protein SEQ ID NO: 526,accession number Y12213,Smith-Waterman Score=38.
ttttttttttttaaagggtaaaatgtaatctttaaaatgtcacacaactttacatgcatgctaaatttagaataccatctgtatttacgattttctcttattgactgtctccacgcgcacccactctgcagacgccctaaagagtgtctatcggatcaccctcaagttgggtcaaacggctcctcttctcggcttttcgggagcaacccctatctcaacattcaccatcttaagatgagcagactgcaagtttgcctctcccaccaagtatgggagcttgccgaagccggaaggaacagcgtttccgtccatcgagcgccaggtcaccagtcagctccagtcctattttgagttgaagtaaaagctcctccctagatggccagtgcacgtctttaaaaagcgactcctttcccacaaaggaaatacgactggttcgcatctatcaagggttggcgttgggataagagggtgaagtatcagctggccctggacaacgagattctctgaattcccggacccaataacgcgaccaagcaccgtgactccc

SEQ ID NO: 2530 - DNA, 518 bp, Homo sapiens
  SIMILAR (400)..(203): 341254mologous to Homo sapiens Protein polymer adhesive substrate PPAS1-B monomer,accession number W49714,Smith-Waterman Score=76.
tggtccctgctcaatctgggagagacgcggtgctgcgaatgcagagctgcccagagagggctccagtccagggcacagtcactgcgcagggaagagacaggacgcccgggccggctgtcagcgcagccgccatcttatggctggaggaactggggccgagctgggcaaaaagaactggagcgcagattgtggagctgactacagggaggcctgagtcccgccacagccgcttcccaccggtttcaaccaacccctttccccctcgggatggcggacctggcactctcaccatttctaggcttccaggaggacctggcgtcttagctggggatctcccaatacctgcaggtcacagggccacagaggctgggcccctaggagaagaggacacagaccagggaagacgagacctgcagctcgggctagagcgagagacaaagtacccgccaaacccggaagccaccctgtccgctccagcttcgtgtctgattggacggtttccagcccagcgtccctga

SEQ ID NO: 2531 - DNA, 582 bp, Homo sapiens
  SIMILAR (189)..(31): 361254mologous to Schizosaccharomyces pombe putative ribosomal protein small subunit component, mitochondrial,accession number Z98598,Smith-Waterman Score=82.
ggtaaccgtttgcaagttccctccccatttaaaaaagtgggggtctatttcttccacccccttggaatctgagcttggcttctcgagtggcttttgaaatagactgggagtagaagtgagttgtgtcagcttgaatttaggcctcaaggggcgttgcttccattctctcttgcaaccaagttgagccaacatgtgatgaacccaggctaggctgctaaatcatgaaagacgtgaggctcagctgctccccacgtgacatggccgatggtccgccaatactcagaggcagagctgccttggtgtccacagatgcatggaggaaactggaaaagaacatcttccaatggtttctcccaagatattgggatctctgaagacaaggactgtgtcccagaaactcatcgactctctggtgtctctgggtctacgcacatgatgtctccaaggccagtgtggatgaggtggaaatttgctgtgggagaagcattggcaggtgaccctagaagagccaagcctgataccacgcatgcgatgagaggagcaccattaccaccaatggaggcagaactttctgcttcgtaa

SEQ ID NO: 2532 - DNA, 373 bp, Homo sapiens
  SIMILAR (182)..(310): 351254mologous to Human immunodeficiency virus type 1 truncated tat protein,accession number AF076474,Smith-Waterman Score=70.
aatgcagaaggtactagaggcaggatagggcccctgcttcagagagagactagactcccaaagtttgtcaggtaaaagatggatgatcatttttcacaaaacacagatgtgccaagggggagagagcactgtcctggagacatctgaaatcctccccaaggggactactgggagacaagaagtttccccatggagtagaataatggggaaaacagcctgttcacaaacagaatgcttcactggcttttgccataggtgctgtagatgttttgcagtttcaggaccggaaatctccaaagaacccagaaaatgcttcacgagggaggaagtcagcttaaatatttatcagtcccagcggcacaaagtcacaaag

SEQ ID NO: 2533 - DNA, 843 bp, Homo sapiens
  SIMILAR (215)..(496): 421254mologous to Gossypium barbadense proline-rich cell wall protein,accession number U04267,Smith-Waterman Score=166.
cagaaaggacgagaacgagcaatcaaaggtccaagcctatccaaagagctaaatcaccaagtcaaatgtggattttgtaatgatgaactaaaaaaaaaaaaaaaaagtctggtgctcagatcaaaaagcaacaccaatgacaaagtgcgggatgatgaatcacacagggctcagctcaaccttcagaacaaaggcaagcattttggtagcacaaagctcccgctcgccccccttgcccagggcgcacctggccccgacatctacgcctaccctcacaggcctcccagagcccagctgccctctggcaagactcccccatgcaccccctgtggtagctccccctacagcagctccccctgtagcagctcccccctgcaccccctgcagcagctccccacatgctccccctgcagcagctccccctacagcagctccctcctgcagcagctccctcctgcagcagctccctcctgcagcagctccctgctgcaccccctgcatcccccgtggaagcaacttccacttcctacgccccaagtcacaaagaggcaggttcctcaagttttgggggataagttcaagtccagggagtctccgcaagcccataccctctacatgtccacattagagtccctgacacaatcaaagcctgtgaagctgcacccacgcttcccactcgatcggaaagtcaggcctgctcatctgcggaacttctggctcatttatgaaaactataagctccacaagagtaagaacaatcggtgtctgtttgttactgatagtatactaggggccaaacagtgcctggccatcaaaggacactgcaaagtatctgatgaatga

SEQ ID NO: 2534 - DNA, 468 bp, Homo sapiens
  SIMILAR (416)..(294): 511254mologous to Methylobacillus glycogenes Homoserine kinase,accession number D14072,Smith-Waterman Score=92.
atatctgcccacaagatacttgctttgaagggctctttctcagccctggggatatgggcacagggataattggctgactcgagggctttcccaccagggttggcctgcagactatttctcagtcctggcatgtgagcgcagagctgttcagatagccaaggagcatgtctgtcaggggcagcacacaggtctgttatcgcaggctcctaattgtggatacaaagctgttgggcgggactggggcttgtctgtagtgggtggggcactgtgcggctgtttctcaggacctgggtgtgggcacatagctgctccttcaacccagaagcatgttggctgcttggagatatgagggcttctcccgcttggggaagggcattcaccagtttggctggctcgagggtgagttcaccctgggcaggactgttcctctggttctaagtgaggacagtaggagttgccttccttgct

SEQ ID NO: 2535 - DNA, 732 bp, Homo sapiens
  SIMILAR (660)..(731): 661254mologous to Homo sapiens putative p150,accession number U93568,Smith-Waterman Score=81.
atgctgcccgattgcctccgaagccccgtagaccatcacggacgccgagctttgggtaactctcacagtggaagaaaagtagaacggactaaaggtcttttaaaaacacacctcaccaagctcagccaccaacttaaaaaggactggacaatacttttaccacttttgcttctcagaattcaggcctgtcctcagaatgctacaaggttggggaagttctcctggataatatcctgcagagtgttttccaaatgcttcaaagagaatagaatacctaggaatccaacttacaagggatgtgaaggacctcttcaaggagaactacaaacaactgctcaacgaaataaaagaggacacaaacaaatggaagaactttccatgctcgtggataggaagaatcaatatcgtgaaaatggccatactgcccaagaattggaaaaaaactactttaaagttcatatggaaccaaaagagagcccgcattgccaagtcaatcctaagcaaaagaacaaaggtggaagcatcacactacccgacttcaaactatactacaaggctacagtaaccaaaacagcatgttactggtaccaaaacagagatacagaccaatggaacagaacaaagccctcagaaatcataccacacatctacaacaatctgacaaacctgacaaaaacaagaaacggggaaaggattccctatttaataaatagtggggtggaaagtggctag

SEQ ID NO: 2536 - DNA, 479 bp, Homo sapiens
  SIMILAR (442)..(233): 421254mologous to Mus dunni endogenous virus pol polyprotein,accession number AF053745,Smith-Waterman Score=100.
tttacatgaacactgtgatgcatccaaaaatgtagcaactagaagctatttgccaactattcttgcatcagattctcttgaaggagatatctgcgtggtacacttccatggccaccacagtccatctcgaatgcctcacagaactccagagacctgtgttataatgttcccactaaggcttataaataccatactgcatacttacccaccactgacatttccaacactgtagggtgtctggaatgagactggggcctaataaaaaggagcatccatacaggaacttaaatgggctgtaccttgtagcatcccgaggacaggcccgaattcgcagaagggcaagtggtaaaagtattgtccagtcctttttaagttggtggctgagcttggtgaggtgtgtttttaaaagaccattagtccattctggcccttgaaaagaaggtaatgtggagtgggtagcctctgtattgattaagaag

SEQ ID NO: 2537 - DNA, 468 bp, Homo sapiens
  SIMILAR (289)..(387): 661254mologous to Homo sapiens Human nm214_3 secreted protein,accession number Y28680,Smith-Waterman Score=116.
agaacggactactggtcttttaaaaacacacctcaccaagctcagccaccaacttaaaaaggactggataatacttttaccacttgcccttctcagaattcgggcctgtcctcagaatgcttacaaggtacagcccatttaagctcctgtatagatgctcctttttattaggccccagtctcattccagacacttggaccaacttagactgtgcccccaaaaaaacttgtcatccctactattttctgtctagtcatattcctattctccattctcaactactcacacatgccctgctcttgttcacactgccagtttacactgtttctccaagccatcacagctgatatctcctcgtgctatccccaaactgccactcttaactcttgaagtaaataaataatctttgctgggaggacctaggacatctgattagagagtgcctaaggagattcagcatagtcctgc

SEQ ID NO: 2538 - DNA, 697 bp, Homo sapiens
  SIMILAR (204)..(374): 601254mologous to Human endogenous retrovirus tripartite fusion transcript PLA2L,accession number Z14310,Smith-Waterman Score=153.
atggccccaactaactgcaagggctctaggaaatgtggcagaccacatgaacagatgccccacccttatctccctttgctgactctcttttcggactcagcccgcctgcacccaggtgaaataaacagccgtgttcctcacacaaagcctgtttggtggtctcttcacacggacgcgtatgaaatttggtaccatgactcggattggggggacctcccttgggagatcaatcccctgtcctcctgctctttgctccatgagaaagatccacatacgacctcgagaaagatccacatacgacctcaggtcctcagaccaaccagcccaagaaacatctcaccaatttcaaatccagaaaagtagaacggactaaagggtcttttaaaaacacacctcaccaagctcagccaccagcttaaaaaggactggacaatacttttaccactttcccttctcagaaatcaggcctgtcctcagaatgctacaaggtacatcccatttaagctcctgtatagacgctcctttttattaggccccagtctcattccagacaccagagaacaaaccccctttgactgtaattttccattaccttccctaatcctataaaacggccccaccccatctccctttgctgactctcttttcggactcagcccgcctgcacccaggtgaaataaacagccttgttgctcac

SEQ ID NO: 2539 - DNA, 386 bp, Homo sapiens
  SIMILAR (158)..(96): 401254mologous to Homo sapiens Human secreted protein, SEQ ID NO: 4647,accession number G00566,Smith-Waterman Score=38.
atggtggaaggtgaagaaggagcaaagtcacgtcttatatggcagcaggcaaagagagcttgtgcaggggagctcccatttttaaaaccatcaaatctcatgagacttattcactgccacaagaacagtatgggggaaaccacccccatgattaaattatctccccctggcctcaaccttaacgtggggattattacaattcaaggtgcactaagatagggaagctaaaagcagacttggggggatatgcctgcagctacagaaagatgtatgggaacagacacacaactctccctcccagataagcacaacaaagagacacagaagcagtccaagcctctgataaactctcccacccagaatccttaaaaactctcagtctgtaa

SEQ ID NO: 2540 - DNA, 424 bp, Homo sapiens
  SIMILAR (178)..(375): 311254mologous to Bos taurus T-cell receptor beta chain, variable region, diversity region and joining region,accession number D90133,Smith-Waterman Score=67.
aagcttcagaaaattgacgagcagttgctagcaatacagaacattgctgaaaacatagaacaggatttccccaagcctgaaatgctagatctacattgtgataagattggaccagtggatcacattgaattctcttctggccctgaattcaaaaaaacattagcttcaaaaaccattagcatttctgaagaagtgcgttttttgacccatatggatgaagaagatcaaagtgacaaaaaggagacttcagaacctgaattttcaataacagaaaattattctggtcagaaaacctgtgtgtttcctactgccgattcagctgtcagcctttccagttccagtgatcagaatactacttctcctgtgtttcagtacatccgctccagatgactggattgactgatattgcagacattattgatga

SEQ ID NO: 2541 - DNA, 1965 bp, Homo sapiens
  SIMILAR (1092)..(1130): 531254mologous to Homo sapiens Human secreted protein, SEQ ID NO: 6876,accession number G02795,Smith-Waterman Score=40.
ctggcagcttgcccctggcacccaagctctgccagcctcacccaacctagagccatcctccagtgcctaagccttccagaaaaattggacgagcagttgcctagccaatacagaaacattgcctgaaaacatagaaacaggatttcccccaagccctgaaatgcctagatcctacattgtgataagattgggacccagtggatcacattgaattctcttctggccctgaattcaaaaaaacattagcttcaaaaaccattagcatttctgaagaagtgcgttttttgacccatatggatgaagaagatcaaagtgacaaaaaggagacttcagaacctgaattttcaataacagaaaattattctggtcagacaacctgtcgcgtttcctactgccgattcagctgtcagcctttccagttccagtgatcagaatactacttctcctggtatgaatagcagtgatgaattgtgtgagagtgtttcagtacatccgctccagatgactggattgactgatattgcagacattattgatgaccttataattaaaagacggaggtttccagtgaagaacttggcttaacagaacaagctatgggcacctccagaattcagcattattctggcagacattcacaaagaactgacaaggaaagaagagagattcaagcctggatgaaaagaaaacgaaaagaaagaatggcaaagtacttaaatgagctggcagaaaagagagggcaagaacatgatcctttctgtcccagaagcaatccactttacatgacttcaagggaaataaggctgagacaaaagatgaagcatgaaaaagacagattgctgctctctgaacactatagtcgtcgaatctcacaagcgtacggtctgatgaatgaactgttatctgagtcagtacagctaccaactctaccacagaaaccattgcctaacaaacccagccctactcagtcttccagttgtcaacactgcccttctccaagaggagagaatcaacatggtcacagttttctaataaatcgacctggaaaagtcaaatatatgtccaaaccgagttatatccataagaggaagtcttttgggcaacctcaaggctcaccttggccacatggaactgccactttcaccatacagaaaaaagctggtggagccaaagcagcagtaagaaaggctacgcagtctccagttaccttccaaaaaggctctaatgctccgtgtcatagtctgcagcatacaaaaaaacatggaagtgctgggcttgcacctcaaaccaagcaggtgtgtgtagagtatgaaagagaggagactgtggtgagtccctggacgataccttcagaaatccataagattcttcatgagagtcacaattcccttctacaagacttgtctccaactgaagaggaagagccagagcatccttttggggtgggcggtgtggacagcgtgtctgagagcactggcagcatcctcagcaagctggactggaatgccatcgaagacatggtggccagcgtggaggaccagggcctgtctgtccactgggccctggacctgtaagacctggatatcattgggtttccatgcacaggccagcacctcagtaatgtggttctgaaagattaacaggtttaagggacagaagcaatgaaagaagcaatgggaattttccatttgctttcatattattacctggattagccattaccagaggaaaaataaacatttctcagtaactttgcctttatggggaaagggttgactattgatgtattatatgtttttgtatttgatgcatcattaggcataatttttaaaatgataagtaccttttcaagccaagtttgcataacctactttcaataaaaaccctctatcttgcctcctcctttattaccctctgagttttgagaaacaaccatatacagatgaatctaataggaaaaaaaaa

SEQ ID NO: 2542 - DNA, 524 bp, Homo sapiens
  SIMILAR (483)..(352): 311254mologous to Mycobacterium tuberculosis SEQ ID NO 37C,accession number AX005507,Smith-Waterman Score=68.
gaaaacagaggaagttaacttaggaggggtaagggaagaagaatgcaagattgacgttgcagaagccagaggccagggctaagaacagggtaagggacttttgagaaaggagtagcagagcattcacattagataagttctgaaaggtgtccactgagcctgggtttgttatctagaaggtgacctactgtaaactttgccagagcattttcagtggtgaagaagtgagacctttggctcccagtgaagggagcaagcccagttaggtttctttaacaagcttggccaggaagatggagcagttgctagagacgatggaaggtcaagggagacctttgcttcctccacaactgtggcaggctctggggcaccttcataagctgcacaaagagagcctgatgagagaggaatattctcccaactgggagttggatttagacaagtcactatgggcctcagagtcttctgtggacctgagagtctgggagtataatccttctaaccttgcaaggctagatgtctga

SEQ ID NO: 2543 - DNA, 370 bp, Homo sapiens
  SIMILAR (77)..(145): 431254mologous to Mus musculus CIP7,accession number AF038507,Smith-Waterman Score=60.
atggttttcccctggagttgggcgctcagtggctcaggctctcctccagccgccgtggccaaactctgcatagttctgcccgttgaaggcctgccgacctgcctgtgtctgctgcctgtgtctgttggtgtgcccttccgccggtcctttgaaggctattacttctatggctttcagtttggagaccagtccctacttcggcgttttgagagcaaaagaatcacgtgcagaaaatttgatactgttcaagcatctgagagtcttaaaagtggaattatcaccagtgatgttggagacttaactttaagcaagaggggactacgaacatcatttacatttaggaaagtgaggcaaacaccttgtaactgta

SEQ ID NO: 2544 - DNA, 1073 bp, Homo sapiens
  SIMILAR (651)..(439): 301254mologous to Homo sapiens putative nuclear protein,accession number AJ245877,Smith-Waterman Score=72.
tgagcaaccctcctccttccacctggagacaggtcccttatgcacaacaagctgcagctcttcaagggtctctgagcaagatcagctctgcccctgttaccacagagctcttccacagagaggatttccatggcataccgagacttgctgacagaggaggatctcagcttgtgaagcctgtgcttgtcttcagcccgtctccactcatcatccccttaactctgagtccaggtacctgtgatccagcatcacacctccgccagcccccaaccacaatcctcacaaagcactgcccagatatgcaactcagtggcaagtccccaactgaaaaggacccccaaaccatcaacagttcctctactgaggtcagttttgctgtccagactcccgtcattcttgtcgcttccaaccctgatgaagtcggtggcctaatgaagccaggggtccctccctatgaagataaatgcacacaactgtcccaggagctggaacagctggaggaggattccagagaaggcggaatgcttgcaggccccgctgactcacaccaacaggtgaggggaagggggaagacacgggtccctccttatgaagctaaaagcacacacatgacccaggagctggagcagctggaggaggtcccggggaaggcagaatgcttgccaacagccttcatgcccaaggcccactcttacatgacagaagagaacagtagaccaaggaacgtacaacggcaaatgctcagctctcatgagtggcatggattggtgcacaactgcagagtgaacgcttcaccggatgacctttctgatattgccggtcgacatggttattgttcagtggaggaagatctctccgagaagcctgtttatccaccaaagcgcagcgtgtttagaaaggtaggcggcaacttcatcttcagctttgtagaggaaggagagacccataaagcaggaaaatgtacccagcaggctccagcagacttgctcttgctcaaccccggcctgcatagactcatgggcccatttctgaaccagtcactggaaggagctggtgttcccaccactggctga

SEQ ID NO: 2545 - DNA, 438 bp, Homo sapiens
  SIMILAR (184)..(71): 351254mologous to Macaca nemestrina immunoglobulin alpha heavy chain,accession number AB013765,Smith-Waterman Score=60.
atggaatggatcttccatgaccacctggtcctgattctgtacaagtcaaaggccaaccctgcaaccttcctgatgcagaatctggttcacgcatggtgtgagcataatgaggtgggctgccgaaccatagttgcagtgcctcagtaccgagccccattttcggtggacagcactttgggtggggtgtgtgtgaactggagtgacaccttcctcctgaacggccaactgaaggagtacgtgttaaccgacggagggcgacgcgtgtccagcggcttggacaccaccctctacataccgagaacggcggacaaaagtgagttcatctgctccaaggctttggttccaaaagccaaactccagtggtcacctcctagtcaagtgctcagttttgaagtgtatacccctccgcccagattcctcacagacatctccctctga

SEQ ID NO: 2546 - DNA, 594 bp, Homo sapiens
  SIMILAR (124)..(201): 281254mologous to Homo sapiens apoptosis related protein APR- 4,accession number AF144054,Smith-Waterman Score=41.
atgaaaaaccactacacacctaccagaatgactaaaaataaaaacactgaaacacaaaatgttggccaggatttgcaacaacctgaactttcatgcactgttgggagaattggctcacacaattacaaagcaaagtcccatgataggctatcggcaagctggggaagagagaagctggtagtggttcagtccaagtccgaaagcctcaaactggagaggctgacggtgcagtcttcagtctgtgggcaaaggactgaaagaccctggaaaaccaatggtgcgagttccagagtccaaaagccaaagaacctggagtttgatgtccaagggcaggaggagcagaagaaggcatccagcacgggagaaagaaggcagccagaagactcagcaagccagcttatcccaccttcttctgcctgctttgttctagccacactggcagccgattggatggtgtccacccacattgagggtggatcttcctctcccagtccactgactcaaatgtcaatctcctctagcaacacgctcacagacacatccagaaacaatgcttaccagctatcttggcatccttcaatccaatcaacttga

SEQ ID NO: 2547 - DNA, 373 bp, Homo sapiens
  SIMILAR (16)..(96): 481254mologous to Homo sapiens Fragment of human secreted protein encoded by gene 27,accession number Y36498,Smith-Waterman Score=64.
tttcctcagggtctaatggtctatacctgctctgtgctccccatttgctgtttgcaaggagaaccaggctgcctgagagaatgtggggtgctctgctcttgagaatgaatagcttctttgctggggcacaatcttcaggtttgatctgacagttgtgattaaaaaagcgaggaagagaaggaaagaacccgtcactctcttgctttacagtctgtaaaacattaagttaggcatcgcgagtacataaaggttttgctttttgcccttaaggaaatatcaatccttttgaggagacaagacaaattcaataagaagctataagtgagcaagagtgtatataattaagtggcttaatgcagtggtaataaactgc

SEQ ID NO: 2548 - DNA, 441 bp, Homo sapiens
  SIMILAR (269)..(201): 521254mologous to Homo sapiens Fragment of human secreted protein encoded by gene 27,accession number Y36498,Smith-Waterman Score=63.
atgcttcctgctggaagtaggggcactactgggatctggggagcggaggccagcattgcgctgctaaacatcctactgtgcataggacaatcctcctttcttcccttccccactacaagctatctggtccaaaatgtcgatagttccaggatcaaacctgaagattgtggccccagcaaagaagctattcattctcaagagcagagcaccccacattctctcaggcagcctggttctccttgcaaacagcaaatggggagcacagagcaggggaatcggttcttccctctgtgctcagccttggtgaaactgccagtcaagctgccctgccttctcctcgtcaaggcccaactgggcctctctcccaggactttgtatctggaggctttaaatggaaccaagggtttgggagatgagggtgatcagagtttcttccagtga

SEQ ID NO: 2549 - DNA, 483 bp, Homo sapiens
  SIMILAR (348)..(181): 371254mologous to Mus musculus odorant receptor,accession number U28773,Smith-Waterman Score=78.
atgagtggctggtcagatggatatataccagaagctaacattctgctgaattttatacgagaaaataaagaaacgaatgttctggatgatgaaattgacagttatttcaaagaatccataaatttaagtacaatagttgatgtctacacagttgaacaattaaagggaaaagctttgaagaatgaaggaaaagctgatccttcctatggcatcctttatgcctacatttccacactcaacattgatgatgaaactacaaaagtagttcgaaatagatgttccagctgtggttatattgtaaatgaagcatctaacatgtgcacaacttgcaacaaaaactccttggactttaaatctgtctttctcagtttccatgtgctgattgatctgactgatcacacaggcacccttcattcctgtagtctcacaggaagtgttgctgaggagactttgggctgcacggtacatgagtttcttgcaatg

SEQ ID NO: 2550 - DNA, 1335 bp, Homo sapiens
  SIMILAR (43)..(531): 991254mologous to Escherichia coli o588,accession number L10328,Smith-Waterman Score=855.
aaaaaagatcctaaatttgcagagactttgatagccaaagtaatcctcgataaactggatgcatttcgccacctgacgctggacggtcactgcccgggtttgggtggtaaagaacttaacgcctatattactgcgggtattgaaaactgccacgaaagttatcagctggaagaaggacgccggaaattacaactcggcatgtcgttgatgatccgcgaagggtccgctgcccgcaatctcaacgcgctggcaccgttgatcaacgaatttaacagcccgcaatgcatgctctgtaccgatgaccgtaacccgtgggagatcgcccatgaaggacacatcgatgccttaattcgccgcctgatcgaacaacacaatgtgccgctgcatgtggcatatcgcgtcgccagctggtcgacggcgcgccactttggtctgaatcacctcggcttactggcacccggcaagcaagccgatatcgttctgttgagcgatgcgcgtaaggtcacggtgcagcaagtactggtgaaagggttcttactgctcctgtgggaaatcagaaagagcagccagcagacaacaccaactgagatgaatgcagctgaaatggcacagctggttgcgggtgtggatgaagtcggacgcgggccgttagttggcgcggtcgtcaccgctgcggtgatccttgacccggcgcgcccgattgccgggctgaatgattccaaaaagctgagcgaaaaacgccgtctggcgctctatgaagagatcaaagagaaagcgttgagctggagtctgggccgcgcggaaccccacgaaatcgacgagctgaacattcttcatgcgaccatgctggcgatgcagcgtgccgtcgctgggctgcatattgcgccggaatatgtgttgattgatggtaaccgctgcccgaaattaccgatgcctgcgatggctgtggtgaaaggcgatagccgcgtaccggaaatcagtgccgcgtctatcctggcgaaagtgacgcgtgacgccgaaggagtattgttggtgtttttcttcttccagttaaaggagaaattagcattcttgaaaagggaatacagcaagacactagcccgccttcagcgtgcccaaagagctgaaaagattaagcattctattaagaaaacagtagaagaacatgattgcttgtctcagcaggatctctcaccgcagctaaaacactcaggacaccacgagctacccccagtcctgcacaccaccatgctgagggtccatcccaccctggggagtggaactgcagagacaagacctccagagaatacccaggccccagccttcttcttggag

SEQ ID NO: 2551 - DNA, 519 bp, Homo sapiens
  SIMILAR (410)..(291): 801254mologous to Homo sapiens Human secreted protein encoded by gene 45 clone HTXFH55,accession number Y41352,Smith-Waterman Score=149.
atgcctggcctaaggtaccacctgaagcaggaagttgcaaccaaccctcttgtcaccgtccctggctattacatgggagcatctggaggcagccatcagtgggctgaacaccgtgatgctcaggttggccactggtcaggttgggtttggcagaggttggccatcgtagcggaattcacttatcaggccagggtccagggacaagtaacaggacattatgacagatgcttcgtgggagctggaaatattaaaagcaacagccctctgctgacattcgtctccagaacctggttcttactgctcctgtgggaaatcagaaagagcagccagcagacaacaccaactgagatgaatgcagctgaaatggcacagggtccaagtcagagtgcacaaggaaagcaggtggggctggcccaccagcaaaagcttcaggagagcaagggattggctgactgggctgcaagggtagtgttcaaagccagctgccttggaggccaagatagtggaggagctgcataa

SEQ ID NO: 2552 - DNA, 972 bp, Homo sapiens
  SIMILAR (614)..(444): 1001254mologous to Homo sapiens Human secreted protein encoded by gene 45 clone HTXFH55,accession number Y41352,Smith- Waterman Score=300.
  misc_feature (1)...(972): n = a,t,c or g
ttgggccttgtttgtctggcaagtcttaaatcccagactcatttgttcacttgcttgcttcctccttccctccctaccaaaacacagtatgatctgtcggttaaactcaatagactaaaaactccgggttcaaatgctagctcctccatcnnnnnnnnnnnnnnnnnnnnnnnnnnnnnnnnnnnnnnnnnnnnnnnnnnnnnnnnnnnnnnnnnnnnataaagtgcccattatagtgcccatttcctaggattctatccaggagatgatgtgcctatttcctaaggttcttataatgagattctgcaaggacagcactccaaatagtacaggcacatggttttgacagttgtttctgttattattgaaataaaaagaacctatacctgttcccaggaagctcagagtctctcacaggcccttttcagttcctggggctctcatatttcctcattctcccagactcctctgaccctactcttcctcaggttcttactgctcctgtgggaaatcagaaagagcagccagcagacaacaccaactgagatgaatgcagctgaaatggcacaggtcagtatggccaagaaacaccatgggctaatgttcagacccatggtatgaaagccagagtgggtgtgaatttcactcccatgtctcttatcttggatggttttcatctgcatgacccatttgcccaatgcccaatggatgtgaagatacagaaaagtccaggtactgttttcagggaagtaagatgtcctgtgccaactcttctcacttcagggtccaagtcagagtgcacaaggaaagcaggtggggctggcccaccagcaaaagcttcaggagagcaagggattggctgactgggctgcaagggtagtgttcaaagccagctgccttggaggccaagatagtggaggagctgcataaaacatggattttgcagccaagtaagagctggccttgattcca

SEQ ID NO: 2553 - DNA, 453 bp, Homo sapiens
aaaccttccacctggggctggcagagaacttgcatgcagctatctctggtgactgatcattaagccctgtggccttgaaagcagcagcgtgtggctaagcctgcagttggtgagagaaacaccttgagggacatctgtgtggcccatcacaagagcagtgtttgacagatggcattgcaccaaccattgctccctaacaggaagtgcatcagtaaccatgggagccaccagagaccaaaggccacacccagaaactggaaggatttccgccaaattcacttccatggagccaaatgataacaccactgatgaccagcagactgccatgtccacggggaaaagaattggcccaggaagtagggagacattcttcaccacagatgcccataatcttccaccatgattataagcttcctgaggtctctccagaagctgaggagatgccagcaccat

SEQ ID NO: 2554 - DNA, 345 bp, Homo sapiens
  SIMILAR (228)..(308): 481254mologous to Arabidopsis thaliana Putative 50S ribosomal protein L20,accession number AC026237,Smith-Waterman Score=62.
  misc_feature (1)...(345): n = a,t,c or g
aattttttaactgtggtaaatacatatagcatacaatttaccatcttaaccannnnnnnnnnnnnnnnnnnnnnnnnnnnnnnnnnnnnnnnnnnnnnnnnnnnnnnnnnnnnnnnnnnnnnnnnnnnnnnnnnnnnnnnnnnnnnnnnnnnnnnnnnnnnnnnnnnnnnnnnnnnnnnnnnnnnnnnnnnnnnnnngctgactggtgtctttataagaggaaaatgtcacatgaagacagaaacacacacggaaggtggccacgtggaagatggagggagagactgaattatggtgccacaagcaaaggaacacttggggctaccagaagctctaagagacgag

SEQ ID NO: 2555 - DNA, 770 bp, Homo sapiens
  SIMILAR (235)..(291): 631254mologous to Homo sapiens Human secreted protein, SEQ ID NO: 7395,accession number G03314,Smith-Waterman Score=66.
cagattaagtaactttattagcatcagttcagctaataaatgctgaaggcaggatttgaacctgcatctactatattccaaggattttttctccaattttttaactgtggtaaatacatatagcatacaatttaccatcttaaccattttattatactttaagttttagggtacatgtgcacaatgtgcaggttagttacatacgcatacatgtgccatgttggtgtgctgtacccagtaactccgttatttaacattaggtatatctccaaatgctatccctcccccctccgctgactggtgtctttataagaggaaaatgtcacatgaagacagaaacacacacggaaggtggccacgtggaagatggagggagagactgaattatggtgccacaagcaaaggaacacttggggctaccagaagctctaagagacgaggaatactaccgcatcggcatgtgtgataaaaatgagagaaaatggtaaaatatttgtcactttaaaagcactacagggatcatctcaatcagttttttgttttgtttttttaagtgacagacacaacttctttgctctttgcccctggtgtatggattggaatttaaactctaagtattaagattaggtctccacaactgattttttactatcatttttcctattggaggttcagggaaaagggaaacaaatgaaaagagaggcaatctctaagtggagatacacttttggaatgtgaagtagtagtttctagtttgtataaagcgctct

SEQ ID NO: 2556 - DNA, 984 bp, Homo sapiens
  SIMILAR (672)..(953): 1001254mologous to Homo sapiens Protein sequence encoded by clone p199-7 (PL mutet.rsT4),accession number P93369,Smith-Waterman Score=542.
atgaaaattcccccaaatgagtccttctccgagggggtggaggtcacacagttggcacaattggtatcacaaccaactcgaggagacccagaggaagatgctgcgccaagagaagcaaagcgaaggagcgcgacccaggaggctagcgaaatccccgccaagcccccaggaggcggagagaagcccagtcgccaggcaccggccacggcgcacgccaacatccaggataattctcctttccaagcccgggagttccggggcaggcgaaaaaggggggatgggagacccacagtccctttaaccctcccccctgggcctgccaaccttttccgaaccccatgtcacacaacttcctcatcatggaaacttccactggctccccagggaggccaggttctcagaattatacctgtggatattgttgagcaacttgcccacattcactctcaactactaaaacatcactatgactatggtcaccttccacaaccagtgctggaacagggaagttttttaatgagagagaacaggttttgtaagagtgacaatggagagatgaatggaagtagtggttcaagagcagagtttcaaacccagacgtcttcacttaccaggtgcaataaagagcctagaaaggttgttggaaatcaggcaccgtgtatgaaatctaacaatgcgctcatcgtcatcctcggcaccgtcaccctggatgctgtaggcataggcttggttatgccggtactgccgggcctcttgcgggatatcgtccattccgacagcatcgccagtcactatggcgtgctgctagcgctatatgcgttgatgcaatttctatgcgcacccgttctcggagcactgtccgaccgctttggccgccgcccagtcctgctcgcttcgctacttggagccactatcgactacgcgatcatggcgaccacacccgtcctgtggatctacccactagtcaattcaccatcttgttga

SEQ ID NO: 2557 - DNA, 1119 bp, Homo sapiens
  SIMILAR (589)..(897): 851254mologous to Homo sapiens putative p150,accession number U93572,Smith-Waterman Score=459.
atgaaaattcccccaaatgagtccttctccgagggggtggaggtcacacagttggcacaattggtatcacaaccaactcgaggagacccagaggaagatgctgcgccaagagaagcaaagcgaaggagcgcgacccaggaggctagcgaaatccccgccaagcccccaggaggcggagagaagcccagtcgccaggcaccggccacggcgcacgccaacatccaggataattctcctttccaagcccgggagttccggggcaggcgaaaaaggggggatgggagacccacagtccctttaaccctcccccctggcctgccaaccttttccgaacccccatgtcacacaacttcctcatcatggaaacttccactgggttcggcgctgaggatgccaaactccatttcacaaggaacatgtcaacagctgggcttggggtttgaggaacagagccgctgcgattggaacagagcccggccaccctgttccaccactgtccactccgtagctcccagcctgccgccgcgcggtgcccgaacacgagagggcacctcctcccagatccggggcgcagaagccccgcggaggcagcctggcagggacacaagaaaaaaagagaattttggaccaatatccctgatgaacatcgatgtgaaaatcctcaataaaatactggtaaaccgaatccagcagcacatcaaaaagcttatccaccaagatcaagtcggcttcatccctggggtgcaaggctggtacaacatacacaaatcaataaatgtaatccatcagataaacagaaccaaagacgaaaaccacatgattatctcaatagctgcagaaaaggctttcgacaaaattcaacagcccatcatgctaaaaactctcagtaaactagggaagttcctgggctttgctccaaagctgccccggaatgttttggttggtttggagaaaagctgtggcgtctacaccacttgttccaagcaggcggccccctggtggctaacgggggaaattgccacagcaaccccaaccttcagcaaccatcaccctgatcagttagcagccagcaacatcaagacaagacgcttcacctgcaaaaagattatgactcactaa

SEQ ID NO: 2558 - DNA, 771 bp, Homo sapiens
  SIMILAR (464)..(586): 331254mologous to Herpesvirus papio NTR,accession number AF200364,Smith-Waterman Score=55.
atgaaaattcccccaaatgagtccttctccgagggggtggaggtcacacagttggcacaattggtatcacaaccaactcgaggagacccagaggaagatgctgcgccaagagaagcaaagcgaaggagcgcgacccaggaggctagcgaaatccccgccaagcccccaggaggcggagagaagcccagtcgccaggcaccggccacggcgcacgccaacatccaggataattctcctttccaagcccgggagttccggggcaggcgaaaaaggggggatgggagacccacagtccctttaaccctcccccctggcctgccaaccttttccgaacccccatgtcacacaacttcctcatcatggaaacttccactgggttcggcgctgaggatgccaaactccatttcacaaggaacatgtcaacagctgggcttggggtttgaggaacagagccgctgcgattggaacagagcccggccaccctgttccaccactgtccactccgtagctcccagcctgccgccgcgcggtgcccgaacacgagagggcacctcctcccagatccggggcgcagaagccccgcggaggcagcatttgggacaccaagatgatgtggctcaggctgctggctgtgcactgaggctccgttcccttctcttccttgtcatacagttaggttgtataccccaggctttctcacggggagatgcaaaagattacgtcaaagggatagtggagccacagataagaaaagccagggtcctagagtaa

SEQ ID NO: 2559 - DNA, 681 bp, Homo sapiens
  SIMILAR (202)..(342): 311254mologous to Nereis virens Lox4 homeobox protein,accession number AF151670,Smith-Waterman Score=63.
ggaaaaacagatgttcctgctgtgatcagggatcttccttatcatctaaatgtactgccacagcatcaggtgtcaaaaagccactccggctgggaaatgcatattaatttgctgctccctggtagcggtatcctggctatggagaaaatctctttcagggtaaggaaatatgtgctcgggggctgcacaccaaccgagggagtgaaaagaaaaatcagatcaatcttgcatgaagcacttggtgaggagtggaggccagacgagctgggcagaaagaatgaagtacaggaagagtcaccgggacaggagccttctaggaagaagaggctgcagaaacgcagggactggctgacacttagggaaaatataaaagaaactacgttgaattatcggggacaggttcccccgatatgtggaggccatgaaggggtagggggaagtggcaactacatagcacagacacaaagacacaaacacaccatatcaccatgtagaggaatgggggagctggacaatgaagtggaatatgtgatggcaatgggcaaatgctacctgagagagaaggccggtagaccaaggctcttgcaagcctctggagagccaggtggctttcccaaggctagtgtgatcagcggtgatacagcagacaccactggatacaggccagcggggacagactga

SEQ ID NO: 2560 - DNA, 409 bp, Homo sapiens
  SIMILAR (1)..(105): 481254mologous to Homo sapiens Human secreted protein sequence encoded by gene 97 SEQ ID NO:364,accession number Y91691,Smith-Waterman Score=68.
  misc_feature (1)...(409): n = a,t,c or g
ctgggctcctatctaaaccctgagtgtgccataccattcttcccagcaacttttactttgttgactttgttggccgaggatttcctaatcacattgttgttttcctggcagttcccaaaccagatctagattcttacgtgtttctgagagtgagagaacgacaagaaaacatactggtagaaccagacacagatgagcagaggtgagtggcgtgcatctttcacagtgggcacattcctcccgatggagggccagccgagctctgcaggcaaatgtgtttccctctttttcagggactacgtgattgacctggagaagggctcaccagcacttgatcccgatacaaaaccattgcacctctgggttgcatctggagctgtccngcnaatttaaaactaggcataacagc

SEQ ID NO: 2561 - DNA, 381 bp, Homo sapiens
  SIMILAR (95)..(3): 351254mologous to Homo sapiens Extended human secreted protein sequence, SEQ ID NO. 413,accession number Y36028,Smith- Waterman Score=71.
atgatgaggaagaaggaggaggaggagaaaaagaaggaaggacagggagctgacaaccaaggagtggctgataaatactccagctttctcccctcggtttccctgtatctcagcagtatggagcttgttaccaatgagaacctgcttactgactttaaactggtttccttaccttctcagttccatttctccatacctcaattgatgatttctggggcgaatgacaactgtgttcaagtcgtcaaaaatggctcctttcaaagccaaactggaattatggggacaaggagtgaacgttgggatttttggcatgtttcaaacattagcagagattttgaaagagacttagccagggccctttttctctcagctgctgcatga

SEQ ID NO: 2562 - DNA, 658 bp, Homo sapiens
  SIMILAR (86)..(121): 501254mologous to Homo sapiens Human secreted protein fragment encoded from gene 58,accession number Y07909,Smith- Waterman Score=40.
gaacttacatacttaaacatcgaattgctttaagtgtttggcattcactgttcccgtgcatgccagcagcttcttactgcaaacacctgagacttgctatagagcagctggactatgttccgcccacacacaggacagggagctgacaaccaaggaggggggcgggatcaatactccagctttcccccctccatttccctgtatctcagcagtatggagcttgttatcaatgagaacctgctcgctgactttaaattgcttttcttaccttctcagttcagtttctccatacctcaattgatgatttctggtatgacctagcaaatacactgctttcactgaaatttcagtcttgcaatctgctttgggttccccaatctaagacagaaacatactcattttcccatcactggacttccaggttgttttcaatttttcactgttacaaacaaggtggcaacatttatctacaaacctctggatatacacgtaggaagcttttggtatttccactagtgaaactgctcagttgaagggtatgtggatcttcatctttaataaatattaccaacatgtgaaaagcccgacaatgtcaaggactggcaagagtgccacatgtgatgggtgtggcacgaggcctcgtccaagctggcgtaag

SEQ ID NO: 2563 - DNA, 433 bp, Homo sapiens
  SIMILAR (36)..(68): 541254mologous to Human immunodeficiency virus type 1 envelope glycoprotein,accession number AF021462,Smith-Waterman Score=36.
ggatgttggccaagactcagtcatccaaagcctgcctcagtccaggcaggtgcgctcacaccacgggcagttggcactggctgacgttgcagaactctcctggggccgtggactcagagcacctacagttgacttctccacatgggttgggcctctcatggcaagggtaccatgttccaagcagagtttccctaggatgagcagtcaaaagagaagatactaggatttgactccttaagatgtatcctcagaagtcacacgacagcacgtctgcggcatcatcgcagtcacagactccacacagatgcaaggtagttcagacgcacactgcatctttccacgggttaagtggcgagttacattacaaaagagtatgtcagatggcagatattctttgcaggaggctttttgaaaatacaatctcctatagaat

SEQ ID NO: 2564 - DNA, 463 bp, Homo sapiens
  SIMILAR (406)..(218): 341254mologous to Homo sapiens Human secreted protein clone yd40_1 protein sequence SEQ ID NO:118,accession number Y73448,Smith -Waterman Score=72.
atggctggagctgtgcaggcccagtgggagtcaggagagcctggtagtagggaaacaaggaagaggctggcagcagcagtcccactgagtgggcacaaaaagagatgggaagacaaaaggaatggaggtttgctgagcacctatgacagacatgtcaaggctgtgctcaatggcccagcatcacccacgctatcttcttctattttcacagcaatgctggaagacagctgtggagcactgccacctgggcagatgagggaagcggcccagagagacagggacacatccacggtcatgcagctggtatgcagtggtgttacgatctgagccgaggtctcttaggctctagagtatatacgggttttgtccgttgccccatgctgcctggaaggaaacagggccagcactgactccaataatctcttccaacatctatgtaaggcctctttctttcctcgaaccg

SEQ ID NO: 2565 - DNA, 396 bp, Homo sapiens
  SIMILAR (275)..(346): 371254mologous to Homo sapiens Human secreted protein, SEQ ID NO: 4412,accession number G00331,Smith-Waterman Score=49.
  misc_feature (1)...(396): n = a,t,c or g
gttctcagaacggaaaacccccattgctggggggaatgccgtaggttatattgggaggctggatgaggcggtatctgatttgtatagggcccaggggattggtttgaccaggcttgtcattcacatagcccatgaaaaactggccctcctatcctagtcttttaatatgcaaacgcagctacctggctggttgccatgatgtcctgcccacatagtctctacctggctggtcgccatgatgtcctgcacacgtggcaacaaaaagtggcaggaaccgccatactgggtggacctggcttttagttgcctgcatttgcatatcaatgcttgcaggtctggtttttcagtctgctttctgttagaanagaaatgttttgggggcttgtttttcagtaa

SEQ ID NO: 2566 - DNA, 625 bp, Homo sapiens
  SIMILAR (81)..(10): 371254mologous to Homo sapiens Human secreted protein, SEQ ID NO: 4412,accession number G00331,Smith-Waterman Score=49.
aaagcagactgaaaaaccagacctgcaagcattgatatgcaaatgcaggcaactaaaagccaggtccacccagtatggcggttcctgccactttttgttgccacgtgtgcaggacatcatggcgaccagccaggactttgtagagtccccaccagtgagaaggccatcaccagatgtggcccctcaaccttggatttctcagcctccaacaactagtcctatcatcagagacaattctctaagcactgccacaacacagctttcatttcagccatatccaaacccaccctcagaggcacagaatgacctgggcatccaggaaaagggagcaagacggaagcctttaggtgcccttgggcacaacaggtttcaagctaacaaacatcaaatggctactgactgcggtgattttaggaaattactccatgaaaaccccaaactctttactggatccattacatttactacattacttactggatcaactggcaacctgataggatctagagaaagaatcaggactgcagcttctaatgagaagttggggctcatctcattaaaatgtcttccttatccccagcaatatggcttgggtgctgaagagaaccagccccagaggagttaa

SEQ ID NO: 2567 - DNA, 356 bp, Homo sapiens
  SIMILAR (306)..(344): 691254mologous to Homo sapiens Human secreted protein sequence encoded by gene 11 SEQ ID NO:72,accession number B24447,Smith-Waterman Score=51.
  misc_feature (1)...(356): n = a,t,c or g
ntttcaatccaagggaagccattagggactgtgccatgcactttggcacagagattgcgcttttcccatggtcttcacaacccacagaccaggagattccttccagtgcctacaccaccagggccctgagtttccagcacaaaactgggaggccatttgggcagacaccgagctagccgcaggagnnnnnnnnnnnnnnnnnnnnnnnnnnnnnnnnnnnnnnncatacgccagtggcgcctggaacaccagcaagacaaaaatgttcgctcccctggaaagggggctgaagccaagtagtctggctcggtgggtcccacccccacagagctgagcaagttaagatccactggctt

SEQ ID NO: 2568 - DNA, 373 bp, Homo sapiens
  SIMILAR (323)..(361): 761254mologous to Homo sapiens Human secreted protein sequence encoded by gene 11 SEQ ID NO:72,accession number B24447,Smith-Waterman Score=55.
  misc_feature (1)...(373): n = a,t,c or g
ggggttggggaactccctcttcaatccaagggaagccattagggactgtgccatgcactttggcacagagattgcgcttttcccatggtcttcacaacccacagaccaggagattccttccagtgcctacaccaccagggccctgagtttccagcacaaaactgggaggccatttgggcagacaccgagctagccgcaggagnnnnnnnnnnnnnnnnnnnnnnnnnnnnnnnnnnnnnnncatacgccagtggcgcctggaacaccagcaagacaaaaatgttcgctcccctggaaagggggctgaagccaagtagtctggctcggtgggtcccacccccacagagctgagcaagctaagatccactggctt

SEQ ID NO: 2569 - DNA, 723 bp, Homo sapiens
  SIMILAR (655)..(398): 411254mologous to Homo sapiens Human secreted protein sequence encoded by gene 11 SEQ ID NO:72,accession number B24447,Smith-Waterman Score=108.
atgttgatggcagcagccgcctgcctggagtggtggctgcgaagacaccagctgcaggtggggaggcgctgccttggctttgagcttcatggagctggcaacaagaaagaaagaagagagaaggagagacagctgtggccctttggggatcccagacctaggagctccccaaaccagggctgtgccaccctctctgaggctctgcagattcctggcatctccaagcttctgggtgctaccgcattccctggtgccagctgtggaagctgcttcaggaaaatctaccaactgggtataagtggagacactattgttgattttagtggaaggaagatgtgtaatagcagttttaataggagagaaaacagagttcttatagaaatacatgaagataagccagtactgaaagtactcccgccaccaagcttgagcctccctcgagttcagactgctctgctggcagcgagaatttcaagccagtggatcttagcttgctgggatctgtggggtgggacccaccaagccagaccacttgggctccctggcttcagcctcctttccacaggggtgaacggttctgtgtcatgggtgttccaggtgccactggggtatgaaacaaatctcctgtggctcgcttggtgtctgcccaaacggctgcccagttttgtgctggaaactcagggccctggtggcataggcaccggagggaatctcctggtctga

SEQ ID NO: 2570 - DNA, 463 bp, Homo sapiens
  SIMILAR (339)..(184): 981254mologous to Homo sapiens DC13,accession number AF201935,Smith-Waterman Score=274.
aaacgccctgcccaacaaatactcagaatccagggtgttcatatttctccatggttcaatctctcacaggtcactttccattcaaaggattatggagaccaaataagacaggattctttcaggtatcaacccagagtctttaggtcttctctcagccaaggcatcgagtgaaaatacaatttatttttcggattcctctggaggattaaaaagtttctttcgcattgcaatgccatgctccctgctcttggtcctgttttatacgtactcattcttcaggcattttctcaactcccgatcaacatcattacaataaccaaaaaatttcagaatgttgtgccgactcgtggccacaccgggagaactgaagcggcagtagccgagaggagacgcccgacccgaaggccggctgctagggagcagacagctgaaccgcttgccagacgcgaattccagcactctc

SEQ ID NO: 2571 - DNA, 623 bp, Homo sapiens
  SIMILAR (275)..(189): 541254mologous to Homo sapiens Human secreted protein encoded by gene 57 clone HFEBF41,accession number W67863,Smith-Waterman Score=77.
atggatctctgtcagaaaaatgagactgacttagaaaatgctgaaaataatgaaattcagttcacagaagaaacagaaccaacctatacttgtccagatggaaaaagtgaaaaaaatcatgtttattgtcttctcgatgtcagtgacattacgcttgaacaagatgaaaaagccaaagagtttattattggaactggatgggaagaggcacctccccagcgcagcagcccggctgtgggcctgcggcagccgggtcttcctggtccccacctcctggggccgacgggcggcaggaaggggctcggcgggacgcgccatcagggacctgaggaggaacaacggaacgcgttcggaacggcctggactcccgagactcacccgactcgtggccacaccgggagaactgaagcggcagtagccggcggagacgcccgacccgaaggccggctgctagggagcagacagctgaaccgcttgccagacgccgaaacccagtgacgccctacaccgctgcaccgagctcccggttccccgaccccggcgcccgcgggccccaaggcgcatgcgccgcctgtcctggaggggcccatttccttccgtcgtgtggggaggcacagtgagtc

SEQ ID NO: 2572 - DNA, 464 bp, Homo sapiens
  SIMILAR (134)..(343): 551254mologous to Homo sapiens DC13,accession number AF201935,Smith-Waterman Score=171.
gcacggtggagcggtggagggcgtcactgggtttcggcgtctggcaagcggttcagctgtctgctccctagcagccggccttcgggtcgggcgtctccgccggctactgccgcttcagttctcccggtgtggccacgagtcgggttgcactgctgtgatccatcctcatctcctaaagatgcatcctgacttatctccacacttgcacactgaagaatgcaacgtcttgattaacttgcttaaggaatgtcacaaaaattacatagaaaacaggaccaagagcagggagcatggcattgcaatgcgaaagaaactttttaatcctccagaggaatccgaaaaataaattgtattttcactcgatgccttggctgagagaagacctaaagactctgggttgatacctgaaagaatcctgtcttatttggtctccataatcctttgaatggaaagtgacctgtgag

SEQ ID NO: 2573 - DNA, 836 bp, Homo sapiens
  SIMILAR (408)..(313): 531254mologous to Homo sapiens DC13,accession number AF201935,Smith-Waterman Score=63.
  misc_feature (1)...(836): n = a,t,c or g
ttttttttttttttttttatttaaattattttattgaaggagataagttactcagatattaactggttgtaggcaaagggaataaacatggtgaagtcaggtttgctggtaaaggggagacagtactaaacgccctgcccaacaaatactcagaatccagggttttcatatttctccatggttcaatctctcacaggtcactttccattcaaaggattatggagaccaaataagacaggattctttcaggtatcaacccagagtctttagggtcttctctcagccaaggcatcgagtgaaaatacaatttatttttcgggattcctctgggagggattaaaaagtttctttcggcattgcaatgccatggctccctggctcttgggtcccgttttctacggtactgttcgtcctaggctactcagggaggctgaaggtgggaaggatcacttggagtttgagggcttccgtgagttacgatcaccctactggcactccagcttaggtgacagagcaagaacctcattcttcaggcattttctcaactcccgatcaacatcattaccataaccaaaaaatttcagaatgttgtgatttttgtgacattccttaagcaagttaatcaagacgttgcattcttcagtgtgcaagtgtggagataagtcaggatgcatctttaggagatgaggatggatcacagcagtgcaacccgactcgtggccacaccgggagaactgaatgcncagtagccgcggagacgcccgacccgaaggccggctgctagggagcagacagctgaaccgcttgccagacgccgaaacccagtgacgccctcc

SEQ ID NO: 2574 - DNA, 869 bp, Homo sapiens
  SIMILAR (477)..(340): 451254mologous to Homo sapiens DC13,accession number AF201935,Smith-Waterman Score=76.
  misc_feature (1)...(869): n = a,t,c or g
tttttttttttttttttatttaaattattttattgaaggagataagttactcagatattaactggttgtaggcaaagggaataaacatggtgaagtcaggtttgctggtaaaggggagacagtatctaaacgccctgcccaacaaatactcagaatccacggttttcatatttctccatggttcaatctctcacaggtcacttttccattcaaaggattatggagaccaaataagacaggatttctttcaggtatcaacccagagtctttaggtcttcttctccagccaagggcatcggagtggaaaaattacaaattttatttttcgggattccctctgggaggattaaaaaagtttcttttcgcattcgcaatgcccatgctcccctggctcttgggtcctgttttctacggtacgtcattcttcagggcatttttctcaactcccggttcaacatcattacaataacccaaaaaatttcagaatggttgtgattttngggtgacattccttaaggcaagttaatcaagacgttgcattcttcagtgtgcaagtgtggagataagtcaggatgcatctttaggagatgagggatggatcacagcagtgcaacctgcatgatgggatcaacagtaccccaaacctcagtgtcatccaatgtacccatgtaagaaacctgcacattacttatatccaaaatccgactcgtggccacaccgggagaactgaagcggcagtagccggcggagacgcccgacccgaaggccggctgctagggagcagacagctgaaccgcttgccagacgccgaaacccagtgacgccctccaccgctccacacgaaatcgtcgacacgggaattcgggacc

SEQ ID NO: 2575 - DNA, 528 bp, Homo sapiens
  SIMILAR (332)..(24): 331254mologous to Caenorhabditis elegans coded for by C. elegans cDNA yk127b8.5; coded for by C. elegans cDNA yk127b8.3,accession number U39850,Smith-Waterman Score=93.
ttattgaggctgaaccaaagagttgaagactggagctctctcgaatgcctggtttggagatgtctgggattcgcttctcctaatgatcttgcttctctcgcgaaaactgcagatttcttcatcctccggttgaacgttcttggggagccgcggccgacgcgcctcgcactgatggccaccagggggagccccgcgcgcttcctccttccccttgtgttcccgggcgcacttcaaaacgctgacgttctccttcgtccctctgggggcgcccgaggggccctcgcagaagatgaggtgcctttccagccaggcttctcgcgtgcagggcttgggaacagtgcatccccatcctaccaagcagtcccttcctcttcatttgcatcgcgtccgtagtcttatttttcagtgaactggagaacagaaaattttaaaatagatttttctaatattccagaaggtcaaacacctttccgcaaagtatctagcatactaaaggggaagtaattttacatgtctggaaggtgtatt

SEQ ID NO: 2576 - DNA, 1200 bp, Homo sapiens
  SIMILAR (1)..(339): 991254mologous to Homo sapiens unnamed protein product,accession number AK022538,Smith-Waterman Score=587.
cgagccaagcatctggcagccaactggaatcgcatcaggacctccaggaggactattatccatatcccatcattagggtattcccagcctgtgagagaacatattgccgatttcaacacacagcagaacatgcagctggggaggctgtgtgacatcttagatgccaatgtgaatgtcatctacatctgctcccatcatatgaatgacgagttagtgctgtattacaaaaaaatcctaagtctacatgcagccgtcaaatctgggaaccttgaggacagaagtgacctgcaggacaggttcaaaattatcacacctgaagctgtaaacatcttccctgtgtatggactagaaaaaaggacaccttttaacaagaataatatgatcttcccccagaagcatcatatgtgcctggccactcacctgatgtacagtcccaaggcaatcaaaagaataaaaaatctcatccgaggaacagaggcctacatcgtcagcgggctcctccacagagatgatttagctgtggccgatatgttagacatacccatcctgggctctgagcctgaactagctcatctttatagtaccaaatctggaggcaaacgtgtctttgacagtgccaatgtggcagttcctcctggaatatatgatatttatagtcagcaacagatgatagagcagctgagtcagctgataactgatcacctgcaaatacagcgctggctctttaaaatggactctgagttccgaggaaatgggactgcattttgtgatattccttcctacctaaagtgctacaaatgggtgctaaaggagagtagcagatatggccttgaagactggagaaagaaatgggcacaagtccttgcctttgtgactcataccgtgtgctgcccttgtggcaagctttctgctttccagagatttgtgggaaacgcaaatattcctggaacacagaggccactgctctcaaatttcttccctttcctagataacagaagagctggtctccttttcccacaaggcagcaaactgggagctgattcaaatccggagcacctttcatggtgctccccactttacactctgaagaggcagcagggccggtggggagcacttacccaggagtcagaggcagccagagagcacctgcggcctcccagtgtgactggagaagccctcgttccctcttttgtgacatga

SEQ ID NO: 2577 - DNA, 501 bp, Homo sapiens
  SIMILAR (58)..(297): 1001254mologous to Homo sapiens Hb2E,accession number AF235097,Smith-Waterman Score=429.
  misc_feature (1)...(501): n = a,t,c or g
agggaccggccngnggagaattgganttaatgaccggccgtacgaattcggcacgagcagcagcagcagctgccgcagctggagccacagcccgagtgccagggtcccgtggaggctgaggccaggcagctgaagagctgcatgaagccggtgaggcgcaggcctgccgaggaggaactgaagacgaagaacatggatgataacacctttgccatggcagagcatcctgatgtccaggagtcagtgggtccactggtagcccccacccctctccgtccatggccccagatgacacttnnnnnnnnnnnnnnnnnnnnnnnnnnnnnnnnnnnnnnnnnnnnnnnnnnnnnnnnnnnnnnnnnnnnnnnnnnnnncaaagattgctgccttttccttcctctgggaagcttcgtcccagaggggcacctgccagatgccagccggagctcttgtatatgaggtgaaaagcaatcacggagttaaaagaagacaagctgaaat

SEQ ID NO: 2578 - DNA, 753 bp, Homo sapiens
  SIMILAR (350)..(382): 901254mologous to Homo sapiens Human secreted protein sequence SEQ ID NO:103,accession number Y87064,Smith-Waterman Score =54.
atgggggaactaaatcaaggcagctggaggcaggggcaccttcctctggatgctgcgaatggaatagccatccgggtgccccgaaggaggaaagatgagagcagaaagaatccaactaggaaaccacacagttggaaaccaacgaagaattttgaggatgacgttgaggtcatgaagaggtcaatgagcataaggattgaagacacccactcaggcccctctgctgcaggtgtgctggagtttgctggaggtccactccagaccctgtttgcttgggtatcaccagcagaggctgcagaacagcaaagattactgcctgttccttcctctggaagctttgtcccagaggggcacctgccagatgccagccagaactctccttccaaacttcctagtggctttgtttacactgtgagaggaaaactgcctactcaagcctcagtagtagtggacgcccctcctgccaccaagctcgagtgtcccaggtcgacttcagactgctgtgctggcagcaagaatttcaagccagtggatcttagcttgctggcctctgtggggcctagggtaaaccttcaacaagagtcttctcattatggaaaaatctctgtgactgtggctggccattgccctacccatgccacaggtcgaattcttgggaagcaggctctgagatggagcccaatgtgcagtatgttcattggacgtgcccttgggctcgtacctgtggagggaggccttctgcagattgcatga

SEQ ID NO: 2579 - DNA, 2274 bp, Homo sapiens
  SIMILAR (1390)..(1971): 631254mologous to Homo sapiens p40,accession number U93570,Smith-Waterman Score=594.
atgaggggcagtgttcaaatgttcacaaatgggaagggagctgagcaccatccttcattcctgcaagcgtggccatcattggccttgcaagccctgacctggctgtctacagccttgccagcatgggtcatgcttcttacatgcatgggcaatctacacccagggatcttgtttgttgctcctttcattgatatgtcatcagcaagcacctctgcagaggccaggacacagggagaagacgccatctatgaaccaggaaacgggtcctcaccagacactgaatctgctggttctctgctcttggactctctggcctccagaactttttcgggcaaacccctacctctgccttctctggtgtctgcgacccaggatctgaccactgacgttacccctgcagcctggctgcagagactcaaagtggaccaacgatcaacgtcaccagaaattttactctacctgttgggaaagggggatctttttctgctagagtttctaagttgctatagtggatgcctccagtgtatgtcaatttgtagcaggatgagccgcagacaaaactcctcagacaccgagttaaagaaggaaggggtttattcagctgggggcattggcaagactcctgtctccaagagccaagctccccgagctgtgataaatgagagcccaattccagcatctattgctgagatgttctccagcagtctgggaaaatgtctgcagcatttcctggtgtctttccctcacaacgtctccaagccttcccctaagttagctttaggggttgggaaaaacaaagtactgtcccttggtctgggttgcttggatccccagtggaaaatactcattgtcatagtgaatggctttctgtgtggcaagcaacaggtcctagaccaaactcctggtgtttcattagcatttccaaagatagctgaaagagatagcacctgggggaaaggccagctgtggggcagcttcagcagacttaaacgttcctgcctgtcggttctgaagatagcagtggatcccccagcacagtgctcaagctctgctaagggacagactgccttctcaagtgggtccctgatccccatgcctcctgactgggggacacctcccagcagacacctcatacagaagagctcccgctggcatctggcaagtgcccctctgggacgaagcttccagaggaaggaacaggcagcaatctttgctgttctgcagcctccactggtgaggcaaacagccaggcaaacagggtctggagtggaccttcagcaaactccagcagacctgcagtcgaggggcctgactgttagaaggaaaattaacaaacagaaaggaatagtatcaacatcaacaaaaaaaaatgtccacacaaaaaccccatccgaaggatcacaactcctcaccagcaagggaacaaacagtatggagaataagtttcacgaattgacagaagtaggcttcagaaaaataaccagtttagagaagaacataaatgacctgatggagctgaaaaacacagcacgagaacttcgtgaagcatacacaagtatcaagagcagaattgatcaggcgaaagaaagcatatcagagattgaagatcagcttaatgaaataaaatgtgaagacaaggttagagaaaaaagaatgaaaagcaacaaacaaaacttccaagaaatatgggactatgtgaaaagaccaaacctacgtttgactggtgtacctgaaagtgacagggagaatggaaccaagttggaaaacactcttcaggagattatccaggagaacttccccaacctagcaagacaggccaacattcaaattcaggaaatacagagaacagcacaaagacaatcctcgagtagagcaaccccaatacacataatcgtcagattcgccaagtttgaaataaaggaaaaaatgttaagggcagccagagagaaagacatatcaatgagacagaaaattaacaaggatattcaggactttaacacagttctggaccaagtggacctaatacacgtctatagaactgtccaccccaaatcatcagaatatacattcttctcagcaccacatcatacttattgtaaaactggccacataattggaagtaaaacactcctcagcaaatgcaaaagaatggaaatcataacaaacactctctcagattacagtgcaatcaaattagaactcaggattaagaaactcactcaaaaccacacgactacatggaaagtgaacaccctgctcgtgaatgagtactga

SEQ ID NO: 2580 - DNA, 1848 bp, Homo sapiens
  SIMILAR (1119)..(1211): 801254mologous to Homo sapiens Human secreted protein, SEQ ID NO: 4473,accession number G00392,Smith-Waterman Score=136.
atgcccctaaatgggcgaatgctgaactatattgcgaagcgtaaggagtgggccgggcatgtgatgtgcgactgttacaactgccacatacgatataaggaggattggattcaccttgccttgtacgggactaccttggtgagacaaacaccgattgggggtaacgccgaagcgttaaagttgagtattggggtggtggcgataactggctgtatgtatgcagatgacgggctgctgatgggcgccggcaaactttatgaggaatggatgttatacgagttgccttttgttattgctgaaggccggagtggaatagtgacgcgaaacatgcgcgtacatgcataccaagtgttgacatgcaccttgaaaacgacacgggtggacggctttgaacggaggtgtccttggcgggaaggcgcgcgggaagggagtagggggtgtacaaacggaaagccggaaaggggggaggacaaatacagtgtacgaaactgctacgcttccgctactgtcaccggctacgctttcagctcccggagccgggctgcctctacctgcgcttttccaacgagatgtcaaccgaagttcagtaggtcaatagaccctactggcaaagctgttcaaactgcggatatccggctatctgctagagctacgctatggttaggcggttcgatagaggagagtccggttctgtgttcgactctccgactgctgctgcggcggcttccgccaccccttacctggaccagtccgaacagaccgactcaaccctgtaccgcgcaaacacagaccaaccagagcgtcggaatcgccgcacctagtgcaatacgcgttatttatccagagtcggttgtactcaacgctgttatttatttaccaggagacccagaagtatccgggttgcccagggccttcaaaaggcgttttagtgtcgaagtacggctcgattgtggaaccttcaaactcctattagtttattgtactcatccgggcgataaaaaagtgaatacgtgtaaaactggtatatcctccgaagtatatacccttaggctacgatttgttctaaaagtggctaaactgactgaagcacttagatccatattcctgtccgaactgcagtcaggcccctctgctgcaggtctgctggagtttgctggaggtccactacagaccctgtttgcctgcgtatcaccagtggaggctgcagaacagcaaagattgctgcctgttccttcctatggaagcttcatcccagaggggcacttgccagatgccagccggagagccggcaggcaggaacgtttaactctgctgaaactgtgcctacagccgccccttcccccaggtgctctgtaccagggagacgggagttttacctttaagcccctgactggtgctgtcgcctttctttcagagatgccttgctcagagaggaggaagctagagaggcagtctggctacagaggtttgccaagctatggggaaaattcaccactgagctcaagcattgtaagacatcctgttctaaggagggatgaggacaaatcctctactgttcccaacagttgcacagggcactgcatctacagttaccctgagaactacaagcaggaggtgaaagagctgagtcagccaaggtcatctggggacctatccactggcagggaactgagaggctctgagggcccctcagggagatggacccatagaggctccaccatgctagcgatgctggccctgtctgttggagttagagatgttggaactgcatcaagctgcctcaggcattcagatgaatgcctctgtgaagttacatctccatattggaagcagcagagtcagaattga

SEQ ID NO: 2581 - DNA, 1263 bp, Homo sapiens
  SIMILAR (739)..(858): 821254mologous to Homo sapiens Human secreted protein sequence SEQ ID NO:103,accession number Y87064,Smith-Waterman Score =162.
atgccaggagttcgtgtgttagtgaagaaaaacaagtactcagcaagccggatggccgttgaacgtccaggcctggcccagcccagtgagcccctcaaagctgtgcaccccaggcttccacagagaccttacattctgttgccatcacgcatctttatggagccttttgatttgggcataaaagttctttactcctctggaactgcattcctaggagataaacagggtgcagagaagaagagaacaaaattgagtcaggcaatctgctgttccatttcttctctggcaaaacgagaattattcagcatgagcatctatggattccccaccaccaccatcagtggagctgcctggatgggctctacctgtccttcccgactagcagaagaaaatggcaggattttgcataaaccaaatcttatgagaaacagatcaaagcaaaaggcagaagaagtgggtaaccccaagtctagtatgggaaggagacagtgtagaagtgctgtgggtgctgtagcagagtgtgaagttcaagccagctctctctgtgacaccagggatgtttcttccaataactccacagggagccctctttctgatgaatactcagacaagcctttgttcacagtttccttgagagacagtttccttgagagacttctagcttccactggccccgtggtttctaaaacaacaccacacgctttagatttctggtatggcagcactccactttgggatctgctggcgtttgctggaggtccaccccagaccctgtttacctgggtatcaccagcagagcctgcagaacagcaaagattgctgcctgttccttcctctggaagcttcgtcccagaggggcacccaccagatgccagccagagctctctgagctggcagtcaggaatgtttaagcctgctgtagctgcacccacagccgccctttcccccggtgctgtgtcccagggagatgggaattctatctataaacccctaactggggctgctgcctttgtttcagagatgccctgccaagagagcaggaatctagagaggcagtctggctacagcagctttgtcagagttgagaatacatcaatagatgtaatgcaaaaaacagtcatacaacaaactcaacaactgcaatgggaatttatgtcagatgaaattaattttatagaagagtctgataaagactttacattcgacacatttaggaatgttaaaaatgaagacatgaagacatgccagcaagatgaacaatag

SEQ ID NO: 2582 - DNA, 671 bp, Homo sapiens
  SIMILAR (541)..(669): 861254mologous to Homo sapiens Hb2E,accession number AF235097,Smith-Waterman Score=195.
tgccgtgcggtggaattcctatcttttctctttcctagccaggaatgtatcctaaagaaatgatacaagtgtcgataaaactatgcccaatgctgcttgctggtttgctttgcaacctctaaatgaaagaacttagctgctcagtaggaagggaatggtatgatatgagtattaagcagccatttgaaatgtttgcaaaagtgtataatgatgtttcttactgttaaatggacaaagctagctgtgaaattatgtctgtacaatctaaatgatttcgtagaatatctggaaggaaattttccagaatggtaacagtagttgtctctggctgatgtgcgattgtttttcttgcttctttagactttcctgcattttgcgaattttctataatgaggctgtatgacttttacgatgacgggattaacaaaggcagcagaagagaaaacagcagctgtcaggtgaaggtgggctagcacagaggctcagaaggtgccagtgggtggcagaagtgacctctcagggtattattagatccatgtactctctcctctgccctgcaggcctgccgaggaggaactgaagacgaagaacatggatgataacacctttgccatggcagagcatcctgatgtccacgagtcagtgggtccactggtagcccccacccctct

SEQ ID NO: 2583 - DNA, 794 bp, Homo sapiens
  SIMILAR (279)..(7): 791254mologous to Homo sapiens putative p150,accession number U93570,Smith-Waterman Score=362.
ctagattgcaaaaattttctcccattctgtaggttgcctgttgattctgatgatattttcttttgctgtgcaggagctctttagtttaattagatcccgtttgtcaattttggcttttgttgccattgcttttggtgttttagtcatgaagtctttgcccatgcctatgtcctgaatggtatcacctagattttcttctagggcttttatggttttaggtcttacgtttaagtctttaatccatctttggtctttgatgttggtgaccttcagatggggtttctgtgtggatgtcctttttgttgatgttgatactactcctttctgtttgttagttttccttctaacagtcaggcccctctgctgcaggtctgctggagtttgttggagttccactccagaccctgtttgcctgggtatcaccagcagaggctgcagaacagcaaagattgctgccttttccttcctctgggaagcttcgtcccagaggggcacccgccagatgccagccagagctctcctgtatgaggtgtctgttgatccctactgggaggtgtctcccagtcaggatacatgggggtcagggacccatttgaggaggcagcttgtcccttatcagagctcgaatgcagtgctgggagatctgctgctctcttaagaatggtcaggcagggacacttaggtctgctgaagctgcgcccatagccatcccttcccccaggtgctctgtcccagggagatgggggttttatctgtaagtccctgacgggggctggtgcctttttttcagacat

SEQ ID NO: 2584 - DNA, 792 bp, Homo sapiens
  SIMILAR (2)..(457): 471254mologous to Homo sapiens Hb2E,accession number AF235097,Smith-Waterman Score=234.
cggccgcaccgaccgctttgccttccagctgccctttgctgagggcgcgggcgattggggcgcgccttcgacttcgtgttgcgcttatgagacaattgagggcaactttctgggccaaaaaaccacggccgcaaacttacaaatcctgctccggatcgcacccgctcccacacccactgatgccgaaaggggtgcccccagcagcaggcagctgccgcagctgggagccacagcccgagtgcccagggtcccgtggaggctgaggccagggcagctgaagagctgcaatgaagccggtgaaggcgcaggcctgccgagggaggaactgaagacgaaggaacatggatgataacaccttttgccatggcaggagcattcctggatgttccaggggagttcagtggggtccactgggtaggcccccacccttctccgttccatgggccccagattgacattttcaggtctgctggagtttgttggagttccactccagaccctgtttgcctgggtatcaccagcagaggctgcagaacagcaaagattgctgcctgttccttcctctggaaacttcatcccagaggggcacctgccagatgccagctggagctctcccctagacactaccatggggctggagcccaaaagcccttgtcctggttcctgcagctgcccatctgcatgctccccctcctgggcttcagttccagcaccattgctttgtggagccatacccatggctaagtaactatctagacatctctgtttcttcatccatgatgaaggtctcat

SEQ ID NO: 2585 - DNA, 579 bp, Homo sapiens
  SIMILAR (211)..(438): 781254mologous to Homo sapiens HPT protein,accession number AF288288,Smith-Waterman Score=315.
atggaacttattggtgatcttcataggagcagctttaatagagtaacaggaaaagggacctgtgaaaccactttgcaaagattatcacaggataatgtcttcagcaaagacactggaatccagagtaaatatactgtgctcacattttttgggaattcgcacatctcaaattctattgcggaaggccaggtttcttcaccaatttcatgcaaggtagtatactttaaacagtatttgaaagctgtgataactccagagtgtcttctgatattagattatcgtaatttaaacttagagcaatggctgttccgggaactcccttcacagttgtctggagagggtcaactcgttacataccctttaccttttgagtttagagctatagaagcactcctgcaatattggaatagatggctacacttcctgcttggggtaattaatgagcaccagctagcaccagccagggagatgataagtagtgggagcccagttaccaagcagggggaaagcagaagagagaaagaagatgtaaacagtggacttcttaacccggaagcagttcctctggagacgaaataa

SEQ ID NO: 2586 - DNA, 731 bp, Homo sapiens
  SIMILAR (680)..(558): 561254mologous to Rattus norvegicus RPT protein,accession number AF288289,Smith-Waterman Score=92.
tgatacacagagctcttctagcaactcttcatcatccaagatctccaaaattgactctttgatcattttaatatctgtttctaactctgatagacttttgccattctgtagtaaaatgtgcagtttgcttctgtctacagaagaatgtttggggtccaccaaagcatccaaggtctcaaggatcagtggctgcaaaatgctaagtttcccctgaagggtgttgatctagataacaacatgacccaatattgcaggagtgcttctatagctctaaaactcaaaagggtaaaagggtatgtaacgagttgaccctcttcccagacaactgtggaagggagttccccggaacagccattgcctcctaagtttaaattacggataatctaatatcagaagacactctggagttatcacagctttcaaatactccattctcatgataatccgtattgtttctgactgtgatactcattacatgctgaaatctcaaatctctggcttgaagacctaactcttggtataattcagttttcttcctttcaaaagaagtaacgtttccctgtttgtcaaattttggtcacagtaaatactggggctacactggctaaagtggcttgagagacgtcagaggttctaaacccggtgcacttcacctgccaacgcggagccggtcgggccctgcaaacgtgcgccgctcggctccttccaatccaggttggctcggcggccgc

SEQ ID NO: 2587 - DNA, 579 bp, Homo sapiens
  SIMILAR (260)..(213): 501254mologous to Homo sapiens small nuclear ribonucleoprotein N,accession number AF134832,Smith-Waterman Score= 45.
aattattataataactagagatttattaaaccaacaagtcactcttcttacaaaattacagttaatatggggtgggagaggtgtgttggttggcccaaggccagccagacctgcgtcaccgtcaccgggagaagctaccccgcccccttctgctcagggatctccgcagtgaagcctcctctaaggagtcctaggactctccctttagagtgggggacaggggggtgtgtttgtgctggcctgggtccaaatactccagggtgtcagctccatccccctgctgtcctctgtccccaggggctgggaagacaccaacggctgtgaacaaactcgctgatttcttcaccaagacggtgaggcggaggcactggctgcaaaagtccaccccctctagacctctgcaaccacagaatccccagcccaaaggcctttgctggtttgagttgaattcagtgtggactgaaggaaaaacatatctattcacacctcagagtgaccatccgagctcctggtgactggaaaaaagaaatgggtcaccctttggcctgcgaggactgggcgggaggccccagcacgaaa

SEQ ID NO: 2588 - DNA, 828 bp, Homo sapiens
  SIMILAR (182)..(111): 371254mologous to Homo sapiens Protein polymer adhesive substrate PPAS1-A monomer,accession number W49712,Smith-Waterman Score=39.
tatacatggcctgggagacagctgctttctgtttgcaggtatggtgatgatcttgtgcctgagctctagggtccccatggaacccagaatgccaaagctgttggtcaggggcccagactgtgctctctgcttggggctgggcagaccccacaccctcctcaggccagagagccttggggacctctatcagtgctcagagggaaggccaagacctggttcttaggatggtcagcggcgcaggtcacaaaactggcccataggcatgaaagtggcaggcacaattttcatgagtttggcaaagacgctcttcgtagaaatcagtttctgcttggcctgctaaatccgagccatcggagaggttaccatggcccctcagggcacacgcaggaccactgtggattagaaacccacacgtgtcactcgcaacattcctcccacatccacatccacgacggagccaaatctcatttgtcaccctcagtcaccaccccacaagaaaaagccgctggttacgacatgaatgacaggtgtcatgcacagggagagaatttctccccggatacccctgaggaccaaggaccacccccaggctagggtccccaggcacagcctgctgtacaagcacacgactggcctgggtgtgggcgttggcctcagccacctggaggcatcttggagtgggagaggggctgggagacaccaacggctgtgaacaaactcgctgatttcttcaccaagacggtgggcggaggcactggctgcaaaagtccaccccctctagacctctgcaacccagaatccccagcccaaaggcctttgctggtttga

SEQ ID NO: 2589 - DNA, 468 bp, Homo sapiens
  SIMILAR (278)..(322): 461254mologous to Hepatitis B virus surface antigen a- determinant,accession number AF050292,Smith-Waterman Score=40.
atggcccatggtttccggagtggccagacagacagccccaaggatcctttatcagacagaggacagctacatagagacctcccggacctcgactttccacccagaaggggccactctaacatccccaacaatgcggacagctgggccagcaccacaacaaacgccagatactgttccctggcctggaatattcctcttccactgaattctctttgcctgatcacctgccatccccacctcaagtctcagcaaaaagccaccttcgcctggaagccttctctgtcccctcatgcctggggtggagaggccttcgctctgccccggctgggatctccttgtggacaagccccagccattgatgcggatggaagttgcgtctgtattcccgttaggaatgactgtctacagcatcgaggctgggaagaagaggagcctggtctcagctctggcttgcgggtctcggaatga

SEQ ID NO: 2590 - DNA, 552 bp, Homo sapiens
  SIMILAR (160)..(510): 311254mologous to Homo sapiens Human Ksr-1 (kinase suppressor of Ras),accession number W19919,Smith-Waterman Score=114.
atggtcgccctggcaacggcgggaaggcgtcggggctgctggctgtggctgccgcgatttcattacccgcacggggtctgctcacccgagaaccttaataacacaaccagggacccggtcctgcagaatgcgcaaggtcacgtgggttctctgcagctccttaatgtattacccggcacacaagcccccgtggcatataaacaaatccacaagcggaaaaaagagagaactccctcctcagcgaggaagcgaatgacaacggaaagctcccccggccagctgagcctggaggacttcttggagatgacggatgaacaggtgtgcgagactgtggagaaatacggagccaaccgggaggagtgtgcccgcctcaacgcctccctctcctgcctcaggaatgtccacatgtcaggccaggacgagacagagtcaaccctggggggcaaatccgaaacgcaggaagaggcagcgtggacctgggatttggaggccggaagacaccagcaagggcagctcttggatttgaactcttgccccaggaagacccgctga

SEQ ID NO: 2591 - DNA, 876 bp, Homo sapiens
  SIMILAR (131)..(673): 291254mologous to Leishmania major L8453.1,accession number AC008054,Smith-Waterman Score=188.
atggatgccagctggtctgaaggaccccacaaggagctaactcatgaaagaatgcagtttccacatcctggtgatttcctctcccttgccccgatcaaccaacaaccccaattttccaaccctttaccttccacgatccccttaaaagccccagcccagaactccttgcagctcccagacgcccccagctctgccccaggccccgccctcgcgggttccttgactcagggccgcttctcgcgtgcgtccccagctcccgcccggcagcccggcgctccgtcccgggccggcggcccccgccagccgccgccgccgccggccccgcctccgggcaccatgctgccctcgcaggaggcctccaagctctaccacgagcactacatgcggaactcgcgggccatcggcgtgctgtgggccatcttcaccatctgcttcgccatcatcaacgtggtggtcttcatccagccctactgggtgggcgacagcgtgagcacccccaagcctggctacttcggcctcttccactactgcgtgggcagcgggctggcgggccgcgagctcacctgccggggctccttcaccgacttcagcaccatcccgtccagcgccttcaaggcggccgccttcttcgtgctgctctccatggtgctgatcctcggctgcatcacctgcttttcgcttttcttcttctgcaacacggctacggtctacaagatctgcgcctggatgcagctcttggcagggaggaattactgcctcattggaagaattgcccaaactcctaaaaggactattttgaagaaggcagatgtggacattctaatgggcttgtttcaaattcatctcacccaactcaatttagatgtggatctttga

SEQ ID NO: 2592 - DNA, 1333 bp, Homo sapiens
  SIMILAR (167)..(319): 371254mologous to Human herpesvirus 6B B2,accession number AF157706,Smith-Waterman Score=76.
aatcactgagcagaaaccgcaggccagacctagtgctggccacccagagaccaaggaagaacaaggtgcagccttgctgtggacctgccggctgcctgtccaggcgcctctgacgcccgcgctgctcttctccccacagcttgtctggggacctggggctctgctgtcagcttcgcaccctcccagccgtggcttctcatctatatctgatgggtcaaggagggtgggcggggagcacccagcttctccccaagcccaggctccttcctcagccccacaggggagcactgagccccccaccagctgggaacatgcacgttgggcaactcacatcttcaccaccgtgagaatgtttgcaaatgatcacaaaggctctgcgagtattgattttggtgttacaaatgaatttcagcaagcaggcaaatttgcaaatacagaatgtgcaaaccgcaattctttgagagaagggaccatgtcttcctgtgcgcaggtgtatccctggcatctcatgtctctcactgtgagcacctccaaggccacaagtagcagagcatcaatcacccttccaggaagaaatgtgccagggggtagagcagaaagccaggagagtgctggtgtttgcatcaatgagggccagatctgcatacccatggtgcaggcccctccttcactggggctgcagggcccagtcatctcgaacaccaggcaagggcaaacaggagctggcaggctgggcctcaagggcaggccttccacttgctattttgcaaaaggccggtttcagctgcctgggcattcagttaccttaattagaatgggccccaagctcggggcagattctatcacagcagggatgggagaagaggaaaagagcggtaatggagctgccctcccttgggcactgagatggagagcgggtgccatccgtattgaggggctgcagttcttgaatgctttactggctttgggactgtttgctggagccctgagccagcagccagcaaaactgaggagtacattagggtcatgcccatttaacaggcaaagaaaacaacgttcagagatgacacaacctgtccaaagtctcacggggaagggccaagctgtgattcggacccaggtccttctgactcttgacgtccatgctctaagttctgtgaactttggccaccctcacctgagcaactcactatccctccttacagccctccggaggacagggggaaagatggcacaggacctgcaagttacaaaagcgctgctagagagatctgaggtcagcagcaccaccattgctgatgagcaggctaggaacgcagacccaggcctgtga

SEQ ID NO: 2593 - DNA, 222 bp, Homo sapiens
  SIMILAR (130)..(71): 551254mologous to Homo sapiens Human secreted protein, SEQ ID NO: 6144,accession number G02063,Smith-Waterman Score=50.
atggttatccctcggtttactggagcgttgtatcccaaaggaaagcagtatccgtatcctaagcttgtctctgtctctgtggctcaagaggaccagatcctcgaggacttcctgggtaatccagagccatggagactaggaacaagcaggaaacccagttataagaaagggacacttctgctggccactggtcgtggaacaccagatctaatgtgttcatga

SEQ ID NO: 2594 - DNA, 645 bp, Homo sapiens
  SIMILAR (33)..(188): 381254mologous to Halobacterium sp. NRC-1 Vng1889h,accession number AE005088,Smith-Waterman Score=75.
atggaggagggggctacaaggcaaaaatgtgggcagactctagaagctggagaaggcaaagaaatggagtctccctggcatttccagaaaacacacagctctgcccacatcttgattttggcccacctgcagatcattccccagtgctctgccgggatccaggagcacaccttccttgccagctggcacagggctgatgagcctgtcagtgggcggctctggagggacactgattctagaagcagcgaccaagacaaaagagagcaatcaaccaaccgccagatgttctgtccactggacagcatgcgcctggaggctcataaccacccagaggactccctgcatttttcactttctgtgtgtcctggctgtgccaatggcaccattgggctgggctgcttccgccttgctcatcccctaatgatgtcaaaggaggacacagaccacgcaccgagaaaaggaatcttactcacaaagcctcctccccaaagggtcctcatagagacctatgtccatgtaacatcggtggaagcagaatggaagaaactggtacgtaatactcatctgcttttgctcagcttggagcagggaaaggaggaagacgccgaggaggaggaagcggacatggacatgcaggcaaaatag

SEQ ID NO: 2595 - DNA, 368 bp, Homo sapiens
  SIMILAR (11)..(184): 371254mologous to Mus musculus StAR-related protein p3-15E/p3 -16E,accession number AY007809,Smith-Waterman Score=89.
attgcaagtgtataatatggtacacaggattgattcagacacattcatatgtcataccattacacaaagctttgccgtgggctccatttcccctcgagactttatcgacttagtgtacatcaagcgctacgaaggaaatatgaacattatcagttaaacccagcatattccaaactagtgatgtttgtccagacagaaatgagaggaaaattgtccccatcaataattgaaaaaaccatgccttccaacttagtaaacttcatcctcaatgcaaaagatggaataaaggcacacagaactccatcaagacgtggatttcatcataatagtcattcatgataccaaaagaagaaatgaggccgttaaaa

SEQ ID NO: 2596 - DNA, 1944 bp, Homo sapiens
  SIMILAR (69)..(1): 601254mologous to Homo sapiens Human secreted protein sequence encoded by gene 23 SEQ ID NO:146,accession number Y91473,Smith-Waterman Score=71.
atggtagaaggcaaaggagaagcaggcaccttcttcactgggcagcaggagaacagcatgcgggaaaccacccccatgatccaattatctccacctggtcctgcccttgacatgtggggattacaattcaaggacacattcatatgtcataccattacacaaagttttgccgtgggctccatttcccctcgagactttatcgacttagtgtacatcaagcgctacgaaggaaatatgaacattatcagttataagctgtacagatctgcttctcaagctctacaggcttatattgatgattttgatttaggccaaatatatcctggtgcaagcactggaaaaattaacattgatgaggattttactaatatgtcacagttctgcaactatatttacaaaccaaacaatgcttttgaaaaccttgatcacaaaaagcactcaaacttcatatcctgtagaagacacaccgttaatgacatagactccatgagcctaacaactgatgatctattaagactcccagcagatggatcattttcttatacttatgttggaccgagtcacccaacgagcaagaaaaacaagaaatgccgtggaagactgggttcattggacattgagaagaatccacattttcaaggaccctacacttccatgggcaaggataactttgttactcctgttatacgctcaaatataaatggaaagcaatgtggtaggctgaaaaacccaaaacttatgaataggactaataattgcatttctgaatcatctttgtcttttcccaagaaatcgtctttcaaggacagttcagaacacagtcttgaaaagaattacccaagatggctcactagccagaaatctgaccttaatgtttcagggataactagtatacctgatttcaaatacccagtctggctgcacaatcaagacttgctacctgatgcaaatagtcaaagggtttatcagatatttaaagatgatcagtgttcccctagacatagtcatcaggcacaaggaacttctcggcttatcaataaattagattgttttgaatatgcttttgaaccctcaaacttttcaaattccttgagtgatgataaagaattagttaatgaatacaaatgtgattttgaacatagccagtgtcaatgtgagaatccacttctcccaggacaatccacaaagccattcagtggtgacaaaattgaattgcttatcttgaaggccaagagaaatctagagcagtgtactgaagaattaccaaagtccatgaaaaaggatgacagtccttgctcattagataaacttgaagcagacagatcatgggaaaatattcctgttactttcaaatctcctgttcccgttaactctgatgatagtcctcaacaaacttcaagggcaaagagtgctaaaggggttcttgaagactttctaaataatgataatcagacatgtataactcgaatccagatgggtattaaatatacaggggaaaggtggccctctaaagagctctctcttcatccacaagcagggagcagcagcaatgtgtacctattcatatcagggcaccaattactccagatacaaagcagagatagcatgggagtcaatgtgatctttgtggtgaagccaggcacaccagtcagcttgcccaccgtactctcagggtcccttccaaagcttccacgaagacactcagaagcagaagcaatatccctggacgactggaatagatggacttcttcacatcctgttgcttggtttcttaccctgattgtgagaaacagtaatcccacaattttctgggtatctagagaatattcaactccatatagctcacattatgaactctcaggattgcgtgaacaaccttctcaggctgagctaggtcccagggcctattttcaactagagaaggctccaggtgaatttccctag

SEQ ID NO: 2597 - DNA, 721 bp, Homo sapiens
  SIMILAR (568)..(398): 381254mologous to Chilo iridescent virus putative small basic protein,accession number AF003534,Smith-Waterman Score=63.
aacagtttctcaaggttaagccaagtcctccttgcaagttgccaaataatagcttaggaaaagaattagtctgcctgcatgatgatcttcttaggcaaaaacgtcttcacagcccttgaccttggtgaatttttttccccaaaagcatccaaaagaagaattataaaccccagaatgagatggaaataaacaagtatttttttttatgatgtttggcctgaactgtgggctttaattgggggatactgatcgtttggaaagaagtgagaaaattctgaagaaatggcggccttgggctaggcggggtcccctatttcttctgtttctcactgaagtcctactgctgagccaagactcagtcactctggaaagagcatgaccgataaagaaaacagttcctttctgatggggagcgtctgagtgcagatcatgaggctctttctctaggtttaattcttttccatggtgaccggacttggtgtcttgtagcctggttacgaagtgggacgttgagcttcactgagcgatgccgtgcatggaccagctgggatctggctggggatgccctgtgtccctagcggccataggcaatccatcttcttgagtcagcaatttctggacacccgctgttttccaccaagagctgaggtggcatcaactcagtgagcaataaacaaaatgacacagaaatgcgcagtgttgttatgaaggagcgtgtatt

SEQ ID NO: 2598 - DNA, 851 bp, Homo sapiens
tcagcagcatgcgagaaatccccggcagaagatgtcaacaagctctctcacctcctgcttatgagtttttccagggttcaagttccactgcttaacagctgtttgatcttgtgccattaatttagccaagtgaaacctcagtgttctcactgaagtcctactgctgagccaagactcagtcactctggaaagagcatgaccgataaagaaaacagttcctttctgatggggagcgtctgagtgcagatcatgaggctctttctctaggtttaattcttttccatggtggccggaacttggtgtcttgtagcctggttacgaagtgggacgttgagcttctactgacgatgccctgcatgggaccagctgggatctggctggggctgccctgtgtccctaacgacccataggcaatccatcttcttgtgtcagcaatttctggacacccactgttttccaccaagagctgaggtggcaacaactcagtgagcaataaacaaaatgacacagaaatgcacagtgttgttatgaaggagcctgtttacctgtgttcaaaatctgggcacccattccctttgagcaggggccccgctcaggagggaccaggtctgcccagtttctgtgcctgcagagagacgaagccccacgagccacaccctactctacaagaggaaagggggttggatgggaagaatctattttgctgttttggaaagcacacagccgacctacaaacctcctgtgatggtgtttcttcggatgtgtaaaataaggctttatttgtcaattccgctgtaaaataagcattgtccgagtaaaaacagcagcaacaacaaaaaaaaaaaaaaaaa

SEQ ID NO: 2599 - DNA, 593 bp, Homo sapiens
  SIMILAR (563)..(369): 811254mologous to Mus musculus put. altern. eIF-4A (aa 1- 370),accession number X03039,Smith-Waterman Score=255.
tttttttttttttttgggagaagagccggcgcctggggcaagagcctaccccaaagaaaagggtgtctaaaatgttcacggttccttcttttgcctcaaaaagtgacatttattcaaagaaaaaaaatgacaagatgtccatcccttggctcccttccctcccccctcctgctgctcctcagcccccagagattgagccctggctggggctgggtggcaggacagcccctcagatgaggtcagcaacattgaggggcatttcctcaatggaggtgttgtagaaggtctcaatgtctcgaagagtcctcttgtcttcttctgtcaccatgttaatagccacacctttacggccaaaccgtccacctcgaccgattcagcaggtcagtggtaatcaaaactctgctagagccagaacgaaactccctcataatcacgtctcgttccttttggtccatatctccatgcatggcggatacagtgaaatctcgagcatgcatcttctcggtgagccagtcaccttcctccgggtgttgatgaagatgatgctgggtgatggtcagggttcatacaagtcacatagtgtgtcaagttca

SEQ ID NO: 2600 - DNA, 635 bp, Homo sapiens
  SIMILAR (243)..(635): 931254mologous to Homo sapiens eukaryotic initiation factor 4AI,accession number D13748,Smith-Waterman Score=622.
ccagagacaatggccccgatgggatggagcccgaaggcgtcatcgagagtaactggaatgagattgttgacagctttgatgacatgaacctctcggagtcccttctccgtggcatctacgcctatggttttgagaagccctctgccatccagcagcgagccattctaccttgtatcaagggttatgatgtgattgctcaagcccaatctgggactgggaaaacggccacatttgccatatcgattctgcagcagatacagaaggtggtcatggcactaggagactacatgggcgcctcctgtcacgcctgtatcgggggcaccaacgtgcgtgctgaggtgcagaaactgcagatggaagctccccacatcatcgtgggtacccctggccgtgtgtttgatatgcttaaccggagatacctgtcccccaaatacatcaagatgtttgtactggatgaagctgacgaaatgttaagccgtggattcaaggaccagatctatgacatattgcagaagctcaacagcaacacccaggtagtggtgctgtcagccacaatgccttctgatgtgcttgaggtgaccaagaagttcatgatggaccacattcggattctagtcaagaaaggagaggtgacc

SEQ ID NO: 2601 - DNA, 483 bp, Homo sapiens
  SIMILAR (98)..(232): 1001254mologous to Homo sapiens Human secreted protein, SEQ ID NO: 5004,accession number G00923,Smith-Waterman Score=236.
gcttttgttagtaggcaccagattctgtttgctcggagactacagctcagctccaccttttccatgactcaagctttaatttctttgcatcccctagagtaactggaatgagattgttgacagctttgatgacatgaacctctcggagtcccttctccggggcatctacgcctatggttttgagaagccctctgccatccagcagcgagccattctaccttgtatcaagggtgagacctctcagtcccagaagacattgtggactgtccctgacctgggtagagtggcatctggttggtgatgcccatctcatatcagccagggacaaagcaactccttgttcatcccagcttggcttttgatccgagcccatgcctagttcatgccttggacacataggtttcctttaaagaggtggtattgtagccagcttatatttgcatctacagccatgtttctagtccagcttggtgtgcaatacta

SEQ ID NO: 2602 - DNA, 654 bp, Homo sapiens
  SIMILAR (604)..(461): 631254mologous to Mus musculus put. altern. eIF-4A (aa 1- 370),accession number X03039,Smith-Waterman Score=135.
  misc_feature (1)...(654): n = a,t,c or g
tgggagaagagccggcgcctggggaagagcctaccccaaagaaaagggtgtctaaaatgttcacggttccttcttttgcctcaaaaagtgacatttattcaaagaaaaaaaatgacaagatgtccatcccttggctcccttccctcccccctcctgctgctcctcagccccccagaaaattgaacccctggctggggctgggtggcaggacagccccctnagatgaggtcagcaacattgaggggcatttcctcaaatggaggtgttgtagaaggtctcaatgtctcgaagagtcctcttgtcttcttctgtccccatgttaatagccacacctttacggccaaaccgtccacctcggccgattctggaaaacaaggaaggggatgaggaatatcaggagctttaagcccagggagggccaggtgtgaaggggtaggggagtgttccagatctacgcttacctgtggatatagttttccctgttggtgggaaggtcatagttgatgactaaagaaacctgctgcacatcaatgcctgtggcctacgtcaagaatgacaacctcttcagcatgtgcacggaggacactctatcccggagaagaagaccttaggcatccatgtgggcagccaaggaaggcagaggaaataagcatc

SEQ ID NO: 2603 - DNA, 1591 bp, Homo sapiens
  SIMILAR (1078)..(1374): 931254mologous to Mus musculus protein synthesis initiation factor 4A,accession number L36611,Smith-Waterman Score=470.
  misc_feature (1)...(1591): n = a,t,c or g
ggcaccaggagcccacccggcgccgggcgggcgggtccattttgccgcacaagccgggctattggcaaactgcggatgggcaggtccaccttccttcgggggtgagcggcctgagatccagagacaatggccccgatgggattggagcccgaaggcgtcaatcgagaaggtnannacccccctggaatgagattgctgacagcgtttgatgacctgaacctctcggagtcccttctccggtggcatctacgcctatggttttgagaagccctctgccatccaagcagcgagccattctaccttgtatcaagggttatgatgtgattgcctcaaccccaatctgggacctgggaaaacggccacatttgccatatcggattctgcaagcagattgaattagatctaaaaagccacccaaggccttgggtcctaagcacccactccgaggaatttggctcaagcaagatacaggaaaggtgggtcatgggcactaaggagacttacatgggggcgccttcctgttcacggcctgttattcgggggggcaccaacggtgcgttgcttgaggttgcaggaaattgcagatgggaagcttccccacatcatcgtggggtaccccctggccgtgtgttttgatattgtttaaccggagatacctgttcccccaaatacatcaagatgtttgtactggatgaagctgaacgaaatgtttaagccgtggattcaaggaccagatctatgacatattccaaaagctcaagcagcaacaccccggtagttttgctgtcagccacaatgccttctgatgtgcttgaggtgaccaagaagttcatgagggaccccattcggattcttgtcaagaaggaagagctgaccccttgagggtatccgccagttctacatcaacgtggaacgagaggagtggaagctggacccactatgtgacttgtatgaaacccctgccatccacccaggcagtcatcttccatcaaccacccggaagaaggtggacctgcctcaccgagaagatgcatgctcgagattccactgtaccccccatgcatggagatatgaccaaaaaggaaccgagacttgattatgagggagttccttcctggctctagcagagttttgattaccactgacctgctggccagaggcattgatgtgcagcaggtttctttagtcatcaactatgaccttcccaccaacagggaaaactatatccacagaatcggtcgaggtggacggtttggccgtaaaggtgtggctattaacatggtgacagaagaagacaagaggactcttcgagacattgagaccttctacaacacctccattgaggaaatgcccctcaatgttgctgacctcatctgaggggctgtcctgccacccagccccagccagggctcaatctctgggggctgaggagcagcaggaggggggagggaagggagccaagggatggacatcttgtcattttttttctttgaataaatgtcactttttgaggcaaaagaaggaaccgtgaacattttagacacccttttctttggggtaggctcttgccccaggcgccggctcttctccc

SEQ ID NO: 2604 - DNA, 400 bp, Homo sapiens
  SIMILAR (175)..(345): 401254mologous to Oryctolagus cuniculus endooligopeptidase A related protein; EOPA related protein,accession number AF015037,Smith-Waterman Score=91.
ggctcccccgcacctgcggccatggatgaggagcgcgccctctacatcgtccgggccggcgaagcaggggctatcgagcgggtcctgagggattacagcgacaaggtaaagagtcctggccccgggcgtgcggtatcgcacccccgggccgccctccgtgcttgcacatcgcatccttccccacccccctcattccggggatgcgcattgctctcccccgaaaacgtttccggcttgggcatgcgtgtttgtgcccccagccttttccatccatgcatcctgcatcccactacccccactgtagcgcccactcctctgattcctggcccagcagcttgacctccggtcctcctctcaagcgtgcaagtcacacccccggaatccgtagatgtgcatctgt

SEQ ID NO: 2605 - DNA, 1173 bp, Homo sapiens
  SIMILAR (388)..(996): 1001254mologous to Homo sapiens unnamed protein product,accession number AK001482,Smith-Waterman Score=1035.
atgctaaaacacaatttaaagaaacagcaaggctcagaaccagacaaggcaaggatgtcagaattatcagaccaggaatttaaaacaactgtgatcaatttgctaagggttctaattgatagattagacagcctgcaagaacagatggaccatgtgagcagagagatagaaatcctaagaaagaaccaaaaagaaatgctaaagatcaaaaacactgtaacagaaattaagagtgactttgatggatttgcagtaaatgaggtccagagacaagtaacttgccaaggccacaattgttcagaagaagagccaagatttgcatacaaacaatttaaattcagaacttctactcttaattaccacactgatttggttttagagtctatgaaactctgtgaaggcatatttaaagtccttataaaggacatcccaacaacatgtcaagtgtcctgcctggaagtactccgcattctctccagagacaaaaaggttttagttcctgtgacaactaaggaaaatatgcagatactgctgcgactagccaagctaaatgagttagatgattctttggagaaagtatcagagttcccagttattgtggagtcattaaaatgtctgtgtaatatagtgttcaacagtcagatggcacagcagctcagcctggaacttaatcttgctgcaaagctctgtaacctcctgagaaagtgcaaggaccggaaatttatcaatgacattaagtgctttgacttgcgcttgctcttccttctgtcacttttgcacaccgacatcaggtcacaattgcgctatgagctccagggactaccgctgctaacgcagatcttggaaagtgcctttagcatcaagtggaccgatgagtatgaatcggccatagaccataatggacctcctctctcacctcaggagacagactgtgccattgaggccctcaaagctctcttcaatgtgacggtagacagttggaaggtgcataaagagaggtctccagttttggtcattgaggtatccagacccaatctcaggtggaacagaaaccagagtctttggtggcagctcttgggccagaccctaatgctcctgatgggtgctgtagtatgcacgggcagcagagagctgtggagtttgacttcctgcctggaatcaggtcctttctaa

SEQ ID NO: 2606 - DNA, 873 bp, Homo sapiens
  SIMILAR (266)..(192): 421254mologous to Homo sapiens Human LYST interacting protein LIP10,accession number Y32130,Smith-Waterman Score=50.
tccttgcactttctcaggaggttacagagctttgcagcaagattaagttccaggctgagctgctgtgcccatctgactgttgaacactatattacaccagacattttaaatgactcccacaaataactgggaaccctgatactttctcccaaagaatcatctaactcatttagcttggctagtcgcagcagtatctgcatattttccttagttgtcacaggaactaaaacctttttgtctctggagagaatgcggagtacttcccaggcaggacacttgacatgttgttgggatgtcctttataaggactttaaatatgccttcacagagtttctttcttttatcttcatctgttgattcaaatttgaaagtagccctatgcttgtcgctgtaatccctcaggacccgctcgatagcccctgcttcgccggcccggacgatgtagagggcgcgctcctcatccatggccgcaggtgcgggggagccgcggccgctctgcgcgcccaagccgctgcctccagcaaccggcgcctcacggccgcccctgacaaggcccaggactcggtcgaggcctggctagcggaccgaggcggagtcaggcccaaggccctgcttgctctcctgcgtctccctccctcggagaactgtccagtcttttaagggggctttcacagactgaaccgttcttctttcctgaccctcctctatgaatcattctcaaaggactagagcaacccggctcttccccgcccatctatgaaccagccgctaaatggactgcaattccctgcatgcaatggggctatcccgctcttccatctaatttactggcgtgccgaatggactgctgggattggtagtcatccagccgga

SEQ ID NO: 2607 - DNA, 507 bp, Homo sapiens
  SIMILAR (181)..(339): 311254mologous to Homo sapiens Human secreted protein, SEQ ID NO: 7629,accession number G03548,Smith-Waterman Score=68.
atgaactgtgcagagaggactgagggggcagcagcagaaccagcctggctggtggtgatggggacagcccaggccaatgggggtgacttgcggaagagtggagagaaaccagcaagtgcgtggccatcgcactggcttgactccagtgtgaatctttcttttcttttgaatcctaaacacatgtcccctgaagtgtttcagacagttgggatcagcagcaaccctagcagtgtttgtgcagaacccccagagctgacactgctgactgggacatgtgacctggcacccccagaagcacagaggacacttactccatctctgaaaaagctgcccacaccccacctccatccagccttccaaaagccaccacgaatgacccgtaggaggggcagagtgtgccacttgctacggaccagaacctctggggagcggggatcatctctgtgtctctctgcttcaactgcatttaaaatgaacattcttaatgataaacctttccgtgtgtaa

SEQ ID NO: 2608 - DNA, 729 bp, Homo sapiens
  SIMILAR (648)..(728): 921254mologous to Homo sapiens Human secreted protein, SEQ ID NO: 7420,accession number G03339,Smith-Waterman Score=118.
tcaaacctcagttcttgacttctgtgtacccgcaggctcaacaacacgtggaagctgccaagacttggggcttccacccactgaagccacagtccgagctgtatgtcggcccctttccaccacgctgtagcagctggcacacagggcaccaaatccctgggctgcacacagtacgggatcccttggcacagcccacaaaaccacgttttcttcctgggcctctgggcctgtgatgggaggggctggcctgaaggtctccgacatggcctggagccattttccacacccccccaccaccccccacccccaccccccgtcttggaggttaacattaggctccttgctgcttatgcaaatttctgcagccagcttgaatttctccttaaaaaaaaggggtttttcttttctactgcatcatcaggctgcaaattttccaaacttttatgctcttgtttcccttttaaaacagaatgtttttaacaatacccaagtcacctcttgaacactttgtatttcttagaaatttcttgcaccagatcccctaagttatctctctcaagttcaaaggtccacagatctgtatggtgggggccaaataccaccagtctctttgctaatgtgtaacaagagttacctttgctccagttcccaacaagttcctcatctccatctgagaccacctcagcctggactttattgttcatatcactatcagcattttggtcaaag

SEQ ID NO: 2609 - DNA, 657 bp, Homo sapiens; identical to SEQ ID NO: 2483
  SIMILAR (102)..(1): 651254mologous to Homo sapiens Human secreted protein, SEQ ID NO: 7420,accession number G03339,Smith-Waterman Score=118.

SEQ ID NO: 2610 - DNA, 774 bp, Homo sapiens; identical to SEQ ID NO: 154
  SIMILAR (211)..(315): 601254mologous to Homo sapiens Human secreted protein, SEQ ID NO: 6395,accession number G02314,Smith-Waterman Score=104.

SEQ ID NO: 2611 - DNA, 999 bp, Homo sapiens
  SIMILAR (57)..(1): 891254mologous to Homo sapiens Human secreted protein, SEQ ID NO: 7420,accession number G03339,Smith-Waterman Score=84.
atggacaataaggtccaggctgaggtggtctcagatggagatgaggaacttgttgggaactggagcaaaggtgactcttgttatgttttagcaaagagattggtagcattttgcccctgccctagagatttgtggaattttgaacttgaaagagatgatttagggtatctggtggaagaaatttctaagcagcaaagcattcaagaggtgacttgggtactgttaaaggcactcagtgttataagggaagcagagcataaaagttcagagaatttgcagcctgacaatgggatagaaaagaaaaatccattttctgaggagaaattcaagctgcctgcagaaatttgcataagtaacgaggagcccaatgttaatccccaagacaatggagaaaatgtctccagggcatgtcagaggtcttcaggcagcccttcccatcgcaggcctggatgcctaggagaaaatggttttttaggcctggcccagggtccccgtgctgtgtgcagcctagggatttggtgtactgcatctctaccactccagccatggctgaaaggggacaatgtagagcttgagccatggcttcagagggtgcaagcccccagctttggcagcttccacgtggtgggacgctcatggagaacctctgctagggcagtgcagaagggaaatgtggggtcggagcctccacacagagttcctactggggcactgcctagtggagctttgagaagagggccaccatcctccagaccccagaatggtagatccaacaatagcttgcactacgtgcctggaaaagccacagacactcaacgccagcctgtgaaagcagctgggagggtggctgtaccctgcaaagccataggggtggagctgcccaagaccatgggaacccacctcttgcatttgcatgacctggatgtgagacctggagtcaaaggagataattttggagcattaagatttactgcccctctggatttcagacttgcatag

SEQ ID NO: 2612 - DNA, 756 bp, Homo sapiens
  SIMILAR (123)..(1): 821254mologous to Homo sapiens Human secreted protein, SEQ ID NO: 7420,accession number G03339,Smith-Waterman Score=169.
atgtgggaaagtttggaacctcctagagacttgttgaatggctttgacaaaaatgctgataatgatatgaacaataaggtccaagctgaggtggtctcagatggtgatgaggaatttggtgggaactggatcaaagcgttacattttaaaagggaagcaggacatcaaagttcagaaactttgcagcctgatgatgcagtagaaaagaaaaacccattttttgaggaggaattcaagccagctgcagaaatttgcataagtagcaaggagcctaatattaattcccacgatcatgaggaaaatgtctctaggccatgtcagagacctccatggcagcccctcccatcacagacccggaggcccaagaggaaaaagtggtttcatgagctgggcccaaggtccccatgctgtttgcagcctagggacatggtgtcctatgtcccagccactccagctgtgactgaaagggaccaacatagagctcagactgtggcttcagagggtggaggccccaagcgttggcaacttccacatggtgttgagcctgcagaggtgcatggaagtcaagaattgaggtttgggaacctcctcctagatttcaaaatatgtatggaaacacctggattcccaggcaaaagtttgctgcaaggggggagccctcatggagaacctctgctagggcagtgccaaagggaaatgtggggtcagaccccccacacagaatccctactggggcactgcttagtggaggtttga

SEQ ID NO: 2613 - DNA, 675 bp, Homo sapiens
  SIMILAR (198)..(76): 801254mologous to Homo sapiens Human secreted protein, SEQ ID NO: 7420,accession number G03339,Smith-Waterman Score=160.
atgtggaagcgactttggaactgggtaacaggcagaggctgggagagtttggagggctcagaagaagacacaaaaatgtgggaaagtttggaacctcctagagatttgttgaatggctttgacaaaaattctgatagtgatatgaacaataagataaaggctgaggtggtctcagatggagatgaggaacttgttgggaaccggagcaaaggtgactcttgttatgttttagcaaagagactggagtctagggatttggtgccctgtgtcccagccactccagccatggctgaaaggggccaatatacagctctggctgtggcttcagagtgtggaagccccaacccttggcagcttccacatggtattaagcctgcgggtgcacagaagtcaagaattgaggtttgggaacctctgcctagatttcagaagatgtatggaaacacctggatgcccagacagaagtttgctgcaggagcagggccctcatggagaacctctgctagtgcaatgtggaaggaaaatgtggggttgaagcccccacacagagttcctactggggcattgcctagtggggctttgacaagagggccaccatcctccagaccccagaatggtagatccactgacagctttcaccatgtgcttggaaaagctgcagacactcaacactag

SEQ ID NO: 2614 - DNA, 810 bp, Homo sapiens
  SIMILAR (472)..(425): 621254mologous to Homo sapiens Human secreted protein, SEQ ID NO: 7420,accession number G03339,Smith-Waterman Score=49.
atgggtaagggagattctggacttcagaatggttcagatccaccaatagcttgcactgtgctcatggaaaagctgcagacacttaatgccagccatgaaagtagcaggagtggggctgtaccctacaaagccacagggatggagctgtccaaggccatggtagcccacctcttgcatcagcatgacctggatagtggggcgctgctgaaaagataccaaaaaatgttaaatcaattttggaactggataacaggcagaggttggaacagtttggagggctcagaagaagacaagaaaatgtgggaaagtttggaacttcctagagacttattgaatggctttgacaaaaatgctgatagtgatatgaacaataaggtccaggctgaggtggtctcagatggagatgaggaacttgttgggaactggagcaaaggtgactcttgctttgttttagcaaagagaatggcaacattttgcccctgctctaaagatctgtggaactttgaagttgagagagattatttagagtatctggtggaagaaatttctaagcagcaaagcattcaaggagtgatttgggtgcttttaaagcattcagttttgaaagggaaacagcataaaagtttggaaatttttcatgctgatgatgagatagaaaagaaaaaaacactttctgaggagaattctaggaggctgcatatatttgaggtgccgaatgtccctccccaaggcatgtcagaggtcttcacagcagcccctcctatcccaggcctggaggtttcagtggagaaaatgttttttgtgggctag

SEQ ID NO: 2615 - DNA, 349 bp, Homo sapiens
  SIMILAR (123)..(1): 731254mologous to Homo sapiens Human secreted protein, SEQ ID NO: 7420,accession number G03339,Smith-Waterman Score=145.
atgtgggaaagtttggagcctcctagagacttgttgaatggctttggcaaaaatgctgatagtgatatgaaaaataaggttcaggctgagttggtctcagatagagataaggaacttgttgggaactggagcaaaggtgactcttgttatgttttagcaaagggactggcggcattttgcccctgccctagatatctgtggagctttcaacttgagagagatgatttagggtatctggcagaagaaatttctaagcagcaaagcgttcaaaagggcagtttctacttactgaatcctagcattcgtcccgtgcaatgtgtttcaatgttagaaggttctatctgtgatg

SEQ ID NO: 2616 - DNA, 913 bp, Homo sapiens
  SIMILAR (57)..(1): 941254mologous to Homo sapiens Human secreted protein, SEQ ID NO: 7420,accession number G03339,Smith-Waterman Score=90.
atgaacaatgaaatccaggctgaggtggtctcagatggagatgaggaacttgttgggaactggagcaaaggtgattgttatgttttagcaaagagactggtggcatttttcccctaccctagagatttgtggaactttgaacttgagagagatgatttagggcatctggtggaagaaatttctaagcagcagagcattcaagatgtgacttgggtgctgttaaaggcattcagttttataaaggaagcagagcataaaagttcagaaaatttgcagtctgacaatgcaatagaaaaaaaaaattcattttctgaggagaaatccaaatcagctgcagaaatttgtgtaatgagcagccaaatgttaatccccaagaccatgcggaaaatgtctctaggccatgtcagagatcttcatggcagcccctctcatcacaggcctggaggcctagaaggaaaaagtgattttgtgggctgggcccagggtccccatgctgtgtgcagcctagggatttggtgccctgcatcccagccgctccagctgtggctgaaaggggccaatgtagagctcaggctgtggcttccgtggatgcaagccccaagccttggcagtgtggtgttgagcctgcagaactgtgggagaatgaactgcgattgcctgaaggcagcaagtttgtggtcatttgttatagcagccacaggacatgaatacagcccccatctgccacctgcatccatccttggcactctggtgcatgtgctccgagccaagtattacccacgtggctggctgcaaggagacagaaagcaaggacaggctgtgatacctgagcaggaagaaggacaacagggaaacagaagacctattgcactgatgagaaggagaagggagagacctgcctttacagcacaat

SEQ ID NO: 2617 - DNA, 433 bp, Homo sapiens
  SIMILAR (250)..(194): 731254mologous to Homo sapiens Human secreted protein, SEQ ID NO: 7420,accession number G03339,Smith-Waterman Score=72.
atgtggaagagactttggaactgggtaacaggcagaggttgggacaatttggagggctcagaagaagacagaaaaatgtgggaaagtttgaaacttcctagagacttgttgaatggctttgcccaaaatgctgacggtgatatggacaataaggtccaggctgaggtggtctcagatgaagatgaggaacttgtggggaactggagtaaaggtgactcttgttatgttttagcaaagagactggcggcattttgcccctgccttagagatttgtggaactttgaacttgagagagatgatttagggtatctggtggaagacatttctaagcagcaaagcattcaagagattagttgggttaattgggacatgatttccaggttccctatagaagccatggaccacctttctggtagcttagattttgtttcag

SEQ ID NO: 2618 - DNA, 927 bp, Homo sapiens
  SIMILAR (549)..(415): 731254mologous to Homo sapiens Human secreted protein, SEQ ID NO: 7420,accession number G03339,Smith-Waterman Score=169.
  misc_feature (1)...(927): n = a,t,c or g
atggtcagaaggggaaaggaggaagtgagaagaaagaaacagggaaatgttgtttgtagtaagagaactcccattttcatcagtggaactggacaactacactggtccaattcaggcaaatggatagagttcacagcaccaaaccagtccctagccacttctaaaggaactaggtgcacccacaactttcctggggtgactaaacctggctggacccctaactcagggcagcccagacctctaggcttgttagaagcccatgagatattccagcatgaaaagcctttccaaacaagtaaattggtacgagagtggggtgttgctgaaaagatactcaaaaatgtggaagcaactttggaactgggtaacaggcagaggttggacagtttggagagctcagaagaagacaagaaaatgtggggaagtttggaacctcctagagacttgttgaatggctttgacaaaaatgctgacagtgatatgaacaataaggtccaggctgaggtggtctcagatggagatgaggaacttgttggggaccagagcaaaggtgactcttgttatgttttagcaaagagacttgcagcattttatccctgccctggagatctgtggaacttggaacttgagagagatgatttagggtatctggcggaagaaattcctaagcagcaaagcattcaaaaggtgacttgggtgctgttaaaagcattccatttaaaaagggaaacagagcatgaaagttcagaaaatttgcagcctgacaatgcagtangaaagaaaaatccactttctggagagaaattcaagccagctgcagaaatttgcataagtagcaaggagcctaatggtaatacccaagaacatggagaaatggctccaggccatgtcagagaccttcaggcagtccttccatcacagggctaa

SEQ ID NO: 2619 - DNA, 753 bp, Homo sapiens
  SIMILAR (655)..(750): 871254mologous to Homo sapiens herpesvirus associated ubiquitin-specific protease (HAUSP),accession number Z72499,Smith- Waterman Score=146.
atgattgaaatagacacagaattttgggctctagtgatgtccctgctctctggtcaggcatttcaagatccttgtatccagggaccacagggcacgaacagagtgactgtggtgtttcctgtggtcactgcagtgccaagcatagagcctatccacaggaaacatatttgtagaaggactgaaagtactcaagaaaggaggcctcataccccagaagacctccggctttccagcactgccttagaagagtcagtgtggactcctggagcaaagagactggcagcattttgcccctgctctagagttctgtggaactttgaacttgagagagatgatttagggtatctggtagaagaaattgctaagcagcaaagcattcaagaggaagcagagcaaaaaagtttggaaaatttgcagcccgacaatgaaacagaaaagaaaaattcattttccgaggagaaattcaagcctgctgcagaaatttgcataatgagtaagcgagttttcatgagatctgatggtttcataaggggattttcaccttttgctcagcgcttctccttcctcccatctccttcctgttatcatgtgaagaagggtgcatttgcttccccttctgccatgactccccggcccccggcggcggcggccagcatgaaccagcagcagcagcagcagcagaaagtgggcaagcagcagctgagcgagcccgaggacgtggagatggaagctggagatacagatgacccatga

SEQ ID NO: 2620 - DNA, 1038 bp, Homo sapiens
  SIMILAR (555)..(421): 731254mologous to Homo sapiens Human secreted protein, SEQ ID NO: 7420,accession number G03339,Smith-Waterman Score=169.
atgatgccaacccaagacaggccccgcacaagctggatggggcacaacagggactgggtggtgcccatgactgagctgaagtctagaagtcatggtgtagagggtggggacagtcaaatccaggctttcatttggtctcttttcgaatcagaagacccagaaaacttggatccacttctggctctcatccctctgggcagtgtgatttggagcgactgtcacttcttgtgtggattactgcaatgttcccctaacccttctgcctctggccttgcccggaggtctaatctcttcacaggtaccgctttgcagtctggcagctttcctattgcactccgaggacaagctgaacgcctcgctcggatctacgaggcctgcagaggttggaacagtttggagagctcagaagaagacaagaaaatgtggggaagtttggaacctcctagagacttgttgaatggctttgacaaaaatgctgacagtgatatgaacaataaggtccaggctgaggtggtctcagatggagatgaggaacttgttggggaccagagcaaaggtgactcttgttatgttttagcaaagagacttgcagcattttatccctgccctggagatctgtggaacttggaacttgagagagatgatttagggtatctggcggaagaaattcctaagcagcaaagcattcaaaaggtgacttgggtgctgttaaaagcattccatttaaaaagggaaacagagcatgaaagttcagaaaatttgcagcctgacaatgcagtagaaaagaaaaatccactttctggagagaaattcaagccagctgcagaaatttgcataagtagcaaggagcctaatgttaatacccaagaacatggagaaatgtctccaggccatgtcagagaccttcacggcagtccctcccatcacaggcctagaggaccagaaggaaaaagtggcctggggtccctgtgctgtgtgcagcctagggactttgtgccctgtgtcccagccactccagctgtggctgaaaggggctaa

SEQ ID NO: 2621 - DNA, 456 bp, Homo sapiens
  SIMILAR (90)..(1): 701254mologous to Homo sapiens Human secreted protein, SEQ ID NO: 7420,accession number G03339,Smith-Waterman Score=105.
atgtgggaaagtttggaagctcttatagacttgttgaatggttttgaccaaaagcctgataatgatatgaacaataaggtccaggcaaagagcctggtggcattttgccaccgccctagagatttgtggaactttgaacttgagagaggtcatttagtgtatctggtggaagaaatttctaagcagcaaagcattcaagatgtgaccggtgctgctaaaggcattcggttttataaggaaagcaaagcaaaatggtttaagagcaactcgtcttcatttgacagtaagggatctggaactggtcacatgggtgcccaactgggtaacatctcccagactcccttgcagttagatgcagatgtgaccacatgttctgagtggaataatgaacaaagagcatcatcttggatgatgaaggcaagacgacccactggggatggtggcgtggagagctag

SEQ ID NO: 2622 - DNA, 882 bp, Homo sapiens
  SIMILAR (265)..(456): 511254mologous to Homo sapiens Human secreted protein, SEQ ID NO: 6395,accession number G02314,Smith-Waterman Score=142.
atggcaccagcatctggtgagggcttcaggaaacttctgctcgtggtgcagggggaaggaggagccctgagtgtagagatcacatggcaagagagaaagaaaaggggtgccagtgtcacccaacaatcagatgtcactggaactaatagagaattccgcgacaaatgggtgagtttccctgcacaagctgtctctttgcctgctgccattcatgtaagacatgatttgttcctccttgactttgccatgattgtgaggtctccccagccatggggaactatacctgaaaatgtggaagcgactttggaactgggtaacaggcagaggttgaaacagtttggagggctcagagaagacaggaaaatgtgggaaagtttggaacttcctagagacttgttgaatggctttgacaaaaatgctcatagtggcatgaacaataagatccaggctgaggtggagacaaggaacttgttggaaactggagcaaaggcccagcggcctaggaggaaaaaatggtttcatgggctgagcccagggacctcttgctctgtgcagactatggacttggtgtcttgtgccccagccactccagccagagctaaaaggggccaagacttatgcctgcatcgtcctccttttgaccctgctgctagtggagaaatgcctgtgaccaactcttccaaaaactggcttaagctatttgagaggttttggcgaactttctttcaatgggcttttatcttttcttatggaactcatcctattctacttgtactatatggtaaacttgcttttctgacccttctgattggattacagaagacagagactctgtcttactttgggccacgaagtgaccagcacatagaaggtggccaatag

SEQ ID NO: 2623 - DNA, 1190 bp, Homo sapiens
  SIMILAR (57)..(1): 891254mologous to Homo sapiens Human secreted protein, SEQ ID NO: 7420,accession number G03339,Smith-Waterman Score=87.
atggacaataaagtccaggttgaggtgatctcagatggagatgaggaacttgttgggaactggagcaaaggtgactctcgttatgttttagcaaagaaactggtggcatctctcccctgccctagagatctgtggaactttgaacttgagagagatgatttagggtatctggtggaagaaatttctaagcagcaaagcattcaagaaaagaaaaacccattttctgaggagaaattcaagccagctgcagaaacttgcataagtaacagggaaccaaatgttaaatcaccaagacaatgggggaaaatgtctccatggcgtatcagagatcttcacggcagcctctcccatcacaggcccagaggcctaggagaaaatggtttcgtgggccagggacttggtgccctgcatcccaaccactctaatcatggcttcagagggtgcaagcccaagccttggcagcttccacgtgatgttgagtctgcgagtgcacggaagtcaagaattgaggtttggaaacctccgcctatatttcagaagatgtatggaaacgtctggatgcccctgcagacgtttgctgcaggggcggggtcctcatggagaacctctgctagagcagtgcagaagggaaatgtggggtgggagcccccacacagagtccctactagggcaccgcctagtggagctctgagaagagggcctctgtcctccagaccccagaatggtagctccactgacagcttgcaccatgtgcctggaaatgccacactcaatgccagcccatgaagggaacccaggagggagcttggccctggaaagacacaggggcagagctgcccaagacccttggaacttacctcttgggacacgccgacccggatgtggaaaccggggaccaaggaggggatttccagcccttacaagtaggcgttcgggaaaacaacacggctttgctgtatgggacaagtgaaaaggcttgtggcggagtctacacccttggactgagatggtcaaagggctactggtgtctgctcagaaggtctggagcacagacccgagggtggacgtgccagagtcagggaggggccacttctgggaggagggtgtccatgcagacccctaccctggggactggtgatccagaactctgcagcagcaattgggaaatgggcaaagacagcggattctag

SEQ ID NO: 2624 - DNA, 1278 bp, Homo sapiens
  SIMILAR (256)..(134): 781254mologous to Homo sapiens Human secreted protein, SEQ ID NO: 7420,accession number G03339,Smith-Waterman Score=157.
actcatacagtaaattggtaccagtagagtggggtgttgctgaaaagatacctgaaagtgtggaggtgactttggaactgggtaacaggcagagggttggaacaatttggagggctcagaagaagacaggaaaatgtgggaaagtttggaacctcctggagacctgttgaatggcattgacaaaaatgctgatagtgatatgaacagtaaggtccaggctgaggtggtctcagatggagctgaggaacttgttgggaactcgagtaaaggtgactcttgttatgttttagcaaagagactggcagcatttttgcctctgccctagagatttgtggaactttgaacatcagagagatgatttagggtatctggcagaagaaatttttaagcagcaaagcattaaaaaggtgacttggatactgttaaaggcattcagttttaaaagggaaacaagagcataaaaggttggaaaatttgcagcctgatgatgcagtagaaaagaaaaaccccttttttttaaggagaaattcaagctggctgcagaaatttgcataagcagcaaggagccaaatgttaatcaccaagacaatggggaaaatgtctgcagggcatgtcagaggtcttcacagcagctcctcctgtcacagacctggaggcctagaaggaaaaaatggtttcatggtctgggcccaaggcccccttgctctgtgcagcctaaggacttggtgccttgcgtcccagccactccagccatggctaaaaggggccaaggtacagtttgagccattgcttcagagagtgcaagccccaaggcttggcagtgtccatttgttattgagcctgcaggtgcacagaaatcaagaattgaggtgtatggtggctgatgaaatgggtctaggaaagacaatccaggcaattggaattacttacttctataaagaggaatggcctctgttaatagtggtcccttcgtctctgaggtacccttggacagaagaaattgaaaaatggatcccagagctaagtccagaagaaatcaatgttattcagaataaaactgatgttagttggatctcagactgctgtgctagcaatgagcgaggctctgtgggcggaggaccctccgagccagttaacaggagtttagagccacacctttccaatcttcttgtccttttctgcctagtagatcacaaagcagctattacggttccagatttggcatcattgcgtgatgcaggaagaaaggaagaagacaaaacgacatgtgctaactga

SEQ ID NO: 2625 - DNA, 1110 bp, Homo sapiens
  SIMILAR (244)..(417): 641254mologous to Homo sapiens dJ776P7.1 (Novel protein),accession number AL121993,Smith-Waterman Score=159.
gctggttatgtcaagcaagatctgaggatctgtctgatattgcttctctaaaagccttataccaaacaggtgttgataactgtggtcgaacagtgatggtggtagttggaagaaacattcctgtaacattaatagatatggacaaggctctcttatatttcattcatgtaatggatcacattgctgtgaaggagtatgtattagtgtattttcacaccctgaccagcgaatacaatcacctgggactccgacttcctgaagaaactctacggatgttgttgatgtcaagtacaagagggaattttgaaggctgtttattttgttacatcccacatttcgtttcaaagggtgtcaacatgggtttttttaccaactttttctgtctcaggactgaaggacaaaatccaccatgtggaccagcctccaccagctgttttctgccatatcaccagaacagattgactttcctccttttggtccttggaatatggatgccaggggaaaacgggccttactatacatcatatcccccatcaccagatttgtgaccctgcccatctttcagtgcttcttggttcccaggatgccacttcctccacgaatagctacctgttgaagtgatattcattgttgctgtacagatccagagagccttttgtccccacctctctggtatttttttattgactgtatattttctggcacataagcaatcttaaaaatggtaggccattctgaactgcacacattttaaatttgtatatttatatgaaatggaaatgttcatttttagattgttaatagaaattggggagcaacttttgagtatctttagtttcctgaaggacaccgaattctccattagataaaccaccaagactgttcacatcatctctctaacattgcacgcttcctttgtgtacttaagtgattctcgaaatatacagaaccaatgtatgctaaccagatgcattgtttgcttcagatccatggtgttaataccatgtatattttataaagataatttggctgtgttaaaagagaattacctgagtccaagaatgtggaaatgtatctgacaaaaaacatcaaaatcattagcaaaacata

SEQ ID NO: 2626 - DNA, 534 bp, Homo sapiens
  SIMILAR (530)..(477): 721254mologous to Homo sapiens PRO0898,accession number AF130051,Smith-Waterman Score=79.
cttcacaaaacctccaccaggctcaaggttctcccactggacctcccacgagcttcccaggtgggggcggcagagggggctcaacgcatctgtgagcacagtggggaccaggaaagggtgaaggagatgctggcgctgtcttggaagttaagtagggcttaaacctgaggaaatggaggatcagaggttgagtgacctgcccaagaccacccagctaccagtcagccaacaccctgggagggagatggttttgggatgattcaagcacattacatttattgtgtagtttatttctgttattcacacttttagggccactgtcatttgcagtctcaagcagttgatcctcttctagcacagacaaaggtgattcgcgtggcttatccacaaatgggtcacagatccattccttcccagtttggggttctttggtggttgggaagtaacgctcaagctcttttgaaagctgaggtaggggccgggcgcggtggctcacgcctgtaatcccagcactttgggaggtggaggcagcag

SEQ ID NO: 2627 - DNA, 270 bp, Homo sapiens
  SIMILAR (1)..(150): 671254mologous to Homo sapiens Human immunogenic prostate tumour protein sequence SEQ ID NO:379,accession number Y82018,Smith -Waterman Score=170.
atgaagaagcatggaagtaacaacatgggattatcagaaaacttgactgatgctgctggcaatggtgttgatgaactaattccacaaagaaagagtgaaaaacctgaaaatcagcaatttcctaggacagagaatgagaagtatcaaagaagcaagctgctcacactgatgctggttgatcaggtagccattctctcccactcggaatactgcaataatgttagaactgtttttcctgctaccccacttcctgagaccatggtctactag

SEQ ID NO: 2628 - DNA, 381 bp, Homo sapiens
  SIMILAR (14)..(97): 481254mologous to Phycomyces blakesleeanus chitin synthase,accession number AB003120,Smith-Waterman Score=60.
atgcccaatgcaggggaaaaaatccatatttcagttctggaaaagattcagaatgcccaatttaacatgggagtgtgtggaacaggtgacgctgttgatgaagctgctgttgagaagacccaagtaattgagactcggtctgtgggcttgttatcggatcactccactgttttccacactttaatcagtcttttccaggactcgtcatccttggcagccccaactcctgcctgtcaggccaagcagccaccaattaagaaagcgttcaagctcaacacccacctttcaagctcaagtctccctttgcggttgctacaaccaccaagggctcatcctcttctcctgtctgccctcatgtcctgccaatcaggagccttttaa

SEQ ID NO: 2629 - DNA, 642 bp, Homo sapiens
  SIMILAR (273)..(449): 501254mologous to Homo sapiens Human secreted protein, SEQ ID NO: 6812,accession number G02731,Smith-Waterman Score=132.
atggggaaaatgtctccaggccatgtcagagactttcatggcagctgccaccataacaggcctggaggccctggaggaaaaagtggtttcatgggccaggcccttggtcctggtgctgtgtgcagcctagggacttggtgctctgtgtctcagccactccagccatggctgaaaggggccaatgtggagctcaggctgtggcttcagagggtggaagccccagaccttggcagcttccatgtggtgttgagcctgcagatttcagaagatatatggaaacacctggatgcccaggtagaaatttgctgcaggggcggggcccttgtgaagaacctctgctggggcagtgtggaagggaaatgtgaggtcagagtccccacacagagtctctactggggcactgctagtggagctgtgagaagagggccaccatcttccagaaaccaaaatggtagatccactgacagcttgcactgtatgcctggaaaagacactcagcgccaacccatgaaagcagccaggagggaggttgcaccctgcaaagccacaagggcggagctgcccatgaccatgagagcccactttttgcatcagcatgacctggatgtgagacctgagtcaaagatcattttggagctctaa

SEQ ID NO: 2630 - DNA, 1164 bp, Homo sapiens
  SIMILAR (559)..(1161): 841254mologous to Homo sapiens putative p150,accession number U93563,Smith-Waterman Score=832.
atggctgaaaggggccaatatagagctcaggctgtggctacagagggtggaagccccaagccgtggcagcttccatgtgatgttgagcctttttcagaaagcctgagctcctggggcaagaagtttctcttgggaaacaagatggatgagtactttaaagaagaaatagtggctgcaatgggcctaaggctgaaagatggtaaaataaatctgcttactgccaagattcatggtccagcaggattggtctccactagcaaaagggttgacagacagcatgtggaaaatcaggtcactcccaccctaatactgcgtttttccaacggtcttagcaaacagcacaccaggagattgtatactgcagcaggcttggagggtcctacacccatggagcctcaatcattgccagcacagcagtctgagatcaaactgcaaggcggcagcgaggctgggggagtggtgcccaccattgccgaggctagagtaggaaacaggtctggagtggacctccagcatactccaacagacctgcagctgagggtcctgactgttaggaggaaaactaacatacagaaaggacatccacaccaaaaccccatctgtacatcaccatcatcaaagaccaaagtattggaagttctggccagtgcaatcaggcaggagaaagaaataaagggtattcaattaggaaaagaggaagtcaaattgtccctgtttgcagacgacatgattgtatatctagaaaaccccattgtctcagcccaaaatctccttaagctgataagcaacttctgcaaagtctcaggatacaaaatcaatgtgaaaaaatcacaagcattcttatacaccaataacagacaaacagagagccaaatcatgagtgaactcccattcacaattgcttcaaagagaataacatacctaggaatccaagttacaagtgatgtgaaggacctcttcaaggagaactacataccactgctcaatgaaataaaagaggatacaaacaaatggaagaacattccatgctcatgggtaggaagaatcaatattgtgaaaatagccatactgcccaagataatttataaattcaatgccatccccatcaagctaccaatgactatcttcacagaattggataaaactactttaaagttcatgtag

SEQ ID NO: 2631 - DNA, 471 bp, Homo sapiens
  SIMILAR (9)..(95): 751254mologous to Homo sapiens Human secreted protein, SEQ ID NO: 6395,accession number G02314,Smith-Waterman Score=103.
atgtggaagcaactttggaactgggtaacaggcaaaggttgggacggtttgcagggctcagaagaagacaggaaaatgtgggaaagtttagaatctcctagagacttgttgaatggctttgacaaaaatgctgatagtgatacgaacaataaggtccaggctgttccagccatggctgaaaggggccaatgtatagctcaggctgtggcttcagagggtggaaaccccaagccttggcagcttcaacgtggtgttgagcctgcgagtgcaaagaagtcaggaattgaggtttgggaacctccacttagatttcagatgtatggaaactcctggatgcccagaaaagccacagacactcaatgccagcccgtgaaagcacccaggagggtgactgtaccctgcaaagccacaggaacagagctgcccaaggccatgggaacccacctcttgcaaagtgcgacctggatgtga

SEQ ID NO: 2632 - DNA, 1099 bp, Homo sapiens
  SIMILAR (19)..(417): 261254mologous to Saccharomyces cerevisiae Dbm1p,accession number U07421,Smith-Waterman Score=95.
atgatacctcccaagcagccacgacagcccaagggagctgtggacgatgccatcgcctttggagggaaaacagaccaagaagcacccaatgcttcccaacctacaccacccccactgccaaagaagatgatcataagagccaatacagagccaatctccaaggacctccaaaaatccatggaaagtagtctttgtgtcatggctaatcccacctatgatatcgaccccaactgggatgccagcagtgctggttcttccatcagctatgaactcaaaggactggacattgagtcttatgactccttggaaaggcctttgcgcaaggagagacctgtcccctcagcagcaaacagcatttccagcttaaccactctcagtattaaggatagattttccaacagcatggaatccctctccagccggcgtgggccctcttgcagacagggccgaggcatccagaagccgcagagacaagcactttatcgaggacttgagaatcgggaggaagtagtgggtaaaatccgaagccttcatacagatgccttgaagaaactggctgttaaatgcgaagaccttttcatggctgggcagaaagaccagctccgttttggagtggacagctggtcagacttcaggctaaccagtgacaaaccatgttgtgaggcaggtgatgcggtttactatactgcttcatatgcaaaagatccacttaataactatgcagtcaagctggcagaaagtcacacgatcagccgttcttcacctcctctgataagcattaaagagctgctgatgatgatagaccttctctcccttgtcagttctgaggttataaaagaaaaaaaggctcaacgccacatggaagctgccaaggcttggggcttgcaccctctgaagccacagcctgagctctacagtggcccctttcagccatggctggagtggttaagatacagggcaccaagtccctagggtgcacacagcagggaaggccctgggcccagcccatggaaccatcttttcctcctaggcctctgggcctatgatgggaggggctgccatgaaggtctctgacatggcctggagatattttccccat

SEQ ID NO: 2633 - DNA, 182 bp, Homo sapiens
  SIMILAR (80)..(166): 331254mologous to Xenopus laevis pleiotrophic factor- beta1,accession number D42059,Smith-Waterman Score=48.
gtgggcacgatggaatcaatcacaagcgtccttataagcgggaagaagaagcgtcagactcaggcgatacgaagatggaagtggtgattgcagtgatacacgatcaaaagccaaggtcacaaggcccttgggtgagaggtgccgtccctgtccctggaggaaggagcatccttgtctcttaa

SEQ ID NO: 2634 - DNA, 231 bp, Homo sapiens
  SIMILAR (48)..(4): 601254mologous to Homo sapiens putative intermediate filaments interacting protein,accession number AJ242655,Smith- Waterman Score=56.
tcacggggtagctccagggaccagcagctccggcagggacccccagggaacagggctgcctgccaactgggaccccaaaggctgctggtgagcccagggcaaggccgctgcacctgcgccagggatgcttgaaatccaccgaaaggggacagccacgtgcttcccctcagggatggagaccctgagttgggtgtggacctcaacacttcatgaaagtgaaaactgaaagtg

SEQ ID NO: 2635 - DNA, 530 bp, Homo sapiens
  SIMILAR (216)..(263): 621254mologous to Homo sapiens Alzheimer's disease protein encoded by DNA from plasmid pGCS3282,accession number W21579,Smith- Waterman Score=54.
atgagctatgggcaggcctgtggtgtatggggacacctggacgatggaagctgggaatgtgctctgcttgaaagccctgacatcaagggtcattctgattttgctgagccagagcaaaggagaccctgtctgaaggaagaggaaggaatgtttaccagtatccttggcctctacccactagatgccagcagcactctcctggcccccatccccaagtttcagcaaccaaaaatgtctctagacattgccaaatcttccctggagtttccaaggcacctctatgcagatgactcacaagctccggaccactcatccaactgcggttctgacatctccatccagatgccccaaaggcactcaagcccaatatgtacaaaatcgacttctcgatctaccccaatgaactagttctctaggtctcggggcaaagcttcccccttcagaagccttagtcataaaaaacctaatctccccagccctcaccgacgcggggtcgacggaatccggacggacagcagtgtagggtctct

SEQ ID NO: 2636 - DNA, 478 bp, Homo sapiens
  SIMILAR (61)..(333): 291254mologous to Caenorhabditis elegans contains similarity to LIM domains,accession number AF039720,Smith-Waterman Score=74.
atggacgtagctagcatgggcagtgttatgacaagtgttgatgaaaaactgcaagaactgagatgcttccatgttctaggcctctggtgcaagaaggtagaagattgttggaattgccgatttctaacctgctcccagggaatcgcagttaaagttccccatggcggagttgttgtcagcagacgtgatctaaaagaattgctaaaagatgttcttaagacaaaagggaaatttatatcagaagaaaacttgacattaggaatgaaagaagataaacagaaatgttaccaatctctcttttgccaagagaggcttacagtggactacaggcagcagcagcagtcaaagaatgactacgggagacaaaggccttattgagattttaccaattgtcccaataatgtccttcacaggaaaagaaaagccacgaacactgaacgcacttatttgtggcatctttaatctgagtaattcctaa

SEQ ID NO: 2637 - DNA, 616 bp, Homo sapiens
  SIMILAR (203)..(598): 851254mologous to Homo sapiens dJ687F11.2 (novel protein),accession number AL117334,Smith-Waterman Score=596.
ctgcagtcgacttcggcaggttcagagcatcctgacccagagcagcaagtctcggccggatgggatcctctgcatcctaggaatcgatagcaggtacaatgaaggctgcagagagctggcaaattatcttctatttggtttgtacaatcagaataccagtgattttgagaaaacgggattttctgaagaagtactagatgatgtaattatattgattaaatcggatagcgtccatctgtactgtaatcctgtaaactttcgctatctcttaccttatgtggcacattggagaaatctgcatttccactgcatgaccgaaaatgagtatgaagatgaagaagccgcagaagaatttaaaattaccagctttgtggacatggttcgagactgtagtagaattggcattccttacagctcccaaggtcacttgcagatatttgatatgtttgtggtggagaaatggccaattgtacaggcctttgcacttgagggcattggaggggatggattttttaccatgaaatatgagtgctttgaggtgtggagcagtttggcctacagatgggctctgccagtgccctctctactccactctgatggcctgatgactgcctga

SEQ ID NO: 2638 - DNA, 713 bp, Homo sapiens
  SIMILAR (128)..(286): 301254mologous to Human herpesvirus 6 25.6 1040187392dentical to U1 gene of strain U1102 of HHV-6,accession number AB021506,Smith- Waterman Score=86.
tttttttttttttttttttcagcctggtgcctttagagctaggatttagtttctattctttctgtctcattttcaagtgatttttttcttcaaatggcatctactgggctcaagaactggagattcccacaaagctgagattcacatgggaattttgtacacacccacacaggtatacacttccatttacatgcagacatccacccacagatacacacatccggagaccaagacagaacacaaactccaccataaaagcacggttccccgaacaggagaaacgcaccattcattccagggaggtagagccacggattccttcatccctccatcacattgaggatgcttatcaagacttccccaacaatggggacagggatattatcaaatacttgcagttcaccccaaaatgctcaccctcttcgttccacctgcacatgaccttcagctcaaagacatttctagtcctccaggtactaggggtggctctgggctcagcactaaagacactgaccctggtaaagccacagtctagcaatgacagtcaaccacgtatcagcaacagccctgccccacacgtgctgactgcgcacaaggccggcgctgtgaacgtgctctcaacagtgatctcactgaaccctcatggcagctctaggatgcagacagtagcatcacattatccccattttacttttgaggaaactgaggcctga

SEQ ID NO: 2639 - DNA, 882 bp, Homo sapiens
  SIMILAR (73)..(405): 321254mologous to Homo sapiens ApoE4L protease,accession number R59841,Smith-Waterman Score=85.
atggctgacatcgagatgactctgagtacacaaggtgcgaagttacaggagacagaggctctctcggatctccaggtaaacacacgcagctgctcaggaaggcagcctgatccaggagcctgcaggagcctgagtcctacccagatggtcagccaaatgtgggccttctcatgctccacgtgtaaacgtaactcaccaaacagggcccctgctgctttccgggccaagtcagtggagaggactgaaggccggctcacagctaggaaagcagggctctgccgcgccgagggaatgggtcccaggtctctttcaacatcagtaggtttgtggctcaagtcaggaagcacgtcagccctgagacctgcaaaccgaatcccacagacagttctagagggtgttcctagtccccattatgagcaaaagtcgccacttcactgtgttattcgaggagggaaaagtagatacgatgatggaggcatatttgaggtcgatatgagaaagttcacgctcacaaacacagctgtgcataacgggaatggctattttatgagggaccaggtaaccatcctgtgcctagcaggtaacaaagtctggctgcctcaaactcagaacatccttgcaacactgttacacccactgatcttccaagttcaccttcacaaatgtgcaagggatgagggggacaaagaccaagtcaccagcaccactcctgatcccccagattccagcccaggtggtagcctgggacctactgtgcagaaggacacacaggtctcccttgatgatgtggcaaactgcaaggaccaagcacagaggcacctggacaccaacccttccctgcgagccacatggccagtcaaacgttctggttaccggggatga

SEQ ID NO: 2640 - DNA, 507 bp, Homo sapiens
  SIMILAR (94)..(381): 301254mologous to Rattus norvegicus ORF,accession number X95272,Smith-Waterman Score=93.
atggtgcaacaaggagaacaacctggagaaagcatgtttgctggtgatcggcctgggttcatgcgagttcagcaagcagttaccatgtctacggcatgccaggatactgttgggaaggtagtattccgtgtacgtgagacctgcacccaggtttctttaagtgcttgtcaaatgaaggaatcagcttctcaggctgcatcacgagcctgtaggatttggatccgtgaaatgtatgtgagatcaccaagcataatgctccccagtgaaaacaggactcatcgaatgccaagacgctcagtcatggttgattaccagaccacagaaaacctggcagagctggcacgatccactgagtcctcctccagggagccttccctgctgccctgccccttgactggcttaggtgccactattcagcgctactacaatagctggtgctcatttctgtcgttgtacttaacaacagctgctgctgcccatgggggctcccttggtgccagacactga

SEQ ID NO: 2641 - DNA, 333 bp, Homo sapiens
tcagagaaccaagaaatgtagcaggaaatccgcagaaaaaaacctctcagacactgagttgtagaaggaagggcttattcagctgggagcatcagcaagctactgctttaaaatcaaagctctccaaatgcacgatttctgtcctttttaaaggctcacaacgctaaagatttccatgaaaggaacatttttgtcattacaaacagaaatcaaaacaaaagtgtgctgcttcttggccagaaggacagggctgatggctacggacttcccataacctgggatgagaactcccgcagttctccccctttgtgtcgaatggtccaggggaactga

SEQ ID NO: 2642 - DNA, 446 bp, Homo sapiens
  SIMILAR (156)..(239): 421254mologous to Chlamydomonas reinhardtii putative copper chaperone Cox17,accession number AF280543,Smith-Waterman Score=59.
agagaaaggaaagagaaagctaaatttgataagtgcgagagagagagaaagggaaaagaaggaaagaaaggaaagaaagttaaatgtgataagggctggcaacactggagggtctctgcctctcaagactcagccttgttcacagttcagtcctgcctcaagggcctgggctggtgctgtaccctggtccgggttggccctcaccggcccccaccccggctctggctccttgccacccctctctcacagtactgatgtttaaaacacatacgggccctgggggacacgagcacgggctcacggaatcccacgaaagcaggccctacttcagccccggcccttatgctgccccacccctagctgagtcctgcctcaggacctttgctccggatgtaccctcgtccacgttcgccctcattggccctcctcgagctctggctctctag

SEQ ID NO: 2643 - DNA, 327 bp, Homo sapiens
  SIMILAR (132)..(25): 441254mologous to Hordeum vulgare CMa, component of tetrameric alpha-amylase inhibitor,accession number X69937,Smith- Waterman Score=76.
cgatatgattatctgctgatggccctcctccggacagccccacctgtcactgcccctggaaagctcaccccaatctggatgcggtctcaagccctcaagccaaagcagggcttcccaggtacagtttccaggctctaccagggtcttggctcagagaagacatagcactgccctcatgtgaaaagttaagcaactgagggtggtctccaaatgaccgtcagcaagaaggccctcattctacgaagccacaggaattgaatcctgccaacaaccttgtgagttgggaggcagatcttttcccagtctagacttcaggtgagacaccag

SEQ ID NO: 2644 - DNA, 327 bp, Homo sapiens
  SIMILAR (134)..(27): 441254mologous to Hordeum vulgare CMa, component of tetrameric alpha-amylase inhibitor,accession number X69937,Smith- Waterman Score=76.
tgcgatatgattatctgctgatggccctcctccggacagccccacctgtcactgcccctggaaagctcaccccaatctggatgcggtctcaagccctcaagccaaagcagggcttcccaggtacagtttccaggctctaccagggtcttggctcagagaagacatagcactgccctcatgtgaaaaggcaagcaactgagggtggtctccaaatgaccgtcagcaagaaggccctcattctacgaagccacaggaattgaatcctgccaacaaccttgtgagttgggaggcagatcttttcccagtctagacttcaggtgagacacc

SEQ ID NO: 2645 - DNA, 837 bp, Homo sapiens
  SIMILAR (784)..(551): 971254mologous to Homo sapiens bA6J24.2 (A putative novel protein),accession number AL136231,Smith-Waterman Score=382.
ttaaaaggttaaacatacagttaccacattgaaatgggaaaagctcctttgtccccctctcaggacgtgcgatgggggtgtggctcgcttcttcagtgctccgctgctcaaacctctagaggagcagacagacgggggcaggctgtggggttccgaccccatagcactatctaggggtgaatgtttacagcttgtgaagccccagtgggtgtgttttacagtttgccgtctataggtggcttgtgttagctcaattagaccctctaccatgtcgcaaggacagagggctttctgtacccccgggtttcttgccttggtgtactggaagaataggatcacacatgggcttggagaatgagtgtgaggttttattgagtgggggtagctttcagcagatgggggagccagcagggagatggttttcccctggagttgggccactcggcagccccggctctcttccaactgccccggccaaactccgtgtcgttctgccagtgccaatgtactcctctcgatgtccagccgcttctgtctctgccttgctagggtctccgttttccaaaaggtctactacagctccaggatctactgcactttcaaataccttttcaaatctcatgctctcctgaatcataatggggaacgcagagggaaagctgttggtctccaggtactgattcatgaggtagaccccgaggtacacatcttgtttgccaggcaggaacactcctgggcaagaaatcgcccggatctgcagctccaccaccacctccagaggcatcgttccctgcgtgggcgaaaggactggaatgagaagatccttttgtgccgagc

SEQ ID NO: 2646 - DNA, 1452 bp, Homo sapiens
  SIMILAR (928)..(1095): 831254mologous to Homo sapiens Human secreted protein, SEQ ID NO: 5210,accession number G01129,Smith-Waterman Score=249.
atggaggacagggtggggccgagtgaggagaggagccagcagaagttatccataacacctgccaggctggcgggtggtgacagtcttaaccctgctggaaggacaggtgacctcttagtggagacatcccctttgctggcagctgtcttcccagcccacgacaacagcctctgcaacaagccttactggttagttcaggatctgcgccttatcaaccaaattgttttgcctatccaccccatgatgttactaggggagatatcagtcaccaaggccttggctggctccctgataaaagcccttgcagtattccacactgcagaatccccaggctatgctctcctggattcttactacctgctccagaaagggagtgtttgcatctccatcctccaagaagaggaagcattttcttggccggggaaaggagagtgtcgagataagtcctgggcctctctgggcctaatacccgcatttccccagggaggacagtggaaacaggccctggggcttctggaccacagctgcctctgctttggggaattaggcaccaggttggcagccccagcatccttcagcaccttcccaataacaaaccgagagcgggagagaaaaactgacaagctgattccaaaattcatgtggaaatgcaagggacccagaataaccaaaacaatcttggaaaagaatgaagttggagaatttacacttcttgatttcaaaacttaccacaaatttgcagtaatcaaaactatgtggtactggcataaggacagatacattgatcaacagaatgacattgaaagtccagaaataaattcatatgtttatggtcaactgatttttgacaaagactcagcccgcctgcacccaggtgaaataaacagtcttgttgctcacacaaagcctgtttggtggtctcttcatatggacgcgcatgaaatttggtgccgtgactcggattgggggacctcccttgggagatcaatcccctgtcctcctgctctttgctccatgagaaagatccacctacgacctcgggtcctcagaccgaccagcccaaggaacatctcaccaatttcaaatccgtttttacctgaaaactatatcaaattgagtcatcctgtcccgttagactcctacgtgctctgccagtttctcaggttgtccttgtttttaatgaccttaacagttttaagaagcactagtcagggcaaaacgacagctgtgcttcaccattctggggtacttgctgtcaatgcacctgccctcacagtctgggacactgccaagccccaccatcccaaggactctgtgcagtatgcaggccaggaatccctcaggctgtgggtttccacatgtgcttctgcatggaaagctcccctggctgctgcaggatgtcctttgcagagccccatcctgtcctccttatcgcagctgcaggcagcctga

SEQ ID NO: 2647 - DNA, 654 bp, Homo sapiens
  SIMILAR (291)..(34): 271254mologous to Pseudomonas putida acyl-CoA synthetase,accession number AJ233397,Smith-Waterman Score=78.
tcattctcttccctcctgttttgttgaaggtcctgggggctctgtcctcactcctttttcttctttcaggagaacctttgactcccatggctttgatgactcctctcctgttggaggattgggagtgaagaaggagaagactcttgaggtaacttctagcagctcaggcccagagggctgggttgtagctatgattatatccctgggggtcagagcacagcattggcccaactccagggagtaagggatgctctggaggtttgggcctgagccaatagggctcagtaacaacttgagtgccgtgagtgccacgagataaggcaccatgtagtagtaactatagaccttgggatggtggggcttggcagtgtcccagactgtgagggcaggtgcattgacagcaagtaccccagaatggtgaagcacagctgtcgttttgccctgggttccatctagttggaacggagatgcctgcctttgtgtcgtcccaccccagggcttccactcaagcctgttcacaggaatgtttggcttggtaaaggaggagcccaggcgcatctgggtctcagaagtgacataatgtgcttgcaatgtctgcctccagcatgaccttgctcctgttctccctcctccaactgtcagaacccccagcat

SEQ ID NO: 2648 - DNA, 128 bp, Homo sapiens
  SIMILAR (23)..(67): 531254mologous to Homo sapiens HSPC241,accession number AF151075,Smith-Waterman Score=45.
ctactcatggccaagtcaatgtatatggccatggaaccctcttcattccagaagtatctccaaaggattccttttttggagagtatgatggcctaggctaactttactataaatagtagatagataag

SEQ ID NO: 2649 - DNA, 550 bp, Homo sapiens
  SIMILAR (444)..(352): 901254mologous to Homo sapiens basic transcription factor 62kD subunit,accession number M95809,Smith-Waterman Score=138.
gttatcttccttatttattaatttatccatatttctttagattaaatgttagctagagcataaagctgaactcatcacattaagcctttattattactagagaactgcggatgagggagctagaaatttatttttaaaaggttttagcaactcacacaggaatttcatttcttctaggcaattttaatggcaaacaacgctatttcaaagcacttccgataaatcacttcaagtaacagtattttgcttatttgacattctcacaagtggaataggtctactacgcttaagacaatgttgaagactaggaaaagactcttttctctcaaaacttcttttattgcttcttacctcatctaatggtttatcttccaaagctgttaaatctagtagtgggtttttcactcctaatgaaaccattgtttttaggcctagaaaatcaacaaaataaaaagttcagcatgtcttatctgtctcagaaattaacacttataatgtctagagggtggcaagttaaataccagtgtctatcagagataaacagttacct

SEQ ID NO: 2650 - DNA, 1894 bp, Homo sapiens
  SIMILAR (55)..(744): 991254mologous to Homo sapiens basic transcription factor 62kD subunit,accession number M95809,Smith-Waterman Score=1177.
agttagttacttcctgtctagagttgtagcttccacctgcaccttctagccaccatggcaacctcatctgaagaagttttgctgattgtaaagaaagtgcgtcaaaagaagcaggatggagctctgtacctcatggcagaaagaattgcttgggcacctgaaggcaaagatagatttacaatcagccatatgtatgcagatattaaatgccagaaaattagtccagaaggaaaagctaaaattcagcttcagctggtcctacatgcaggggacacaactaacttccatttttccaatgaaagcacagcagtgaaagagcgagatgcagtaaaagaccttcttcagcagctgctgcccaaattcaagaggaaagcaaataaagaactggaagagaagaacagaatgctgcaagaagatcctgttttgtttcagctttataaagaccttgttgtgagtcaagtgatcagtgctgaggaattctgggccaatcgtttaaatgtgaatgcaacagatagttcttccacatccaatcataagcaggatgttggcatttctgctgcatttctggctgatgtccggccccaaactgatggctgtaacggtctaagatataatttaacttctgatatcattgagtccatatttaggacctatccagcagtaaaaatgaaatatgcagaaaatgttccccacaacatgacagagaaggaattctggacacgttttttccagtcccatttattttcacagggatcggctgaatacagggtcaaaggatctctttgcagaatgtgccaaaatagatgaaaaaggcctaaaaacaatggtttcattaggagtgaaaaacccactactagatttaacagctttggaagataaaccattagatgagggctatggcatttcctctgtgccatctgcttccaattctaaatccataaaagagaatagtaatgctgccatcatcaagagatttaaccatcacagtgccatggtcctggcagctggactcagaaaacaagaagcacaaaatgaacaaactagtgagcccagcaacatggatggaaattccggagatgcagactgctttcagccagcagtcaaaagggcgaaattacaagagtccattgaatatgaagacttggggaaaaataattctgtaaaaacgattgcactaaacctcaagaagtcagataggtattatcatggtccaactccaatccagtcactacagtatgcaacaagtcaggacattattaattcttttcaaagtattagacaagaaatggaagcttatacacccaagttaactcaggttctctcaagtagtgctgccagtagtaccatcacagcactgtcacctggaggggcacttatgcagggaggaacacagcaagccataaaccagatggtgccaaatgatattcaatctgaattgaaacacttatatgtagctgttggagaacttctacgacatttctggtcctgctttcctgttaatacgccattcctagaagaaaaggtagtgaaaatgaaaagtaatttggaacgattccaagttacgaagctctgtccattccaagaaaagattcggagacagtatttaagcacaaatttggtaagtcacatagaagagatgctccagacagcctacaacaagctccacacatggcagtcacggcgtctgatgaagaaaacgtgaggtggccatgatgcttacaggttttgtgagattgagagaactatgacctgcagcaactctggaaacctggcctgacagacaagcagatgacctcacaggagtgataagaaacatctgctccacgccaactcccagagctgatgctattgtacttgcacattggagactgaaaggaaagaagggactaaatgc

SEQ ID NO: 2651 - DNA, 309 bp, Homo sapiens
  SIMILAR (258)..(299): 571254mologous to Homo sapiens Human prostate cancer- associated protein 63,accession number Y48366,Smith-Waterman Score= 40.
atggggaaggccatgttgcagctgctgatcagagcacattggacggtgtttccgtgtgaacatgaagacaatgctgcctctgtttctgtgacgctgtgctctgatcttgctggaggcgaagtggtgtcagctgtgcttacaggacagtcagtggtgcaaactgagaaagagatcgataggtcatcaaagccacctgcttgcttggtggcccctcaagttgtcttctgctcagaagttctgagagttgatgaaagttatcatcgaaagtacccagtccagctcaggccagtccatattgctgccaagtaa

SEQ ID NO: 2652 - DNA, 622 bp, Homo sapiens
  SIMILAR (563)..(291): 431254mologous to Homo sapiens Human secreted protein sequence encoded by gene 11 SEQ ID NO:72,accession number B24447,Smith-Waterman Score=148.
tacttaaaaccagagcttataaggcagcaggaccctaacagaagcattcatgtggatacacctcactgtgtaagctgttgtaaagcctctgctagcatcatgcttgctgatgtcgcattgaccaaggcaaggcacaccgccaagaccagatttagtgtcggaggggatgatacaagagatgccctgccccaagaggaggaatctagagaggcagtctggctacagcagctttgcctagctgtggtacccagcggctttgtttaccctgtgagggaaaaaccacctactcaagcctcagtaatggtggacgtcccttcccttaccaagtttgagcatcccaggtcgacttcagagtgctgtgctggcagcgagaatttcaagccaatggatcttagtttgctgggttccatgggggtgggatctgctgagctagaccacttggctccctggcttcaggccccctttccaggggagtgaacagttctgtctcgctggcgttccaggtgccaactggagtatgaaaataaaactcctgcagctagctcagtgtctgcccaaacagctgcccagtttcgtgcttgaaacgaagggccttctcttggccaggggagggagttcttga

SEQ ID NO: 2653 - DNA, 1191 bp, Homo sapiens
  SIMILAR (499)..(678): 281254mologous to Saccharomyces cerevisiae RNA polymerase II largest subunit,accession number U27182,Smith-Waterman Score=70.
atggtcccccaatatacctgccctctgattcctgacacctgtgaatatggcacattacatggcaaaagggactttgcagccccagtgagcctggacgtggatcctgcaccagagctcagcactgatgacatcttgattttggccttgagagacgaagcacagaagccagcagagccccatggaccatctgccatctgcgggaagctgtggggcaccaggaatgctcatcgcagggttgtatttggttcagccacgatttgcctggggcatgcgatgagcagcatgcagaccaaaggacagcggtccccacagtgcagcgtgctgtgtgctcctgcagaaggagggacagacatgcctgaggatgaagccactaactgggagtggggaagagagagaacagtggctgaacaggagtttcctagggacctgcagaagggaagagtgggcaggacagaaataaataatgccagagttctgtgtcacaaacggtggactgtcagcacggctgacaaggcatatggtgaacgcagtccttccccagctgcttctggcgggaagctgacaagaagcacgttgctgagtgatcctgggttcccatcctccgcacccgtgcatccacgcgtgggcccagccagcaaggagaagtctaacaggcaggaggaggggagacacaaggagcccccgcaagctcagcgtacaggaaaatctcctcaaatgcagaaatttgagtgtgaatttaattttcagtgcatcaaaaaatcatttagcactaggaagatagcctctctgacaggaacggactggcagcaggggactttgaccggcagctccatcatggggcacaatcttctaatctctgataagcggcccttttccgtggagctgtcatggataaatgttttctgtagctatttgtggagcactgggtcccgttcctttctacgagagcggccgttcccaattgggtgtgactttgctccctatgggatatttggcaagtttggagacgttgtcacaacttgggtgcgcatccagtggatagaggccaagggtcctgttaagcataccacagtgcacaggacagtctcacaacaaggaattatccaacccacaatttcaagtgtgctgaggttaagaaccctgaaaccaaacaggagtgtcagcgagcacagggaaggttgcacgttttga

SEQ ID NO: 2654 - DNA, 834 bp, Homo sapiens
  SIMILAR (701)..(366): 331254mologous to Plasmodium berghei merozoite surface protein-1,accession number AF000412,Smith-Waterman Score=112.
ggtgatcacagagcttcctctggcctgccattacgcgttgtctctgggaaaatgggaagattctactgccccgacatgaatagggaatgtgctttgagctgttttcctgatagacatagagcaaacacacagggtcagttaactccctccttccacgggcaaagaagtgttgtcaaaactcggaagaggtcagccacaaagcttgatggaaccctatcctcaggccaaggcaaaagagaagaaactggaattaacaaggaatacgggagccctcaccaagtccaaggacttacctgggagcaggaaggggcagcagaggaaactgtccagggacagaggagggagggctacaccttcgtgtcctctgctgcatggatgaaggttaccatccgtgtggagaagtttggccatgccccgggccttaccgtgcgcggggcagccccggcaggcccagtcgggctggaagccgccgctggctcagagccgcatcccggcccgcggacgcagggggcgcgcggccggtccccggaggcgctgggtccaggccgaggatggttttgctccccgctccgctccgcatttaggaggtgggaggagcgcgcggcgatgcgcacaggaaatctgataggtgaggaggccggcgggccgcgcagggcggcgcgggctgggggacgcggcgggcggctccgggaggcgacgggacccccaggccggcagccgagtgaagaggcaggaactgtctacaaatgctccggctccgaagccccgagggaaagagcatctttcacggagcaccaggaattgacgacggtggaatttgctcagatcccctga

SEQ ID NO: 2655 - DNA, 933 bp, Homo sapiens
  SIMILAR (514)..(738): 301254mologous to Mycobacterium tuberculosis SEQ ID NO 42A,accession number AX005609,Smith-Waterman Score=80.
atggcaaagccaggaggaatttgcagcagggatttttaccctcattttggatttagtgcggtcaggaagctgacaagaagcacgttgctgagtgatcctgggttcccatcctccgcacccgtgcatccacgcgtgggcccagccagcaaggagaagtctaacaggcaggaggaggggagacacaaggagcccccgcaagctcagcgtacaggaaaatctcctcaaatgcagaaatttgagtgtgaatttaattttcagtgcatcaaaaaatcatttagcactaggaagatagcctctctgacaggaacggactggcagcaggggactttgaccggcagctccatcatggggcacaatcttctaatctctgataagcggcccttttccgtggagctgtcatggataaatgttttctgtagctatttgtggagcactgggtcccgttcctttctacgagagcggccgttcccaattgggtgtgactttgctccctatgggatatttggcaagtttggagacgttgtcacaacttgtgtgtgtgtgcagggatttcctgtgcgcatcgccgcgcgctcctcccacctcctaaatgcggagcggagcggggagcaaaaccatcctcggcctggacccagcgcctccggggaccggccgcgcgccccctgcgtccgcgggccgggatgcggctctgagccagcggcggcttccagcccgactgggcctgccggggctgccccgcgcacggaaggagctcagtgtgaggcccatggacgttacctcctggagatgcaaatcggaaagagatgtttcactatgctgtcacctcagaagattgacaaggacaaggttgtctttgcaaaggttcttccagacaagggcatcccttcttttgtaggatttctaagggcgcacacagggactcctgatgtctga

SEQ ID NO: 2656 - DNA, 393 bp, Homo sapiens
  SIMILAR (216)..(278): 421254mologous to Saccharomyces cerevisiae cAMP-dependent protein kinase catalytic subunit,accession number M81697,Smith- Waterman Score=35.
aaggtggacagtggattgaaaagaacccagagggctctcccgctccaccaagctctcaaaggccaaggtgttcgctctgatgagaggtgtgagctgtggtttgttcagcaagtgctggggccttacccacctgccccctttggtcctcctgtgggctgtggggaccaggcccctgctactcaaggccaaggtcaatgtcatacttactcctgcaggaagaggaaatggggtatggggagaggaagcacagaccccccagttacagcaagaaagagttcaggctctaaattactactcacaacccccttgccctttcctctagagcagggatcggcaaacttcttctgtaacagccagaaagcaaatgttttaggcattgtgggtcacatatag

SEQ ID NO: 2657 - DNA, 424 bp, Homo sapiens
  SIMILAR (87)..(248): 791254mologous to Homo sapiens copper transport protein HAH1,accession number U70660,Smith-Waterman Score=211.
cgatccctgctctagaggaaagggcaagggtgtttgtgagtagtaatttagagcctgaactctttcttgctgtaactgggagggtctgtgcttcctctccccataccccatttcctcttcctgcaggagttaagtatgacattgacctgcccaacaagaaggtctgcattgaatctgagcacagcatggacactctgcttgcaaccctgaagaaaacaggaaagactgtttcctaccttggccttgagtagcaggggcctggtccccacagcccacaggatggaccaaagggggcaggatgctgatcctcccgctggcttccagacagacctgggacttggcagtcatgccgggtgatggtgttcctgcggagaccctcagttgtcctattccttcctagcttccctgcaataaaaatccagct

SEQ ID NO: 2658 - DNA, 418 bp, Homo sapiens
  SIMILAR (74)..(277): 1001254mologous to Homo sapiens copper transport protein HAH1,accession number U70660,Smith-Waterman Score=355.
gaattcccggctcgacgatttcgtgctgctgacaccgccgccacaccgccgcctcaccgtcgctgcctcagtcatgccgaagcacgagttctctgtggacatgacctgtggaggctgtgctgaagctgtctctcgggtcctcaataagcttggaggagttaagtatgacattgacctgcccaacaagaaggtctgcattgaatctgagcacagcatggacactctgcttgcaaccctgaagaaaacaggaaagactgtttcctaccttggccttgagtagcaggggcctggtccccacagcccacaggatggaccaaagggggcagctgagttggagaatggcaacgaagaccatttggcccacatagcctagactgtttactattttgcccttttcagaagaaaattgtctgtccat

SEQ ID NO: 2659 - DNA, 428 bp, Homo sapiens
cttatttcctcagtggaaatctactcactatgatgtggtagttggcgtgttgtcagctcgcaataaccatgaacttcgaaacgtgataagaagcacctggatgagacatttgctacagcatcccacattaagtcaacgttttgaatcaggaaattgaagcgttcagtctgtccgaagacacttcatcggggctgcctgaggatcgagttgtcagcgtgagtttccgagttctctaccccatcgttattaccagtcttggagtgttctacgatgccaatgatgtgggtttccagaggaacatcactgtcaaactttatcaggcagaacaagaggaggccctcttcattgctcgcttcagtcctccaagctgtggtgtgcaggtgaacaagctgtggtacaagcccgtggaacaattcatcttaccagag

SEQ ID NO: 2660 - DNA, 1098 bp, Homo sapiens
  SIMILAR (68)..(346): 321254mologous to Homo sapiens Human normal ovarian tissue derived protein 47,accession number Y59770,Smith-Waterman Score=89.
atgcgaaactggctggtgctgctgtgcccgtgtgtgctcggggccgcgctgcacctctggctgcggctgcgctccccgccgcccgcctgcgcctccggggccggccctgcaggcctggttagtgatgtccgacgccgcccgttcgcccgggagcggaacctcgtgtgcccttcagccgccagcgctttctgctttgggagctctggctctgaagttgttttcttcccccccaagttgttggtctttctcggtcaagactggggttttagtgccgtggataatgtgtatcagttggccttatttcctcagtggaaatctactcactatgatgtggtagttggcgtgttgtcagctcgcaataaccatgaacttcgaaacgtgataagaagcacctggatgagacatttgctacagcatcccacattaagtcaacgtgtgcttgtgaagttcataataggtgctcatggctgtgaagtgcctgtggaagacagggaagatccttattcctgtaaactactcaacatcacaaatccagttttgaatcaggaaattgaagcgttcagtctgtccgaagacacttcatcggggctgcctgaggatcgagttgtcagcgtgagtttccgagttctctaccccatcgttattaccagtcttggagtgttctacgatgccaatgatgtgggtttccagaggaacatcactgtcaaactttatcaggcagaacaagaggaggccctcttcattgctcgcttcagtcctccaagctgtggtgtgcaggtgaacaagctgtggtacaagcccgtggaacaattcatcttaccagaggccattgtcaaaccttcccccaccttctcctttgggtaccaaaccctgggctttatttgctgcttcaagttcaaggtgggagtcagagccagtgtgactgctttgtctggcacaacagaactgctcagcgattctgttgaacggatgctgctgcctggcccgtatctggcctggagagtctggctgcgagctcatctgtgctctggtctggctaaggtcaggaatttggagaagacatggtgcgacggcttgtcgctgctctcagctgtctag

SEQ ID NO: 2661 - DNA, 502 bp, Homo sapiens
  SIMILAR (191)..(283): 351254mologous to Xylella fastidiosa hypothetical protein,accession number AE004038,Smith-Waterman Score=64.
atgcccaagttccactcccagattcagattaaattggccgccatccaggtattgcagtttctccgagctgcctgggagctcttaattgttcctgcagggatgtctgaagtactctgcaaggctaattaggacagatcaatgtacacttacctctccagaaggtgaaaggtgtgaagcacaagggatgtttagcaataccagcaggacacacatttgggatcacaaatatacagcagaaactattcacaactacaaccacagatccataagacagaaaggcaccatattcaaagggcagaagagcactgaagtcatgcaagcagctggcagcaggaaagagaatgagtgccaagtgaatggggaagcccttataaaaccatcagatctcatgagaactcacttactatcaggagaacgtatgggagaaacctcccctatgattcagttatctccacctggtccctccatgacacgtggagattatgggaacaattcaagatga

SEQ ID NO: 2662 - DNA, 408 bp, Homo sapiens
  SIMILAR (102)..(25): 421254mologous to Mus musculus beta defensin 2,accession number AJ011800,Smith-Waterman Score=62.
atgaacacatccgtagaagaagatacaagcggctggtcgtcgagagccagctggcagaagagcacgcagacagccaccagtagctctgtgctcgtcatccacccattgctttctgatgttgtgccatctgctttagctcaccgcattctctgtgccatgggaatcttccaatcagctcctgtgagtactctcgggccagaatgcaatctctattcctcaagtgatcctcatttgagattggagactggattgtattatcacaatactaacagaggctgccctcattcaggccctaagccaggagatcaagagcaagcaagatccaaactcaaaggagctgctgaaggaacactaaatctctgctttcccaggcccaccctcatgatggatggaggccaggttatttga

SEQ ID NO: 2663 - DNA, 498 bp, Homo sapiens
  SIMILAR (162)..(260): 391254mologous to Homo sapiens Human secreted protein sequence encoded by gene 31 SEQ ID NO:180,accession number B24554,Smith-Waterman Score=41.
  misc_feature (1)...(498): n = a,t,c or g
gtgcaattccgctcggtggcggtagccgcggttgttggccgaccgagtgccggtataagccccccccggtggggggcagctggtgtgcggatcgcggcgggagagaggcgcgggaggaacgggtccccggagccgtgaaccgcgggtacaggtgtcctgtctgcgctctctgccaagccggcttgcttcctgatctgttgctagggccgctggaccccgttgctaaggacccttgagatcgagtgaaagggaagcaatgcagaaatcagagggctctggaggtacacagttgaaaaacagagcaacaggtaactatgatcaaaggacatcatcaagcacacagttaaaacacaggaatgcagttcagggaagcaaatcctcattgtcaaccagttctccagagtctgcaagaaaacttcatcctagaccaagtgataaactgaaccctanaacaattaatccggtccattcggatgatgaagtgtttgaaagaggatt

SEQ ID NO: 2664 - DNA, 468 bp, Homo sapiens
  SIMILAR (384)..(199): 371254mologous to Homo sapiens XhoI-XbaI fragment,accession number X52018,Smith-Waterman Score=68.
gtgcattgcttccctttcactccaattcagtggaagttttggatggaattttatggctaaatttctatcttccttcacgtcaaaaagttgttcctgtaacaaacttaacgacaaattacagttggctctccgtatatgcgggttccacatctatagatttgacccaaccacggatacggagagcagactggaggactttggcatgggtggatttgggtatctgaaagagaccgcggttcacggctccggggacccgttcctaccgcgcctctctcccgccgcgatccgcacaccagctgcaccccaccggggggggcttatgaccggcactcggtcggccaacaaccgcggctaccgccaccgagcgcctgagtttggggaaatgaggctccgcgcggcccgcccctgaacctggtcgcgccgcgcaatgacgtcagacgcacgctgcgtcgtctaaaccaatggtaa

SEQ ID NO: 2665 - DNA, 1236 bp, Homo sapiens
  SIMILAR (1062)..(1214): 351254mologous to Canis familiaris D4 dopamine receptor,accession number AB030235,Smith-Waterman Score=67.
tttttttttttttttcactcttttaacaaatattaattgagtgcttaagaacacagttgagtaaaaccagaaccatagatgcttttgtagacagtttcttttttcgtcattttatccagttttctgcctagctggacattcctttgcctttgcttctttctttcacccagtcaaagccagtggcttcactcctcttctttaaaactttccactgtcttcaagtgcttgccagaagaaatccaaactccatcagaaggaccattgatttttaggacataattatcttgtcttttattgagcagaaaattgcattaaattagaactcgttacctagacacacaacagaaatcagttagtgcttgacacgtcaacaggtagaaaaaacaatttttgttggctcccttcttcaacagcatatggagcagtatgttggaattttagatttgatgatgctaaggctcccgcttgtaagcagatgcttcagatggtcgtttagagaaggaccaacaacgacacttagctgaactagagcattcaatcctctttcaaacacttcatcatccgaatggacctgcaaggaatacctcctttagagtaaatagctgcaaatgcagaaggcactcgtgactgttcaccaaacggattaattgttttagggttcagtttatcacttggtctaggatgaagttttcttgcagactctggagaactggttgacaatgaggatttgcttccctgaactgcattcctgtgttttaactgtgtgcttgatgatgtcctttgatcatagttacctgttgctctgttttttcacctgtgtacctccagagccctctgatttctgcattgcttccctttcactccagtttcaattaaggttaacgaaggctactctcgactgaccctctaccccaggaaaggaggggtacactccaagcgctcacgatctcaagggtccttagcaacggggtccagcggccctagcaacagatcaggaagcaagccggcttggcagagagcgcagacaggacacctgtacccgcggttcacggctccggggacccgttcctaccgcgcctctctcccgccgcgatccgcacaccagctgccccccaccggggggggcttatgaccggcactcggtcggccaacaaccgcggctaccgccacagagcgcctgcgtttgggaaaatgaggcaacgcgcggcccgcccctgaacctggtcgcgcacgaaa

SEQ ID NO: 2666 - DNA, 575 bp, Homo sapiens
  SIMILAR (291)..(178): 331254mologous to Mycobacteriophage TM4 gp45,accession number AF068845,Smith-Waterman Score=66.
tgagggatgaagctgtcctaaagtctttccagaactcacacacacgtgtccccacctctcccctccttgatcatgtctccattttacgtatttactgatcatcttctgctattgttaaagtctaagctgaggggtgaaaccacagcagaaagcaaggaaggctcgaccccagatcacacagggagaggtggacagacagcatggctccgcccatttgcagccatttctgggcctgtaggctctggcagctcctgggattgctgtcctcggtgctgaatacgcgtttgttgggggcacacctgacaagtttgtcattttcagggaaaacccagtctctctcggcgctgaggagaaaacatggcacagcccttctcagtcctctagcaaccctggactctgcaggagaaaagagagattccctacatttgtttctatgagagaagggaaggctggagcaggggagtgggggaaatctctgcagtcctctcggaaagcaaacccttctacacctgtgatcccatgtgatttagcagagcccccagttaaaactaggccatgatgacacttggtgacac

SEQ ID NO: 2667 - DNA, 338 bp, Homo sapiens
  SIMILAR (25)..(78): 501254mologous to Homo sapiens INE1,accession number Y10696,Smith-Waterman Score=57.
gaaggcaagagtataatgtcacagccaataataatatgtccaccacctcccaatatggttcacagttgccatatgcatattataggcaggcttcaagaaatgattctgcaatcatgtccatggaaaccaggtctgattactgctacaaaccacacccttggggatgcagacgccaaacatgaaagttagaagaacggatcatgtgccaactgtagttttttaaaaaaaacgctcctttgtagggttttaaacttttctaatagatttagattcacttttggtcttggcttgttctcataagtcatttatctaagtttgtgtttctgtgtgtgtgagtg

SEQ ID NO: 2668 - DNA, 2286 bp, Homo sapiens
  SIMILAR (273)..(548): 341254mologous to Homo sapiens NK receptor, isoform b,accession number AJ006121,Smith-Waterman Score=92.
atgctgcccaatcgcctcggaagctctgagaccatcacggatgccgagcttcgggtaacactcacggtggaagagttaaacggattaagggcggtgcaagatatgtttgttaaacagatcctgaaggcagcacgctcgttaagagtcatcaccatccctaatctcaagtacccagggacacaaacgctgcggaaggccgcagccccagatccaaacacaacaggcttgatttttcttgagaagctttgtgagatcgcagcagccatcgctagttatgtcgcagttccaagcctagaaatcaaccacaggaagaaagcaaacccgaacctgcttctgaggcgatcgggatcgggcagtgtcagtcttcagctgctagccgagaagatctgggaaggagtcagagagccttgggccagagttctagtgctctgggagtggctgccagaccaaaaccccctgagcggattaacaaagtcaaattctacatcccgacatgaactcccgcatggcagggcaatacagctgcatctatcgggttgggagctctggtcagagcccagcaacttgctggatctggtggtaacaggcgacattgagaacaccagccttgcacctgaagaccccaccttcctgaccatgccctcgggatcacactgcccagaatctccttcggatgggcctggcctttctagtctggtggctctagtgtggttcctggttgaagactggctcagcaggaagagactagagagcgagccagcagagcttccacttgggaaggcaggagaagttgtatttgacacgttgccacttccttctcgaaggactcacttctctggctttctcggacacttctgctactcgttttctgacggttacagtaccaacagggcagccccagatggcagcagcaccaaggctgagaaacacggctcatgcagaaagcaaccaccttacacccttcagtgcagggacaaagcagggttacgagtccacggaaactctccagtctcagcctacggctggctgttctcagaggaacgcccaggaaaacctacccgaacccctttcagctgggaaggggacccgcctgggcttctcaccgccgatgagacctccctcgtcgtacacttagagctgcctgtgtttccttccttccttaagcgggctgggaactctagacactcagggatgggcagcccattagaagcagaggaagcgtactccacagttgttatggctgatgtatcccagtacccagtcaatgagccgctcgttgctgctgtcgtgtgccaggaacccgagcgcgcgcagcccgacgtgcacttcttccaggcctgcgcctcgggggccacgcaggaggagttgcagcgcgaccgctgcccgccgctgagaccccgcccctgcagcgccgcccgtcagtccgcgcatgatcagcaccgtagagcggggcgcgggccgcggacgaccccaggcgaacccattcccgaggcagaggaggcgcagaggcctgagccggacatcctgaaccacgtgttcgacgacgtagagagctttgatcgaggctgcagaagtcggcggaggcggccagggtgctggagcaccggaacgcggccgcaggagccggcgccgggcggctggggagggcttgctgacgctgcgggcaagccgccctcggaggccgagtacaccgacgtgctgcagaagatcaagacgccttcagcctgctggcccggctgcgcggcaacatcgccgacccctcctctccgagctgttgcacttccttttcgggcctctgcagatgattgtgaaccgtcgggggggccggagttcgcgagcagtgtgcggcggccgcatctgactcggatgccgtggcgctgctgcgggacaacgtcactccacgtgaaaacggctctggacctcgctgggggactcgtggacccgccccgggctggagctgtccccggaggagggacccccatacaacccgagttcttcagcggctgggagccgccggtcactgacccgcagagcgcgcctgggaggacccagttgagaaacagctacagcacgagcggaggcgcggcagcaaagcgccccccaggtcgctgtcaatggaggtggtcgttcttccgtgttatccctggagaaaaagggcggcattacaggcctgttgctgtctggcagtgggactccaagatggctcaagttggacccctgagtctcagtgtgaagcctagattaggtactaaaaaggacgttgataaggtactggatgaaaagtga

SEQ ID NO: 2669 - DNA, 1026 bp, Homo sapiens
  SIMILAR (1)..(471): 991254mologous to Homo sapiens nucleotide-binding site protein 1,accession number AF298547,Smith-Waterman Score=833.
atgtggaagagctggcctggagatagcaaagaggtccaggttatggctgagagatacaagatgctgatcccattcagcaaccccagggtgcttcccgggcccttctcatacacggtggtgctgtatggtcctgcaggccttgggaaaaccacgctggcccagaaactaatgctagactgggcagaggacaacctcatccacaaattcaaatatgcgttctacctcagctgcagggagctcagccgcctgggcccgtgcagttttgcagagctggtcttcagggactggcctgaattgcaggatgacattccacacatcctagcccaagcacggaaaatcttgttcgtgattgacggctttgatgagctgggagccgcacctggggcgctgatcgaggacatctgcggggactgggagaagaagaagccggtgcccgtcctcctggggagtttgctgaacagggtccctctgtgcatcgagaacaagctgggggttggtggtgaggattggggggaccagctaagagtctactggtggaatccaagcaagagagagggtggctctggctggagccatgggagtgaagatgccaaccagtccctgaagcacctgcgtctctcagccaatgtgctcctggatgagggtgccatgttgctgtacaagaccatgacacgcccaaaacacttcctgcagatgttgtcgccttgggaaaccacgctggcccagataataatgctagactgggcagaggaaacctcatcggacaaattgaaatatgcgttctactgcagctgcagagagctcagccgcctgtgcccgtgcaattttgaagagctggtcttcagggactggcctgaattgcaggatgacattccacacatcctagcccaagcacggaaaatcttgttcgtgattgacggctttgatccgctgggaggccgcaccttgtggacgctgactcgaggacatctgcgggaacttgggaacagaagaaagcggtgcccatcctcctggggagtttgctga

SEQ ID NO: 2670 - DNA, 1053 bp, Homo sapiens
  SIMILAR (401)..(18): 661254mologous to Homo sapiens NALP2,accession number AF310106,Smith-Waterman Score=389.
  misc_feature (1)...(1053): n = a,t,c or g
agttncctcantaatcaaataaccanttgtgggtttttttcnttcctatttccttcccaagcagcttaattgaagttccatcaattnaaagtccatctattttcaaacctgagtgtcccggagggtgcccactggaacatgtcaaggtttcaaaacagcatcttcactcccactagaaccccaagggattctgaccccaggtccagagtgacgaggctctggttgcagctgagggcagagcagaggtcttcacaactgaacggagggatggaacatccccacaaccacagacatctcaagttgcacagtggtttcctcaaagcctcacacaggaacttcattcccttaactcctatgtgaatcagccccagatccaaacacaacaggcattgatttttcttggagaagctttgtgagatcgcagcagccatcgctagattatgtcgcagttccaaagcaccaaggtctgcagtttacactcggggtacctcaagccctcacacagaaacttcacccctgtattcccaatggggttcttggccaagcacaggtgtgtcagctcccggctgacaaccaacacagcagcaaggtccttgcaattggcttctgtaaggtgacagttttccaacctacaaaagaatcacaaatggcaacacggttgacaggtccaacttcaaccttcccggctagctccacaagtgccagcatccaaaagccccttattgataaactccccaccttctatcatgcactggtgatcctatgaaggaataggaatgagagaagaacaaaattcacaggccatcggcctggatctaaacatgggaacaggtgttcacatcagcgagaggttccatacagccaagtcaggcatgaccattgctcgtctgtggccccagatcgaaagcacagctgctctggaagagaggagagacttacgacaacctctgcagaaagcacttggggtgtctcaaagttgtgtacagcaacttagcaccctcatccagaagctcattgtcggagaggtttacgcacgtcaggaactggttgact

SEQ ID NO: 2671 - DNA, 1200 bp, Homo sapiens
  SIMILAR (535)..(741): 781254mologous to Homo sapiens nucleotide-binding site protein 1,accession number AF298547,Smith-Waterman Score=282.
atgggcctcagcgtgctccctctgcaccccaacgcaagctccggccgcttcttgtccccctcctcctgccgcatcacagcccacctcagcctctttgtaggttccatgcgacgctgtaccatggctgggagtcttccaggcgccgtgctggcgccttctgtgcatggactccaagtcgccataatcgtacgggttacccccattatcagtcccctcttatacatcaggctagtgagacagtatcttatcacagtcctacagctggcaggagtagattcaaaccctagcagcaccaatagtgaagccagtcgctacatctcccccacactaaagggaggtggtcgcaccgtggggtccactggaagttgcctaccagaccaggtcatcccaaacacaccctctagccatttggtgtggcatcggaaagaaactaaggccagcctcgggggccggggccttctgtttgagtccatcgaagtctttccggaaacatccgccagttcctccgccacggccagcacagagaatcctgttgtggtcgatggccttgatgagctgaaagtcccacctggggcgctgatccaggacatctgcggggactgggagaagaagaagccggtgcccgtcctcctggggagtttgctgaagaggaagatgttacccagggcagccttgctggtcaccacgcggcccagggcactgagggacctccagctcctggcgcagcagccgactacgatcttcgctctcttcgcctctggacagatttctgtctctcttcagctcaaacagcaacctcaagtttctggaagtgaaacaaacttcctgagtgactcttctgtgcggattctttgtgaccacgtaacccgtgcacctgtcatctgcagaaagtggagttgggaggtcactgtgccaccccggagcagtgggctgaatcttctatgtcctcaaagccaaccagtccctgaagcacctgcgtctctcgccaatgtgctcctggatgagggtgccatgttgctgtacaagaccatgaacgcccaaaacacttcctgcagatgttgtcgttggaaaactgtcgtcttaagaagccagttgcaaggaccttgctgctgtcttggttgtcagcaagaagtgacacacctgtgcttggccaagaaccccattggggatacaggggtgaatttctgtgtgagggcttga

SEQ ID NO: 2672 - DNA, 726 bp, Homo sapiens
  SIMILAR (611)..(147): 601254mologous to Homo sapiens Human PRO1430 (UNQ736) amino acid sequence SEQ ID NO:116,accession number Y99372,Smith-Waterman Score=395.
  misc_feature (1)...(726): n = a,t,c or g
cagttcctgggtctcccggctcaggtagtgccaggaagctgcgggcatggcggacaggctgtccttcgggtcttggaagggcccaatccttggctttcaaatctgctccagagggttatctggggaggggctgctccctcacagaggggagcctctaagcccaccaggcgggcactttcagcccaaagcctccgggccacctcctcatcctcagcctcgggggccggggcattctgtttgagtccatcgaagtactttccggaaaacatccgccagttcctccgccacggccagggtattgtgctgggctggggcgggccagttcgggggctctttgaccaggcagccagaagatnggggcccgagttgtggtgctggagaaaggtggagccatggatgcccgtgtgtctgcccagctctgtcctggccacgccggggtgcgggggcgttgacagtcacaccagagccttgcagccgccggctcaactccttggtgaaagaggacgatggcgagcttggctctggcagtaggcggtaatggtgtaatacttccatcgctgccagttcaagtcgtcaaagtctatgtgcccagcaacatgggccanggacgaagaggttgatgatccgcgaaagggctgaggctttcagcttgtccagcagccagtttgtcaagagaaagtgacccaagttgttaaacgcaaactgcatctcggagccgtccttcgt

SEQ ID NO: 2673 - DNA, 901 bp, Homo sapiens
gacgaggagtccaaaaaacacaaaagagagttggcttttagcaagctctggactggatccatcctcaagcactgcatttaaatccctttcatcttccttagctgccaacagagagcttgacaagaaagaacaccagggatactgtcagctctcacaacccacggggatagctactgtcccaaaatgggctttagggggtccgctgcttcctgaaatttacacaagattttgtgtgtatttttctgaggcaaagtccttgacttcgatctttagtgtcaactgggttcttcgttgcctaaaaggccaactcaaccacgaccactctggttatttctgctgttccttttcaggatgtatcaatggcagcagaaaggcaaagagaatgacacagtggaaatggaaaagggccctccatagccctcctctcaccccatcctcattcacatgctctgaagcaactctaataacaacgacaataaatccagaagctctcagacacacgtacacactgagttctctcaggggccaagtaggacatttggcatcctgggcttttctgcagaccacagctcctcctgaaatagatcacttggctgcactgcagacaaaggcctgcagtaaagtaggtggcctcataaaacgcaacacccgttataaggagtcagtcagagatcgatttccagggatcccatctacactctgccttcaaacgaaaggtcacctccaggagcgatgcactgggcacagtctctcttcaagacgtgaggacacggcaaatgcactctatgagaaactgatagaagatgatgccctcgtgcagccaaatgaagcattttgtgggcatgctggaatgaaccctgaagccaggccatatcagtgtgggcagttggggagtcattaa

SEQ ID NO: 2674 - DNA, 327 bp, Homo sapiens
  SIMILAR (171)..(52): 411254mologous to Homo sapiens Human signal peptide containing protein HSPP-82 SEQ ID NO:82,accession number Y87305,Smith-Waterman Score=57.
atgcctacaatggccccggagggtgtcacgtttagtgaaggttacagaaacgtcaaaagcactaacacttctggggcccagccactgttctgtggcttttatcttcacaagaatcctgcagagaggactggtgagaacatagtcgaggaccagtgtgaattcaagaactggcagttgggagccagtcgctcaggaattctggcagtagcaccaaggagcagctgctcatctcaaatgaagacgctggaggactcagaccccaaagcagacatgagaacgtggggggatgccctggctgagaccctcttagacacgacaagcctttag

SEQ ID NO: 2675 - DNA, 1898 bp, Homo sapiens
  SIMILAR (3)..(1235): 961254mologous to Homo sapiens Colon cancer associated antigen precursor sequence,accession number Y07112,Smith-Waterman Score=1932.
  misc_feature (1)...(1898): n = a,t,c or g
ccgccttgggtcagcctgctcccctgcttcctgccgcagtgggggccgtcagcctggccacctcccagctcccaagcccacccctggggcccaccgtccccccacagccaccctcggccctggagtcggatggggaagggccgccccccagggtgggctttgtggacagcaccatcaagagcctggacgagaagctgcggactctgctctaccaggagcacgtgcccacctcctcagcctcagctgggacccctgtggaggtgggcgacagagacttcaccctggagcccctgagaggggaccagccccgctcagaggtctgcgggggggacctggccctgcccccagtgcctaaggaggcggtctcagggcgtgtccagctgccccagcccttggtggagaagtcagaactggcccccactcgaggggccgtgatggagcagggcacgtcctcgtcaatgacagagtcgtctcccaggagtatgctaggctatgacagagatggaaggcaggtggcctcagactcccatgtggtccccagcgtcccccaggatgtacctgcttttgtgagacctgcacgtgtggancccacanacagggatggtgganaagctgganaaagctcggcanagcccccgccgagtgacatgggcanngtggggggccaggctagccacccccagacactcggcnctcgagctttggggtcccctcggaancgtccagatcaccaggatgtcagctcaccagccaagactgtgggccgtttctcggtggtcagcactcaggacgagtggaccctggcctccccccacagcctgagatactctgccccacccgacgtctacctggacgaggccccctccagccccgacgtgaagctggcagtgcggcgggcgcagacggcctcctccatcgaggtcggcgtgggcgagcccgtgtccagcgactctggggacgagggccctcgggcgagacccccggtgcagaagcaggcgtccctgcccgtgagtggcagcgtggctggcgacttcgtgaagaaggccaccgcttcctgcagaggccttctcgggccggcttcgctgggccccgagacacccagcagggtgggcatgaaggtccccacgatcagcgtgacctccttccattcccagtcgtcctacatcagcagcgacaatgattcggagctcgaggatgctgacataaagaaggagctgcagagtctgcgggagaagcacctgaaggagatctcggagctgcagagccagcagaagcaggagatcgaagctctgtaccgccgcctgggcaagccactgccccccaacgtgggcttcttccacacggcaccccccactggccgccgganaaaaaccancaagancaagctgaangcaggcaagctgctaaatcccctggtgcggcagctcaaggtcgtggcctccaacacaggtcacttggctgactccancanaagccctcccgctaangacctgcccnagccagtgtggggctcactgcanacaacacgggcctgaacgggaangcagtgcanaccancanccctgctccgtccggggctccctgtcttcngacatctgctccggcttaccantgatggaagcggaacgcgtngncaanggtcctccaccaacaacctggcccaggcctgaaccaagccccacccgccctgcacgtccaagcgcangtgaacaacancaacnacaagaaaggttcttcnccgacgaactgcacaanctggtggacnaatggacaacaananngtggggggcgcgcactgaaacccacnctcnacccctnaancnnaaccncaacttccanacattgaggcccgcaggtgggctgccctggcnaagcccggctttnacccccctccaaca

SEQ ID NO: 2676 - DNA, 422 bp, Homo sapiens
  SIMILAR (154)..(357): 411254mologous to Bos taurus type II collogen cyanogen bromide fragment CB10,accession number AF138883,Smith-Waterman Score=81.
ttttttttttttttttgccccaaaatattttttattcttgcattacatttgtgtttccaattgtgaataaaaaatgcttagaaagtggttacaaaacagcgtgaactggacaggaggagcagctggccctgagggtccgtcacttctccacttagacggcgtgaagtgggcctggcgtctaggcggggtcagtcaggcttctcactctcaggatctggtgtgggcacggacagggtcggggcggctccgggaatgaccgtggtggacagagggccgggcgctgggggcagacgtggcatccccactcctgctcgaggtgcggtcatagcccgcgcctcgccaggggcagcccagcctgcctgggcctccatgtcttgcagcttctgggtctgcttcagctggttgagcgtgggcttcagctg

SEQ ID NO: 2677 - DNA, 3192 bp, Homo sapiens
  SIMILAR (1531)..(3189): 1001254mologous to Homo sapiens KIAA0183,accession number D80005,Smith-Waterman Score=2937.
aggactacatcgagaagcactgcccgagcgccgtggtgccggtggagctgcagaagctggcccggggcagcctggtgggcggcgggcggcagcggcccccgcagaccccgctgcgcctgctggtggacgccgacaactgcctgcaccgcctctacggcggcttctacaccgactgggtcagcggcggccagtggaaccacatgcttggctacctggcggcgctggccaaggcctgcttcggcggcaacatcgagctcttcgtcttcttcaacggcgcgctcgagaaggcccggctgcacgagtgggtcaagcggcagggcaacgagcgccagacggcacagcagatcgtcagccatgtccagaacaagggcaccccgccgccaaaggtctggttcctgccgcccgtctgcatggcccactgcatccgcctggcgctcatccgcttccacgtcaaggttgcacagagcattgaggatcaccatcaggaagtgattggtttctgcagagagaatggtttccatggcttggttgcgtatgactctgattatgcactgtgcaacatcccctactatttcagtgcccatgccctaaaactgagccggaacgggaaaagtctcaccacaagccaatatctgatgcatgaagttgccaagcaactggacctgaatccaaatcgttttcctatttttgctgctctcttaggaaatcacattctgcctgatgaagatctggcttcctttcattggagtttacttggtccagaacatccactagcctcactaaaggtccgggcccaccagctggtcttgccaccttgcgacgtagtgatcaaagccgttgctgactatgtacgcaacattcaggacacctctgacttggatgccatagctaaagatgttttccagcattcacagtctagaacagatgacaaagttattcgatttaagagagcaattggatattattcagcgactagtaagcctatgtcatttcatccaccacattacttagcagccagacccggtccgtttggaatgcctgggatggtgccgccgcatgttcctcctcagatgctcaacattccgcagacctctctgcaagcaaagccggtggccccacaggtgcccagcccagggggcgccccgggccagggtccatacccgtacagcctctctgagccagcacctctcactttggacacgagcgggaagaatctgacggagcagaacagctacagcaacattcctcacgaagggaagcacacgccgctgtatgagcggtcctcgcccatcaacccggcccagagcggcagccccaaccacgtggattccgcctacttccctggctcttctacatcgtcatcttccgacaacgacgagggtagcggaggggcgacaaaccatatcagcgggaacaagattggctgggagaagacgggaagccactcagagcctcaggcacgaggagacccaggagaccaaacaaaggcagaaggctcgtccactgcctcttcaggaagccaactagcccgaaggcaagggaagccagatgggcactgtccagccaatcccgtgcctcctgtcgatgcccaccaggaaccacatggacatcaccacacctcccctgccccccgtcgcacctgaggtgctgagagtggccgagcacaggcacaagaaggggctgatgtacccctacatcttccatgtcctgacgaagggtgaaatcaaaattgctgtttctattgaagatgaagccaacaaggacctgcctccggccgctctgctctataggccagttcgtcagtatgtttacggagtcctgtttagtttggcagaaagcagaaagaaaactgagagacttgcttttagaaagaacagacttccaccagaattttcaccagtgatcattaaagaatgggcagcttacaaaggaaagtctcctcaaaccccggaactggttgaagctcttgccttcagggagtggacctgccccaacctgaagaggctgtggttgggtaaggcggtagaggacaagaaccgcaggatgagggccttcctggcctgcatgaggtcggacaccccagccatgctcaaccctgccaacgtgcccactcacctcatggtgctctgctgcgtcttacggtacatggtgcagtggccgggagcacgcatccttcggcgtcaggagctagatgccttcctggctcaggcgctgtcccccaaactctacgagcctgatcagctccaggagctcaagattgagaacctagatccccgaggaattcagctatcagctctcttcatgagtggagtagacatggccttgtttgcaaatgatgcatgcggacagccaatcccctgggaacactgttgtccttggatgtattttgatgggaagctcttccaatccaaactcctcaaagccagccgggaaaagaccccactcattgacctctgtgatggtcaggctgatcaggctgccaaggtagagaagatgcgccagagcgtcctcgaggggctcagcttctccaggcagagccacacgctccctttcccgccgccacctgccctgcccttctaccctgcctctgcgtacccccggcactttgggcctgtcccaccctctcagggcaggggcagaggctttgcaggcgtctgtggctttggaggcccctatggggaaacggtagcaacaggcccttaccgtgccttccgtgtggcggcagcatcgggacactgcggagccttctcaggcagtgacagcagcaggactagcaagtcccagggcggagtccaacctataccttctcagggaggcaaactagaaatagctggcactgtggttggccattgggctgggagcaggcggggccgtgggggccgggggcctttccccctgcaggtggtttctgtcggaggaccagctagagggcgtccaagaggagttatttccaccccagtgattagaacatttggaagaggtggaaggtactatggcagaggttacaaaaaccaggcagcaattcagggcagacctccttatgctgcttcagcagaagaagtggccaaagaacttaagtcaaaatctggggaatcgaagtcctctgctatgtcttcagacgggtccctggctgaaaacggagtgattggccgaggagaagccggctccccagatgaacgggagcacgggtga

SEQ ID NO: 2678 - DNA, 3510 bp, Homo sapiens
  SIMILAR (964)..(1971): 841254mologous to Homo sapiens antigen NY-CO-43,accession number AF039702,Smith-Waterman Score=1398.
atggtgccgccgcatgttcctcctcagatgctcaacattccgcagacctctctgcaagcaaagcccgtggccccacaggtgcccagcccagggggcgccccgggccagggtccatacccgtacagcctctctgagccagcacctctcactttggacacgagcgggaagaatctgacggagcagaacagctacagcaacattcctcacgaagggaagcacacgccgctgtatgagcggtccttgcccatcaacccggcccagagcggcagccccaaccacgtggattccgcctacttccctggctcttctacatcgtcatcttccgacaacgacgagggcagcggaggggcgacaaacacagccctggcggcctctgtcacctggaccacccttctttgtgtgaccagtcagcacactgaacggctgccagaaacccaaacagacgctctgctcctgtaccgtctggagcatctggggatgggggccgtcagcctggccacctcccagctcccaagcccacccctggggcccaccgtccccccacagccaccctcggccctggagtcggatggggaagggccgccccccagggtgggctttgtggacagcaccatcaagagcctggacgagaagctgcggactctgctctaccaggagcacgtgcccacctcctcagcctcagctgggacccctgtggaggtgggcgacagagacttcaccctggagcccctgagaggggaccagccccgctcagaggtctgcgggggggacctggccctgcccccagtgcctaaggaggcggtctcagggcgtgtccagctgccccagcccttggtggagaagtcagaactggcccccactcgaggggccgtgatggagcagggcacgtcctcgtcaatgacaggtaacagcttcctgctgaaccctgcgttcacaagccccagtaacgtttctgatgttcccatagcagagtcgtctcccaggagtatgctaggctatgacagagatggaaggcaggtggcctcagactcccatgtggtccccagcgtcccccaggatgtacctgcttttgtgagacctgcacgtgtggagcccacagacagggatggtggagaagctggagaaagctcggcagagcccccgccgagtgacatgggcacagtggggggccaggctagccacccccagacactcggcgctcgagctttggggtcccctcggaaacgtccagagcagcaggatgtcagctcaccagccaagactgtgggccgtttctcggtggtcagcactcaggacgagtggaccctggcctccccccacagcctgagatactctgccccacccgacgtctacctggacgaggccccctccagccccgacgtgaagctggcagtgcggcgggcgcagacggcctcctccatcgaggtcggcgtgggcgagcccgtgtccagcgactctggggacgagggccctcgggcgagacccccggtgcagaagcaggcgtccctgcccgtgagtggcagcgtggctggcgacttcgtgaagaaggccaccgccttcctgcagaggccttctcgggccggcttcgctgggccccgagacacccagcagggtgggcatgaaggtccccacgatcagcgtgacctcctttccattcccagtcgtcctaacatcagcagcgacaatgattcggagctcgaggatgctgacataaagaaggagctgcagagtctgcgggagaagcacctgaaggagatctcggagctgcagagccagcagaagcaggagatcgaagctctgtaccgccgcctgggcaagccactgccccccaacgtgggcttcttccacacggcaccccccactggccgccggagaaaacccagcaagagcaagctgaaggcaggcaagctgctaaatcccctggtgcggcagctcaaggtcgtggcctccagcacagggcactgcgtggacggatggtggctgcttcctttgacccatttcttgggtcacttggctgactccagcagaggccctcccgctaaggaccctgcccaagccagtgtggggctcactgcagacagcacgggcctgagcgggaaggcagtgcagacccagcagccctgctccgtccgggcctccctgtcttcggacatctgctccggcttagccagtgatggaggcggagcgcgtggccaagcggagccagatggtgctaaacaccgggtccttccaaagtccagagggacggctggggggacgagggcacagctttcgagctgggagtttggccttgaggaggaaattctctcgtcaacgctgcgtggacagcagcagctgctcaataaggtgctctcctgtcctcaccatctctgtccagacaaatcatggatgcctcccccaccccatcgaagtctcttatttaatatcaaaggggaaccctatgagccggtcccctggagcggcggccgccagcgcctacccccaagccccacacagcgtgtgtgcatgctcatggctgggtcctccaccagcagcctggccccaggccatgatgctaggcccccagcccgccctgcacgtccaggcgcaggtgaacaacagcaacaacaagaagggtaccttcacggacgacctgcacaagctggtggacgagtggacgagcaagacggtgggggccgcgcagctgaagcccacgctcaaccagctgaagcagacccagaagctgcaagacatggaggcccaggcaggctgggctcgccctggcgaggcgcgggctatgaccgcacctcgagcaggagtggggatgccacgtctgcccccagcgcccggccctctgtccaccacggtcattcccggagccgccccgaccctgtccgtgcccacaccaggtactgccctctccaacctcccaaccccaccctgtgcgctgcctctgggtcagtacagaggcctgctcccagctccagtgtcctgggggccctgggcaggccaggtgggccagctgggggcacagggcagctggaacaccccccaggtgcccgtgctgccagtcttcttgcagccacctgtggtcagcatgcctggcccccggctgcggatcacgtagccttctgccctgtcccttgccagatggcgccctcggaaccgcccggagaaaccaggtgtggtttggcctccgaatcccccccaccgcctgctgtgggcacagcactcagccgcgagggggacagcgggtgggcagcaagactgcttcctttgcggcttcagaccctgttcgctcctatgttcctgtggtccacgcgccgtctccacacccacttcctatacttgagttgatggttagaaccttgtcgtcaccctgcagaagtacagtgccttgaatgccagcttttccgttccctgatgaaaagatatgttaaaaaaaattatcggaaaaggtttcatttgcaattggcttgggcattgataatctttatttactgttttaagttgcaaagatgggaatgggtt

SEQ ID NO: 2679 - DNA, 541 bp, Homo sapiens
  SIMILAR (429)..(301): 341254mologous to Hepatitis B virus surface antigen,accession number AF198765,Smith-Waterman Score=69.
ctggatgatgaatacccttgatacccccctgggggccccaaaaatgaaggcaggtgtcggttcatctggggtaagacccaagggttcattgcctcatgcccaaggaaatgaagacagtgtccgttcatctggggttatacccaagggttcactgcgtcatgccaaggaagtcaaggacacgaacacatgtgaagtgagtgcatccattgccactcacaaggttcagaagttcccaggacagcccagcccatggagcctgtggacagggagtgcatcgtgaaggttgccaaggcagtggaggccccaggttatggcagccccaggaaatgagctgggaggaaagcattcaggaactgatgagcatggagaaagaaagcactttgtaggaacagatgaggaagacgtgggggatgatgtacagaagttacaagtaagcggagctgatattaaacaggattttgctacacagagaaaaaggctagaatgtatatgaatgctttttttttttttttccgagacagagtcttgttccctcgtgccg

SEQ ID NO: 2680 - DNA, 88 bp, Homo sapiens
  SIMILAR (1)..(87): 1001254mologous to Homo sapiens Human p56-2 protein,accession number W69250,Smith-Waterman Score=137.
atggcccgcgcagccccgctgctcgccgcgttgaccgcgctcctcgccgccgccgctgctggcggagatgccccgccgggcaaaatcg

SEQ ID NO: 2681 - DNA, 153 bp, Homo sapiens
  SIMILAR (72)..(28): 461254mologous to Plasmodium falciparum myosin,accession number AF091994,Smith-Waterman Score=39.
atgatgggatttttccacatggttgttaggaaagttgctatatttgagactgtgaatgtcagcaaagctgaggaacaggaggtcttccatggagtacacagtgccctagagcatcgtcctttgaaacccgtttccttttatatccgtccatag

SEQ ID NO: 2682 - DNA, 435 bp, Homo sapiens
  SIMILAR (258)..(344): 441254mologous to Lycopersicon esculentum extensin (class I),accession number X55682,Smith-Waterman Score=56.
tcagcttctcttgcatggggccttcctgcttgctcctctgctcacaatgacaagtgaggactcccctccatgccttttgatgctggtgcccatcaccccgatcacatgaacgtctatgcccaggtcccatttcctgacattcccaacatctctaccttctccgggccaggctgccactttggcccctgcgtcacgttcaccaccacccaatgtgtcctgctcatcactgaggtttgtcatttttactctgagtctgtccattgtcatcatctccaccatcaccccttttgttttcattgccacccttgcctggggtgagtgaagacgctcttctctggcttccacccttccaaatgccgggctagaatttgtggtcactgccaacagtggattcatatcgatgggcaccttctttttcttaattgtatcatacat

SEQ ID NO: 2683 - DNA, 427 bp, Homo sapiens
  SIMILAR (332)..(270): 801254mologous to Homo sapiens DAN15,accession number Y08266,Smith-Waterman Score=132.
agggctgacaatggggacacctgactacagtcaaggggattcaaagcacagcctggaacctggaggaatcccctggaacatggacacagaaatgcggacagctgaagccatgaccttgaccacaggacttttcccccttttgctcagcacctctccttgctgctgccatgtgaagaaggatgtgtttgcttcccgttccgccatgattaaacatgaagtctactgctttgtgaagagttggctccattactggacagctctaaatgcaggtgatgatgatgacgatgatgatgatgatgatgatgatgatgatgatgatgatgatgatgatacaaagaggagcaggagaagaggacagctaacatgtattgagcagtctccttctgccggacattcttctaggctgtacatgcactgtcttatttaa

SEQ ID NO: 2684 - DNA, 943 bp, Homo sapiens
  SIMILAR (2)..(109): 511254mologous to Homo sapiens Human secreted protein HCE2W56, SEQ ID NO:201,accession number Y86286,Smith-Waterman Score =76.
atggccactagcagggcgccaatcccggaggtgcgggcccatcgtggggcgggcggctccggcgggtcttcaggctacgggttcagccaggcgccagccgcgttctctggagacgctctctctcggagggaccctgcacttgcctgaactcgagagtgggcgctgcccgaagaaggttgatgagggcaatgaacagatcaaagaaccacctttggaggagggcagaactgggtcagagaggtcctccacagtaggtgtcaaagccttactcactctagacaactccgcctggaatgcgtctgccagaaagtcagggcagggcctgttctcactgccttctgctgtccccacaagacttgaatttcctgacagcaggaactgcggcctcttccgtgtggactcaagatgcaactgtgcccttgagagtggcctgctgtggcccgatggcccagactacccctcctcagcctgctggtcctcacacgggccttggggttaccaggaaaactggggaccagcacggatttgtttccaatacctggaaactcctgaaatgtctgtccgctctctgatggcttatgggtacttctgcgttgatgtctggatgggagccgcacagtgctggctcccagagcggattggaccagccccgaccctgtcccatgggaagccaatccatgggccattgaaaggcttggcaggggaaagacatgcccagcagaaagggccatcttcagtccagtcaactcctctgggggaggtgggagtgtgccctaacggagagaagatgctgcacatgacagagaatcgaggcagagggcagccgcgtttcgcagaagcagttctggggcagggaatggtccgctcccaaaagccaggccatgagatggtccacccattgctggagctggatgtggtatctgaacatcctgtgctcatctaa

SEQ ID NO: 2685 - DNA, 730 bp, Homo sapiens
  SIMILAR (718)..(620): 601254mologous to Homo sapiens Human secreted protein, SEQ ID NO: 6913,accession number G02832,Smith-Waterman Score=117.
gacgacaggtgtgcccctggtgcatcactgaccttatgtccttctcctcccacagcccacttggctgcacccccgtggaatccgtctggatccttaaatattccaagcatgcttaccctccccaggactctgcccttggtgtttgctctcctcggaaagcttttccccatacatcggcgacccctgcccctatttatctttagaaggtgtcccttaacaccctatgtaaaatggcgcctttgtgcacgcaaacacttcctcccttcttccatctgcttaccccaggttcttttcataccatttgtttccacgtaacaatgggtcaactcgtttgccactggcatcaacattgtaagctccatgagaaaaaggagtttcttctattaggaatttccaacacctagatcagcatatggtacacgtaggcacttattaaatatatgtccaaaagaagtattaagtacttgttatggaccagaagctctgcaaaacccttatcttcattgtttattttcatccttacagccaatatttgaggtaggcaggaagagccatatttcagagatgagagggctgatgcttaggaggagtaagtagctgcagagggtcgggtgcggtgtttgtgccagtaatcccagcattttgggaggccaagacaggtggatcacttgagcccgggattttgaaaccagtctaggcaacatagagagatagggtctcactgtcgagc

SEQ ID NO: 2686 - DNA, 386 bp, Homo sapiens
  SIMILAR (214)..(384): 1001254mologous to Homo sapiens SMAP-1,accession number AB014729,Smith-Waterman Score=292.
atgcgtgaccgacataagcctggcgaggaggagcacagacagcgctgcagagagagagatgtcagcaccgaggcagatagcgtctatgtgcgacatgcagagagactgcgcgtcgatagacgagagcaagcgacgagagcaaggccaccgcggtggttcgtggatcacagcgagctcgagcgtgttctactgtctaagcggggtgtctttacaggtctgaaaaagattttggaagtggggggctctctacaggaccctcctggggagctcgcagtgaccgcaaacagccgcatgagcgcctctattctcctcagcaagctctttgatgacctcaagtgtgatgcggagagggagaatttccacagactttgtgaaaactacatcaa

SEQ ID NO: 2687 - DNA, 531 bp, Homo sapiens
  SIMILAR (9)..(521): 271254mologous to Ciona intestinalis myoplasmin-C1,accession number D42167,Smith-Waterman Score=187.
gcctgacttcccgggtcgaggctgtggaggacagggaaaacaagaaggtgggaaactttcattttctattggcttaagctaaagaagacaactgcaaagtcacaatcatgttggagaatgtgctggcttctcacagaaagatgcaaggtgctctggagaaagtacaaatagagcttgggcggagggattcagagattgcacgcctcaagaaagaaagggatctcaatcaacagagggtgcagaagctggaagctgaagtggaccagtggcaggccaggatgcttgtcatggaggaccagcacaacagtgagattgaatctctacaaaaagctctaggtgtagctagagaaaacaacaggaaacttgctatgagtctggaacaagctctccagacaaataatcatctgcaaacaaagctagatcacattcaagagccaatggaaagcaaagaacttgagcgacagaatttggaaaccttcaaagaccggatgactgaagagtccaaagtggaagcagaattgcatgctgaac

SEQ ID NO: 2688 - DNA, 486 bp, Homo sapiens
  SIMILAR (259)..(456): 301254mologous to Brassica napus unknown,accession number AF056525,Smith-Waterman Score=62.
atgttggataaagaagccaaaccatacaaagttgatccttttgtaattatcattaagtttctgttggggtataaatggtttaaagaattgtgggatgtattattgttaccagaattagatgccgtcattttaacttgtcagagtatgtgtttccccctgatatccttgattctctttctgtttggaacgtgtactgcctactggagtggcctactgtcttctgcatctgtgagacttctttcttcattgtggctagctttgaaaagggatctcaatcaacagagggtgcagaagctggaagctgaagtggaccagtggcaggccaggatgcttgtcatggaggaccagcacaacaataattacatggaaaggctaaagtttcctcctaggatcacaggacctgtaggaaccaagttagcctctccaggggagaaagaaaaaaactgcgtgcctccttgtgtcatagccataattcctggattgtag

SEQ ID NO: 2689 - DNA, 441 bp, Homo sapiens
  SIMILAR (11)..(112): 641254mologous to Streptomyces coelicolor A3(2) conserved hypothetical protein,accession number AL390968,Smith-Waterman Score =113.
atggccaatgccttcctccttaatgattggttgcttagctctagcagtgtctacagaaattaaagttgacaagaatgaaatagaggatgcccgctggttcactagagaacagttcctctgagaggacggccacatccctgaagaggacagttggccttggcagtgctgacttcatcatgatgtctgacattagattaccgatctgtttagagctgtctatggaaatggggcttgggcaggaaactctacgacctcagtaccgccgcacctccgccctgtcgcgggagcccctgcaaatgcgtccgtggctcccgcgcctgcgcccaccaaaccattacgaggctccgccacacaactcagcaagggccacgcagggcagcgcgggaaccaaagagcccagggaagtggtctccgcccccagaggaggcaatgagcgactaa

SEQ ID NO: 2690 - DNA, 610 bp, Homo sapiens
tccgaccagcgaggcggaattcgaaagtcaaagaaggctgctgggcttaaaatgtcatgagaccaagttacagtttagccctgcatgtttgaaaagggagagagaaaagaagctcacaaggaattccaatattcagatgtgacatatagaagaaagtgtcgacatgaaagaattatccgccagagaattcagaggaaaatcaagaatgcattatatcatgaaagtaaagaaaggataatgacccaaaaaagagcttggggcaagatggccgactagacacagcaagtggaattaccgccagcaagggactgagacaactggcgcactcctaacaaatcatccgatggaaggcaccaggagtggccgagggaagacacagaaggaagctgggctgaaacaggaggaacattgcactgggctaccatgcgctgggacttgttcctggcccccaaggactctcagggaatgggtgagttgaacttgcaaggagcaacctgttctaaccacggacctctggaattccagctgcaggaggcccctcaactgccatggacactcaggttggcagccagagctgcttatagaagtggtaggggcagcaagccagcgt

SEQ ID NO: 2691 - DNA, 626 bp, Homo sapiens
  SIMILAR (298)..(606): 321254mologous to Homo sapiens Human receptor molecule (REC) encoded by Incyte clone 965938,accession number Y32196,Smith- Waterman Score=88.
tatcagtacaaataaaattataatgaaaagtctatgaagataatttgttctcagatgcccttcacatatagcaattaattcacaaatgatgagtcactcatgtgccttcatgaaggcaggccctcaagagacccgcaacagaaaggaaagccaccgactggagagaacctgcttcctgagccccaccaagttccaaaaaggagaatgggggcttcgtcctcaccctcaaggagttgccaaactggggcttggttattattcacactttgaaaaggaatgagggaaggtcagccagtcccctccaggtcgctcgggcttcctccaagctcctcttggttcaaatttgctgtgtcctccagccggcatctctcctctgttccgtaactgacagggcagcgaggtagcttccggatgactcctcccgccatggttcttccgtccatcagctcttccttcctcaactctgtggtatgtggctaggggagtttccaactcccaggggacatttcagttccccaaagataacacagctttgcacagtggatgtttacttgctggtggtcttatctaagatcaacattggcagctgtgcccggagaggcctccagggtccaggtaagtggagg

SEQ ID NO: 2692 - DNA, 474 bp, Homo sapiens
  SIMILAR (330)..(205): 551254mologous to Homo sapiens AF-1,accession number U05875,Smith-Waterman Score=104.
  misc_feature (1)...(474): n = a,t,c or g
aaaaaacatgcactatacaatcttttatttccagtttaaaaacaaaatcttanattactaggagtatatttacaagattaattacattttaagccagcacaccatggatgtacatgaagggccactcggtgtccctcgctgggacaggttgtgtgacctgcccaaggggtccggctcatttgccaaagtcaagacgacgaccaggtcttctatctgtaatgggatgcttggtggagtgtgaaaccagtatttaatcaaggcctctatatttcaggaccagggaagaaacaggctcctgccagcaccgacagcaacgaaaatgtttcccacgggagattcaggattgactttgcttgaaagctcaagtggaaggcatctggccattngtttccgtaagccaagatatggtggcttaaaatgccccgacttctaaaagatggttaacttttgggtcccaaagcaagttgtggccng

SEQ ID NO: 2693 - DNA, 988 bp, Homo sapiens
  SIMILAR (1)..(390): 951254mologous to Homo sapiens chromosome 21 open reading frame 4,accession number BC000569,Smith-Waterman Score=689.
atggcaggcttcctagataattttcgttggccagaatgtgaatgtattgactggagtgagagaagaaatgctgtggcatctgttgtcgcaggctggtggataatgattgatgcagctgtggtgtatcctaagccagaacagttgaaccatgcctttcacacatgtggtgtattttccacattggctttcttcatgataaatgctgtatccaatgctcaggtgagaggtgatagctatgaaagcggctgtttaggaagaacaggtgctcgagtttggcttttcattggtttcatgttgatgtttgggtcacttattgcttccatgtggattctttttggtgcatatgttacccaaaatactgatgtttatccgggactagctgtgttttttcactgcaacctctgtctcccaggttcaaatggttctcgtgcctcagcctcccgagtagctggggttacagatgtatcctccactcctcgctggccaccatcctgctgcccaacaagaagaagctcttctgtctccgatttcctgaacggtctaagggagccagtgggctaggcccatgctttggttccaaagcgtttggagaacatcttcttgctccttttccggaaacgagataatggacacagagtcccagacgtcatcctttggaccaggaagaaacaggctcctgccagcaccgacagcaacgaaaatgttcccacggagatcaggatgacttgctgaagctcagtggaggctaaaaagaggacacgaaagtgaacagaatgatcttcctacgcacaacacaaacgtcagttaatgttccatccatgctgcttaaagagcattcctgtcctagtaaaatgggcaagtccctctaccccccaccctcacctggtatgcttacattaatagctaaagtcaatcctgtaatgaaataaagcaagtggtagctgtctggtagcctccactactgcaaatctcaaaaaaaaaaaaaaaa

SEQ ID NO: 2694 - DNA, 1781 bp, Homo sapiens
  SIMILAR (850)..(647): 511254mologous to Homo sapiens AF-1,accession number U05877,Smith-Waterman Score=126.
  misc_feature (1)...(1781): n = a,t,c or g
ccgggccccccctcgagtttttttttttttttttaaacatgcactatacaaatacaattatttcaagtttaaaaacaaaatcttgtaaattactaggagtatatttacaagattaattacattttaagcgcgagcacaccatggatgtacatgaaaggcccactcggngtgtccctcgctgggacaggttgtgtcgacctgcccaagggcgtccccggctcagtttgccaaagtcaaggacgacgaccagggtcttctggactgctcaagcccaaccaataatgaaaaaagtattcagaggatgtgtcgtatccgattttgcgtaacaagcgaattacatggcctttttaggtgtttaaggaggaggccttaatttttcctgggaatatctcccgtaaaatccattctgggaattttgatttttggaaaattcctttaaggaaaaaatagaaaaagcttggtcaccccccatgagaacctgccgttctctcatggtctggcagggacagggcctttttagaggcccgcaaaaggggaatacctggtcttctgggaaaggtcccaaacagaaacctctagcagcctccgatgggcttggatctttttccaggggagccagtgggctaggcccatgcttttggttacaaagcgtttggagaacatcctcttgctccttttccggaaacgggataatggacacagagtcccaagacgtcatccctttggtgagctgtccttggccaaaggcctctaagaatgggctgagttgggtcttttaaaatactccttctatctggaaatgggatgccttggtggaggggggaaaacaggatttaaaccaggcctctatatttcaggaccaggaagaaacagggctcctgccagcaccgacagcaacgaaaatgttcccacggagatcaggatgacttgctgaagctcagtggaggcatctgccattgtttcgtagcaagatatgttgcttaaatgcccgactctaaagatgttacttttgttccaaagcagttgtgcctggacttgtaaacagtacactctggagggttttaagttatccaatgaaatggagttgcttctgaaagggcctttgacctgttggattcctcctttttcccagtaatggacataataacaaaaaaaggccgtggaggtatcagcgatgtcaaagggagaggagaacctgatgatgagggagccttctcctggggtcacctcaatgttttctggaggcccgacagtcacattccgatagtgttgaaaccaaggcattgtcacccaggcagaatggagtgctcccagctcagctcgaaggcgtagagtgacattgaaatccattgggaagcctgctgagggactggcggcagtgaagtcacactctgttgctgtgatctgtgtacaattcacccctatggacatgatgtcggccgtgaaccatttactgtcggtgtatttaaactgcacttggtagacaacaggcctcgtgctattgctcagggccactggctcccaactcaggacctgctctgcgttgtacaggcgaatcttcgggtgctgaggagcgggcagctgggaaagagggtctggcggggccgcggcggcggcggcgaagactccgagcagcagcagcagcgaccacagcagcgtcggtcgcatggccccgggcgctcggcggcggctcaggtcgcggccggggccccgctcggggtccgcggagccgctcacgtcgccgcccaaaccgccatggcgagcgcagggcgcgcagggcc

SEQ ID NO: 2695 - DNA, 401 bp, Homo sapiens
  SIMILAR (401)..(351): 581254mologous to Homo sapiens Human giant larvae homologue,accession number X87342,Smith-Waterman Score=48.
cctggctaatttttttattttttgtagagacaagggtctccctacgttgtccaggctggacttgaactcctgggttcaagcgatcctaccaccttggcctcccacagcactggggttacaggcaggagccactgcacctggccctgtctttactgatggtcctgccccatgcctcccacacctaaccctgggcacccactcccgaaggaaagggaccgtaaggcacgaggctgcggaggggctctggttgctgggcttcgctggacacgggccactggcagtagctgccgtcagagtgacagctgacgagcaggcggccgtcccgctgccccagatgttctccagttgctggctgtgaggaaagtggtagagcacgcgctgccctgtaggtcccagatgac

SEQ ID NO: 2696 - DNA, 413 bp, Homo sapiens
ctcaggagggactcatgaacacgtgccctgagcacccccaaaatgacatcacacaagggcagaaaggagctgaagggggaacgtgaaaggcagaaagggagccgtggttgccaggcaaccagccctagcccacctttgtttgtttggtgacagcaactaaggtctggtcagggccgcttggccacgctcatgccttttcctctcaacagttgcttctttgagtcagggtgcagctctggtcacctggcggcctcttcagctcagccctccacaaagtgtgagcctgaaggaccaccctgaattgcccttgtaggacccagaacagctaccagcagaatcagattctcatggaccaactggtattcaaagagacaatctggaatgatgcgttctggcagaacccctgggaccag

SEQ ID NO: 2697 - DNA, 805 bp, Homo sapiens
  SIMILAR (1)..(291): 951254mologous to Homo sapiens Human giant larvae homologue,accession number X87342,Smith-Waterman Score=507.
ccctcgagacccaaccagatcctgatcggctacagccgaggcctcgttgtcatttgggacctacagggcagccgcgtgctctaccacttcctcagcagccagcaactggagaacatctggtggcagcgggacggccgcctgctcgtcagctgtcactctgacggcagctactgccagtggcccgtgtccagcgaagcccagcaaccagagcccctccgcagcctcgtgccttacggtccctttccttgcaaagcgattaccagaatcctctggctgaccacttaggcagggggttgcccttcaccatcttccagggtggcatgccacgggccagctacggggaccgccactgcatctcagtgatccacgatggccagcagacggccttcgacttcacctcccgtgtcatcggcttcactgtcctcacagaggcagaccctgcagccagtaggagagcttcgggagtgggtgcccagggttaggtgtgggaggcatggggcaggaccatcagtaaagacagggccaggtgcagtggctcctgcctgtaaccccagtgctgtgggaggccaaggtggtaggatcgcttgaacccaggagttcaagtccagcctggacaacgtagggagacccttgtctctacaaaaaataaaaaaattagccaggtgttgtggcacgtacctgtagtcctagctactcaggaggctgaggtgggaggatcacttgagcctgggaggtggaggttgcagcgaaccaggatcatgctactgtactcagcctgggtgacatagccagactgtgtctcaaa

SEQ ID NO: 2698 - DNA, 1169 bp, Homo sapiens
  SIMILAR (253)..(399): 581254mologous to Homo sapiens Human giant larvae homologue,accession number X87342,Smith-Waterman Score=125.
atggtggaggcactgcaggagcaccctcgagaccccaaccagatcctgatcgctacagccgaggcctcgttgtcatctgggacctacagggcagccgcgtgctctaccacttcctcagcagccagcaactggagaacatctggtggcagcgggacggccgcctgctcgtcagctgtcactctgacgcagctactccagtggcccgtgtccagcgaccagcaaccagagcccctccgcagcctcgtgcttacgttgcccttcaccatcttccagggcatacgggccagctacggggaccgccactgcatctcagtgatccacgatgccagcagacggccttcgacttcacctcccgtgtcatcggcttcactgtctcacagagcagaccctgcagccagtaggagagcttcgggagtgggtgccagggttagttgcttctttgagtcagggtgcagctctggtcacctggcggcctcttcagctcagccctccacaaagtgtgagcctgaaggaccaccctgaattgcccttgtaggacccagaacagctaccagcagaatcagattctcatgggccaactggtattcaaagagacaatctggaatgatgcgttctggcagaacccctgggaccaggggggcctggcagtgattatcttattcatcaccgctgtcctgcttctcatcttatttgccatcgtgtttggtttactcacttccccagaaaacactcagtgtgaagcgggtgaagaggagtgacctgacttgctggggactgagatggcagcaggggaggcgagctgacctgcccccattccagtggtgggccccttcgcggttccctctggctcaggggccaagccctggtgtcttcctttcccatcaggaaaaagtctagtaaaatactgtatctggcttagggttggtcagactagtaagatggggaggctggtctgagaccaattctggctccttgaccctattgtttttagggttccccgaccagaaccctaaaagcacatggagaggatggctccactgcctcaggtggaaggagctatggctaacaaggttctctaacaggctcacaggcccagccagcgaatttcacaaatccttgacagagaaagacacaaccaaatgaaataaaaattccttttcaaatctgct

SEQ ID NO: 2699 - DNA, 297 bp, Homo sapiens
  SIMILAR (160)..(2): 351254mologous to Homo sapiens dynamin,accession number L07810,Smith-Waterman Score=71.
atggactcaaccgtgtgcaggcgcctgcgggcggtatcctcggcgacgccgtatggcttccagggcgaggccatgtaccgggtgcccgagttttatgcgaggaggaagcggttaggtgggcagaccccttacttgatggatatcaccatccatcttcaagaagctactttgaaagtctggccagtgtctattcaggcccactgggagttaggaagtataaagacatttgacgatgtggagatgtttttggttgtcacagttgggtgggcgatgagggaggctgctgctggcatctag

SEQ ID NO: 2700 - DNA, 3179 bp, Homo sapiens
  SIMILAR (754)..(299): 461254mologous to Homo sapiens MDMCSF (EC 1.5.1.5; EC 3.5.4.9; EC 6.3.4.3),accession number J04031,Smith-Waterman Score= 230.
  misc_feature (1)...(3179): n = a,t,c or g
ttttgatggcaaacttgtttccttgttattctgttggaacgtcactaaagtaaacagacatgcatgatttattgttaatttatacatgatgagaattaaggctgaaaatgacttctggggaaactccctactattagtttcagatcttctgggcaggggctgacttctcttggcttacttatacttcctaactcccagtgggcctgaatagacactggccagactttcaaagtagcttcttgaagatgggatgggtgatctgtttaggaataatcccattcaccctgttcctgtttcaggggtcccaaatcaatatcactaaaaaacagggggccccggggggggagtccagggcattggtgctcatcgttccttaactttnaaanaaaggngggggnggnnttttaaanccccgaaaaccagccccaacgctggcgcgggatgtcgcgaaatggggcagaatgaagccctgtaggggacacctttttgctctggggttgtgagacaaagacaagggggggttttagccatgcagatgggggagattcccaaagccctgcttcgtgtagacttacctttttgtggtagaacttgggggaagtattccaatgccatctgctccatagatcttctgtgcaatgaaccggatttttaccccaacggggaactttaaggtcataaaggagctggaagctgctgggtgcttgtgctgctctctggacggggctgagccagggctaaggcacccttgcccccttctgcccagtgagtgcacttcacggcatcaaaagccccatgttctctggaaaggcggctgatgaggtccagctcagactctgtatccgtcttgaatgcattcacggccactactactggaattccaaacattctggcattttcaatttgtttcttcaagttactgaagcctttttcaaccagctccaggttctcctgtatgtaagccttgggaagaggcagtccagcagtgaccgtggggccgcccccgtgcatcttgagagccctgacagtggcaacaagcaccaccacgtgggggcagaggccggaataccggcatttgatgttaaaaaacttttccattccaatgtctgctccaaatcctgcttccgtcactacaaacccttctgggccaacaagcttgagtgcgatccggtctgcaatgatggaggaattgccatgtgcgatgttggcaaacgggccagcatggacaaacactggagtgccctccagtgtctgcatgagattgggcttgattgcgtccttcataagcactgtcagtgcaccactcacccccagatcttcggcactgacgggctctcctttcttactggatgccaccaccattttgcccagtctctctctcatgtcttctagagaagtggtgagagccaggacagccataatttcactggccacagagatatcaaactgggccgtccgtgtgtgacccttctccgttggagcctgtccaatcgtgatcttcctcaggaatctatcattggtatccaacactctttgccaagttatggtttctggatcaatgtccaatcttgcaaatctgtttatctcttcatctgtcagtgtggtagggtcagtcttttcaatgcctagtctctttaaccttcggatttggatgtcagagaaccttctcactccatttactgatggcaccaaacgattaaagagagccttgtctgtctgggtcagttcatgaaatatccgagcatcaatggccgcagcaacgaggttattagctgcagtgatggcatggatgtcacctgtgaggtggagattaaactcttccataggaatgacctgggagtagccgcctcctgcagcgccaccttttattccaaaggtggggccctgagaaggctgtcgcacacacgcaaagacattctggtagagatgggcaccaagggcttgcactagcccgattgtagttgtgcttttcccttctcccaggggtgttggagttattccagtcaccaccacgtatttcccatcaggccggtgcttcaggcgttctagtgctgacagcagaactttggcctttgtttcaccatataattctacctcttcagacagcagaccaatttctcgagccagcttaccaatgggcttcggtttacaagatcgtgatatatcaatgtcacttggaacaggtgtcttgaggttaaggttgttatactgaatcatccactttcctggcttaaatttctccaggaaacgcttggcactctctactgtgctctgcatgagcattgcaactgtcatgggccctacgccgccaggaacaggagtgatgaagctcgccctctctttggcctcgtcgtatgccacatcacccacaacttttctcccatttggttttttatcatctgggacataattgattccacagtcgatgactattgccccaggtttgatccactcccctttaaccatttcaggctgaccagttgcaaccaccaggatgtcacctttatttacctcctcatccagatgggcagtcttggagtggcaggtggtcactgtggcattgttccacagaagcaagtcatgcatcggggccccaactattttactgcgcccaaccaccacagcatgccttccggcaatcggcacccctgtctctttgatgagttccaagcatcccttaggcgtacaaggaatgaaacagtcattgaggtcacctctagcaagtctcccagcattgatgctagtcaatccatccacatccttctcgggtgcaatagcattgatcacttcttcagtgttaatggaattctctgaatctaaaggtagctgcactaagaacccatgtacagtagagtcttcattcaaagatgtaatgtacttcatcacctcagattctgtggttgttcttggtaacttaatgtgagtggctttgatcccaatctcttcagcagccttcagcttcacatttatataaagattggaatcatctctgttgccaacctgtaatattgccaggcgtggtgtgaaaccaggtacttgctccttcaactgagtgacttgatttttcagtctcgcccttatttgcgcggagatctccttcccgttcaggatttctgctggcgccatggcctttattagtccgctgcccacgatggacaccaccaatatcgaggttccac

SEQ ID NO: 2701 - DNA, 414 bp, Homo sapiens
  SIMILAR (391)..(20): 361254mologous to Mus musculus pro-alpha-1 type II collagen,accession number M65161,Smith-Waterman Score=99.
atgagagagcggccagacgcccagctcgcccctcgccgggcatcagcctcgctcccctccccgtctatcccggcccgaggggccctggcgccggctcgctccgtccccgcggccgtaaagcgcgctgttacacgactgcgtcgcaaacaaaacacgtcggggaaaccagaccgccgcggagagggacagcgcccagcgaaagcgaggctgatggagcgaagccaggaagaggatgcggagacgcggggagagcccggggactgcatgcgtctgcgcagctgcgaggttaagccgccctttggcggtccccaggacggttcctggtgccagacggtcccacccctcatttccttccccatatttggcaaccagaccagcatccaggacaacataaactatgccactggttgttag

SEQ ID NO: 2702 - DNA, 278 bp, Homo sapiens
  SIMILAR (1)..(276): 1001254mologous to Homo sapiens DHHC-domain-containing cysteine-rich protein,accession number U90653,Smith-Waterman Score= 524.
tgcatgggcgccatctttgctggccaccttgtggtgcacctgaccgccgtctccatcgatccagcagatgccaacgtgcgggacaagagctatgcggggcccctgcccatcttcaaccgaagccagcacgcacatgtcattgaagacctgcactgcaacttgtgcaacgtggatgtgagcgctcgctccaagcactgcagcgcctgcaacaagtgcgtgtgcggtttcgaccaccactgcaagtggctcaacaactgtgtgggcgagcggaactaccg

SEQ ID NO: 2703 - DNA, 504 bp, Homo sapiens
  SIMILAR (29)..(502): 961254mologous to Bos taurus 32 kd accessory protein,accession number J04204,Smith-Waterman Score=774.
ctccgggcccgccgctcccgcaacacccatgtcgatcttcccggagctttactttaacgtggacaatggctacttggagggactggtgcgcggcctgaaagccggggtgctcatccaggccgactacctcaacctggagcagggcgagacgctagaggacttgaaactgcatctgcagagcactgattatggtaacttcctggccaacgaggcatcacctctgacggtgtcagtcatcgatgaccggctcaaggagaagatggcggtggagttccgccacatgaggaaccatgcctatcaaccactcgccagcttcctagacttcattacttacagttacatgatcgacaacgtgatactgctcatcacaggcacgctgcaccagcgctccatcgctgagctcgtgcccaagtgccacccactaggcagcttcgagcagatggaggccgtgaacattgctcaaacacctgctgagctctacaatgccattctggtggacacgcc

SEQ ID NO: 2704 - DNA, 1323 bp, Homo sapiens
  SIMILAR (865)..(1269): 1001254mologous to Homo sapiens Human signal peptide containing protein HSPP-97 SEQ ID NO:97,accession number Y87320,Smith-Waterman Score=671.
atggcggagcaatgggagctggacgaggaaggcattcgccgcctgggggcgctgacgctggagcagccggaactggtggagtctctttcattgcagggatcttatgctggcaaaatccattccattggtgatgccttcagaaattttaaaaatctccgatccttagatttatcaaggaatttgatcactagccttaagggaatccagtatttatgttcactccaagacctgaatttatattataacaacattccttcattagtggaagtgtcccgtctacaaccgttacccttcctcaaagaactggatttgagacttaatcctgttgtaaggaaagatacagattataggctctttgctgtatatacactacaaactctggagaaattagatgaccgaactgtacgtgaaggtgagagaaaagctgccaagctgcattttagtcagttgggcaacagtgaaaattttcttttagaggtggaaaaaagctctagggagaagacaatgaaaaactgtgtaacagatctgtatgccacaacccatttcaacagtgaccctgctgtacttgtcaatgtagagcaacaattatctaccagcctggatgatttaacaccagcacatggttctgtcccaaacaacgctgtcctgggaaacaggacaactcctctgcggacactgctgttgtctcctgggacttcagaacacagaaagatttttaccaagaggtcactaagcccatcgaagagaggattcaaatggaaggacaatatccttgccaacctgaatctaaagcatggtttccaagatgctacaggcagcgaggcaagtgttggcttgtttgtgtttgtgcgagaaacaggtcaggaaagtttgaagcaaaaactggtcagagtgctggaggaaaacctcattttgtcagaaaaaattcaacagttggaggaaggtgctgccatctcaattgtgagtgggcaacagtcacatacttatgatgatcttctgcacaaaaaccaacagctgaccatgcaggtggcttgcctgaaccaggagcttgcccagctgaaaaagctggagaagacagttgccattctccatgaaagtcagagatccctggtggtaactaatgagtatctgctgcagcagctgaataaggagccaaaaggttattccgggaaagcgctcctgcctcctgagaagggtcatcatctggggagatcatcgccctttgggaaaagcacgttgtcttcctcctcaccagtggcacatgagactgaggctctcaccgccattgccaccagtatggtggtatgtactcacaaagattaa

SEQ ID NO: 2705 - DNA, 4263 bp, Homo sapiens
  SIMILAR (466)..(768): 671254mologous to Homo sapiens DHHC-domain-containing cysteine-rich protein,accession number U90653,Smith-Waterman Score= 321.
atgggaatggatggtgccacaagggatgccagaggggacttgtccctgagtgatgacagtccagtgacagtgctgatggtccatgcctgtcagagcactgattatggtaacttcctggccaacgaggcatcacctctgacggtgtcagtcatcgatgaccggctcaaggagaagatggtggtggagttccgccacatgaggaaccatgcctatgagccactcgccagcttcctagacttcattacctctgccttcatcaagctcctggagaagctgagtggaggaaaggaccttgggatctgcaggctcggggagggcacctggactgcacggggagggcacctggactgcacagggaggccagaatgtagtggcacgttctcggctcactgcaagctccgcatcccaggttcaagtccctggaatccattcctctctgtctcagctgagacaatacttcctcagtgcatgggcgccatctttgctggccaccttgtggtgcacctgaccgccgtctccatcgatccagcagatgccaacgtgcgggacaagagctatgcggggcccctgcccatcttcaaccgaagccagcacgcacatgtcattgaagacctgcactgcaacttgtgcaacgtggatgtaccccactcaaccaccccgaccggccgggccgcagagcggggaatgagccgggccaatcggcgctgtgccccctctccctgcaggagcgctcgctccaagcactgcagcgcctgcaacaagtgcgtgtgcggtttcgaccaccactgcaagtggctcaacaactgtgtgggcgagcggaactaccgtgttgcatccgctttactgggcgtcctgctcctggtgctggtggccacatatgtcttcgtggagttctttgtcaaccccaccctcctggggcacctgctctgcttccacatttatctcatgtggcacaagctcaccacctatgagtacatcgtgcagcaccgcccaccacaggaggccaagggggttcacagggagctcgagtcatgtcctcccaagatgcggcccattcaggagatggagttctacatgcggaccttcagacatatgcgcccagagccccctggccaggccgggccagcagcagtgaatgccaatccctcccagtttcttgccacccgtggccaagcggaacctccaccaccctcttccccagacactctcgccctgcctccccggatccgaccccagggcctagggcccccagccgccgctccagctcgtcgacggattccgcggacgccagccctgtgcacgccgctggccctgccggcgcctaccactcggcgtcggcagagtccgtggacgagattccagtggcgcagacgcgcctgggcagcgccgctctggccgccccgcggggccggggccgacagcccacgctggcgcggcaggcgcgaagccccgcgctctgccggggccctggaactcaggccaccggctccaggcggaagcgagcccaaagccggccaggcggcagcatccgctaccccgtggctcaagccaggctccgagccgcgcctcagaccctcgcggtagggacggtccccgggactgggcggcaacgcgcccgggagcggggccccatcccggacggagactgggccggaaatgatgctgtccgcatcatcaacgaatggaagttttgtggccgcgagctgctcaggggtgagcgcgccttagggtgtgtgcgccagggacctggcgcagccgaccacgtgggagtgcggcgcgtgtacgggcgcgggcggcagcggcagcggcagcggagaccgggtgagcaccggctggttcctcgcggtgttcctgcaggcttggcggccgcggtggtgcgatcagcaaagggcaccgggatgccggttactctagataacctgaaggaagggaaacaccatctacgcgtacggcctgcagacctacctgttgctgagagagcatctctgaactactggcgtacatggaagtgtattagcaaaccctcagaatttccaattaaaagcccagcctttacaggcctacatgataaggcacctctggggctcatggacacacccctgttagacacagaagaggaggtgcactactgcttcctgcccctagacctggtggccaaatatcccagcctagtgactgaagacaacctgctgtggctggctgagacggtggccctcatcgagtgcgagtgcagcgagttccgcttcattggtgattgctctgtccgggtgaattttcttcgctcacagaagattttactaccggataatttctccaacattgatgtattagaagcagaagtggaaattctggaaatccctgcactcactgaagccgtaaggtggtaccggatgaacatgggtggctgttccccgaccacctgttctcccctgagccccgggaagggggcccgcacagccagcctggagtccgtgaaaccgctctacacaatggccctgggtctgctggtcaagtacccggactctgcgctgggccagcttcgcatcgagagcacgctagacggaagccgactgtacatcacagggaatggcgtcctctttcagcacgtcaagaactggctggggacttgccggctgcccctgacagagaccatttccgaggtatatgagctctgtgccttcctagacaaaagggacatcacctacgagccaatcaaagttgctttgaagactcatctggagccaaggactttggcacccatggatgtgctcaatgagtggacggcagagatcactgtgtattccccacaacagatcatcaaagtgtatgttggaagccactggtacgcaaccaccctgcagacactgctgaagtatccagaactgctgtccaaccctcagagagtgtactggatcacatatggacaaaccctgctcatccacggggatggccagatgttccgacacattctcaacttcctgagacttggcaaactgtttttaccatctgaatttaaggaatggcccctcttctgccaggaggtggaggaataccacattccatccctctcagaagcccttgcacaatgtgaagcatacaagtcatggactcaggagaaagaatctgaaaatgaagaagctttttccatcaggaggctgcatgtgaccacagcctacatgcctgtggacttcgaagactgcagtgacaggactccatggaacaaggctaagggaaacctggtcaggtccaaccagatggatgaggctgagcagtacactcggcccatccaggtgtccctatgccgaaatgccaagagggctggcaaccctagcacatactcacactgccgtggcttgtgtaccaatcctggacactgggggagccaccctgagagccccccaaagaagaaatgcaccacaatcaacctcacacagaaatctgaaaccaaagaccctcccgccactcccatgcaaaaactcatctccctggtgagagaatgggacatggtcaattgcaaacagtgggaattccagccactgacagccacacggagcagccccttggaggaggccaccctgcagctccccttgggaagcgaggctgcttcccagcccagcacctcagctgcctggaaagcccattccacagcctcagagaaggatccaggaccacaggcaggggctggagctggagcgaaagacaaggggccagagccaaccttcaagccatacttacccccaaaaagagctggcaccctgaaggactggagcaagcagaggaccaaggagagagtgattttttacttttattcttgtcttttgatgagctacgaggctccgtgcaatcttgcctgtggctgccgggattcgcgctacgggttattgggaatccagtatttatgttcactccaagacctgaatttatattataacaacattccttcattagtggaagtgtcccgtctacaaccgttacccttcctcaaagaactggatttgagacttaatcctgttgtaaggaaagatacagattataggctctttgctgtatatacactacaaactctggagaaattagatgaccgaactgtacgtgaaggtgagagaaaagctgccaagctgcattttagtcagttgggcaacagtgaaaattttcttttagaggtggaaaaaagctctagggagaagacaatgaaaaactgtgtaacaggtgagagctctgcatcaaaagtcagtgctaatgttgacagcaggattgaaatgg

SEQ ID NO: 2706 - DNA, 1234 bp, Homo sapiens
  SIMILAR (1120)..(1191): 501254mologous to Homo sapiens Human secreted protein, SEQ ID NO: 4999,accession number G00918,Smith-Waterman Score=69.
attctgtaacggtttttggccaagttttggtaagaggttgattctctttgccttcatttcaccttcctcttcgtttacggctaggacatcgctgcttgatccttacaatactgtgcaactgcaatgcaacgtggccctgcttcaggagatccgcgggaggggcctccacgccagcgccgggaaggctgctggggcctccacacctgcctcatcacggcggcgaggctacgacaatccggctgggagcatgaccttggcgtctgttctgggagcacatatgataaacctttgaaactggccggtgtgtaaagcactggcaagtttgttactgttaaaatgtcaaataccaatgctttatatcgacgcgaagtgcttaacacagccgggcttgggggcagtcaggaggaagctggccatccgtggaggaggggccggtcctggactcccgcaggactcctctgaggcagggcctgaagtctgtacacgtggaccagatttgtccttgtcttttcttcacactgagttctctatatttattgaacatcttgcccttttaagccagagtagggtaaactgcgtctcggatgtctgtcttttgcctcgaagccacgatggatcgctggtttcctctgcagcgcgagggcttcggcgaccagaggattcttcccggaaggcattcctggcgggcctccccggggcacccctcaattgtgtactacgtccttgtttagtgtgtatccgtgcccacgtagatgatgtctgtaacgtagttttgtttgaaatatgagaatatgcggcttaaactttgatccaggatgcaggagtaggcagtcaccacatgggatccacagccccaggtcagtggtaaagcaggggagagtatgtggggaggtgtccggtcttgggctccatggctgccctttgctttgtaactcaaacccatcaaggcttctgtcaccccagaagttttacgtgtgctcctgggtggaagcctccagtctctctgcatactgttttcacattgattcatgttggtcgcacccagtagtttgcttatttcatgactgaaggatgctccgttgatgtgtggactgcgtctcgatttcttcttcaggtgatgggcgttcaggctgttcccactgcttggctgaggaagccgcgacagcaagtgccctgggccgccagcctggtgggaagtagggcaggacgaaaacaggaacttgaagtgggtcat

SEQ ID NO: 2707 - DNA, 1447 bp, Homo sapiens
cccgtaaattcccgggtcgtcgatttcgtgtgtccttggagtccacaatgatacgtgagaagtttacccagccacagtttgagactgtccatgaatgtgatttggctgaacctaaagaacgttcaatttaagccaatccagtatctatactgtagacctcagtgaaggctggaagactaatccaacacaatctgacatcctgattctttccaatcacctttatgttccaccctctggaaatactcgcggagtttccgtaactaaggaagagacgctgctgctgcatgacggtgtgctaggaactaaagaagtgatcatagcaccggctgaggaagcagtcaacatgcagactgagcacagacaagagaaatgtagaaagcagaaattaagcccatgtctcccatcctctgcatttcttgtcattttagaaatcttttccaatgtattccccttcctctgctgccagaataggaaaaaagaatctatagtgacagagagcagatcagtcggaagagaagattttagggtaacagatatattctgtatcttgatcgcactgctggttacacagggccagcatccagggagggaggaagaggacagggacaacaatcagcagggcccgtgtaagcatacacttcttatggatgactcctctgacaaccacacggggaggctcgtgtggtccctgtttgtcatccagtcaatacggccatcagcttctggccccagacacctttcctctgcactgtggcacagaggagcagactgctttggagggcagcttcctgggagctccagggaccctggccaggcggccactgccactgacttcctcggctcactgagcccgtgcctgcagctctcgtgtttcctctgtgctgcagtggacgcttatcttcccccgatggcacatttctttgtcacagacaggaccctcactggcagtcgaaagaggtattcctgtaggaaccttgaaaatctaacagacattggatccagaatcattgggctttttgaaacatcctatggcctggcaatggacatttctatgtgggttggcagcatcagacaggggtcagctcaagtgcctgggattgggagttgggtacatgatgaacagagtgacatggagaaggctgcagcagctggcccatcatacatgcaagtcagggcatatgttgcacttactcggtgccagacactgtttaaggtgctctgcaaatatccaatcattgattcttactgtaaccctatgaggatcaggatacataagcagcaagttcaaagactgaaggaacaaggaatatcagctcataaagatgagaaagaatcagagcaagaactctggcaactcaaaagccaaggtgtcttcttacctccaaacaaccatattatttcgttagcaacgattcttaaccagactgagattgctgaagtaacataa

SEQ ID NO: 2708 - DNA, 477 bp, Homo sapiens
  SIMILAR (205)..(390): 411254mologous to Homo sapiens alpha-2 collagen type I,accession number L47668,Smith-Waterman Score=74.
tttcgttggtggacgaaagcgctgagtttttgtatttttatacaggctcccaggtaatgcttgggaagaactggtgcttcttggacagcaacacttacaaggcaacgtgatcttgagctccacctcgaaggatgtgagctgggaaagttccagctcacagagatttagtcacttgagaaatggtccacttcctccaaggtgtttcttggatgccccaaagggatgaaaacaagaagtgaccgtgggcgaggaggaggagctggccgacctcctcggttgccagcccgtcggagctcaccagctaagcgagggcgggaagacagcccccgggccggcccacggattattagaaggcgcggacctggaggaggcgccccagaaggcgacgcctcttgcctcctgtctctcgcctctcgaaggaagtttgctcttaatttcagagccgggttcgccgtcggatcaacctccaggagctag

SEQ ID NO: 2709 - DNA, 1091 bp, Homo sapiens
  SIMILAR (448)..(257): 731254mologous to Homo sapiens Homo sapiens BARD1 Pdelta1140- 1160 sequence,accession number W54083,Smith-Waterman Score=245.
atgcccggttatgtaccaatccaccctcaccagcaagtaatgcttgctgcaaaacagatccatgtgcaacacaaggcagatgtcagctgcaagctgaatgtgaggccacacctccagacggttcttcagcccgctgaagttcaaaaactaccgtttcagttggattcagggcaaggggaggccgcgcgggaacggaaggaggaaacggaagatttgaaaagattctgccgcccccagaaactgtgcgacgcgtgccctcgcagccacccccaagaagctccgtctttaccaacgcgagcagcgcagcagtcttctccaggcggtcgagcgcggcgcgactgtgggcccaggcaccgcgaccatccggttccatggcgggcgcggaacgaggctcgttcccggagcggatcctcggctgccggttcctcggctgccgattatccagcatcgtcccgccttcggatgaaaggctcctctgagagcgggaagcaaggaggcctccggaaaccacagggaagctgcaggtcagcgactcgaaaccggccaagctcttcccgcagtgtagtaagcccattgaggactggggctatatcttattcacctttgttcctccaggaagtccagctagcttcatctctcaacaggaagacatatccacaggaaaaggtggagagtactacatcaagggaacactccatgggacaaaaaaatctgaacagcagccttcagccctagaccttccctctgacagagcctacccaaatgagaaggaaacagtaaagcaaccctgtaagttcaaggccacaaataacttcaagagacatgagaaagcatactactacaaatacaaatatttgatgccttacaaagaggcccatgtgaaaaaggaactaagtgtagccttcagccaacagccaacaaggactgaggccaataaagaatggaaccgtgccaacaatcatgtagtgaacttagaagcaaattcttccacagctgatcattggaattactgcaactcagatgataccttgatggtagcttgtaagaaacctgaagcagacaacacagataagcagggcccagattcctga

SEQ ID NO: 2710 - DNA, 3108 bp, Homo sapiens
  SIMILAR (364)..(969): 991254mologous to Homo sapiens unnamed protein product,accession number AK001040,Smith-Waterman Score=1085.
atggaaagatttgagggtgaaaaggatggctgtgatccaaatgataatgtcttcgataaatgtgtgaaaattactgggaggttggtccatggccaagcagagaggaagacggcaacccggcgggcacaaggtcggacgacctgctacgtaactcgcgcgtgtgactgcctagtaacagtgtctcgagtcggaagcgctcggagcgaggggcggggtgggagagctggcgcgcgcacgcgtaaagtctttgcagcctcgctacggggcggagtcttgcctgtcagcaggggcagagtagcgatcgtcgccaaagcgcgcggttttatttctctccgctttggacggggcaaactagcttttgggagtgaagcggggctagattggccgaaccctgagaggaatcgggctggggtcccgggaggggtgatccgaagagctggttcccaagggcccaggtcctggatccaaaaggttcttgagcagattatggactcacctcgccagtgtgtcaccccctcggaggtggtgcctgtaactgtgctggccgtccagaggtacctgttagaggatgagccacgcgacacggtgcccaagcctcccctttattgctatgatgtgacgatctcagatggggtgtaccaggagaagtgctacctggaccccagcttgaactctctcgtatatcaaaatattcttaaagttggcattcaaatgagaatttccagggtctcatgtctttacaatgagaaaaggataggccaggggatcctgtgcatagataacgtccactgtggggagacttcagacagtatttctttagaaactcccttcagaaatagagcgcaccaggagaaaccagagaggcctttaagaggcgggaagagtcattacctggcgctgtggaataacgaagatccctatggagatatctggttaacagacaagcaacctgaggaacacaactttagcggtctgaaccatgagatagcaatcgatgttgctttcctacccatgtattgtccagaagatattcgaacatctcaaatagacacactgttgacctccatgaattacagctgtgcatatccacaggacacaactggaaatgaccgattgccaggtccaagagcggttgcagctagagtagaaattcaagaaagaaatggtaaacggcatcaagatgatgagcctgtgaattctcagtatttccaaactacatctacaaatttaagtctgagcaataaaataagaattcttcaaggcccacacgctaatccagttgctgtacctcaaccaggagcttctgtacaaacaaagggaattaaaccgggcatgccaagcatcttcaaccgtcgagcaaatataaatgctaatctgcaagggaaagccagaaaaactataagtgataggtgggagagtcagctgtggagagagaaaaagtttggcttaatagatcacctacactacagccgtgtttatcctgaaagtattccacggaaatttatgtttgaacacagaaagtttcttagtgaccagtataattctcagcctgcgaaatatgtaccaccagaaggaaggcccccaaaacttgatgattttaagagcgcccgaagccttggacattttgaagtaaccatactagaaatctgcctgaatcttcgcgatcccccaacaaatataattatcattccagaaaagcaggtgaaaccagaatggagactgccaaagctaaatcaccgatttaccacaaggtcagaactggatgatatgccagaaaattgcatctgtgatgttattggccttttagtttttgtaggaagggtccagcggtcaaaaaagaaagaaaaccgtgaagatttttggtcatatcgctggattcacattgctgacggtacttcagaacaaccatttatagtggaactgttttcaacatcgcagccagaaatctttgaaaatatttacccaatggcatattttgtgtgtacacagttgaaagttgtcagaaatgacaatcaagtacctaagctgctttacctcaccactacaaatgagagtggagtgtttattactgttgagtcgctcttgacagctataagtgaagtcaggaaggagattgaagacttgcagtatagggaacaaaagcgcattgcaattcaggggataattactgctataaagtatatcccccatagcagtgcgactgaaagtgcctcagcatcagaaacacttcgggtatggtggctcccattgcatttaggcagcaacccaaactctaccggggtctggaaggcaggccgtactgcggaggatggcgaactttcagtaaagagccaaacagtaaatctttttgtctttccagacatgatctctgtcacaaccattcacttttgccattgtatatggaaagcagccacaagcgataccaaaataatttccctttctcatcttgaaatgacctggactaacagaagaaattttcctgcattgcttgtgaggatcttacataaatcaaaactgcgatactatggaaaacctgataaaaagatgattgaaccatatcagacctttttggaagttgctgacagttcaggcacagtgtcagtgattatgtggaatgccctgtgtcctgagtggtataaaagtttgcgggttggtttagttcttctgcttcaagactattctgttaaaaagagttatccattcagaatacagcctgtccccgtggatccacagatcaaactaatttctacaatggaaatctgcctgaatcttcgagatcccccaacaaatataattatcattccagaaaagcaggtgaaaccagaatggaagactgccaaagctaaatcaccgatttaccacaaggtcagaacttggatgatatgccagaaaattgcatctgtgatgttattggccttttagtttttgtaggaagggtccagccggtcaaaaaagaaagaaaacccgtgaagatttttggtcatatcgctggattccacattgctgacggtacttcagaccaaccatttatagtggaactgttttcaacatcggcagccagaaatcctttggaaatatttaccccatggcatatttgggtgtcccgtt

SEQ ID NO: 2711 - DNA, 1203 bp, Homo sapiens
  SIMILAR (652)..(1059): 271254mologous to Sesbania rostrata chitinase homologue,accession number Z48674,Smith-Waterman Score=91.
atgctcagccgaccctctcttctacttcctgaggcccatacaatcaaaatcctctggcacctggaaccaggtagaaatgataggcgaggtatgcgttatccccacttcacagatgaggaaataggttccgaaaagaaacttactgaaggacacacagagggtcgagtcagagatccgctccaagccctatcttactctagtggccaccttctttttacttcacatcccatcataaaatataaaactaaacgaagtgttgatggttgtttaatgcgagcaatgcaggctgccaaaaaagtcatcaagagatttatccgaaagtcaggcttggatagactagctggcagtagtcatctttacctttggtcctaccgtctcaattgcatcctactacttgaatcatgtcacaaggtattaaaggaagaaagtgagattggtgagacagcagagacgctcaattccaaaactccaacagcaaaaggattgatcattttagaataccttgcctcacaatcatggcggaaggcaaaagtcacgtcttacatggcaacaggcaagagaggaaatgagagccaagtgaaaaaggaaatcccttataaaaccaacagatctcataagacttattcactaccacgagaacagaatggggaaaaccgcccctgtgatttcagttatctcccaccaggtccctcctacaacacgtgggaattttgggagctacagttcaagctgtggatcaagaccaagttcagaggtcagagacctagcaagaaattggagtgtgttccagatcttcaaataggtggggaacagagtccaccattactttcctcctctattattatccccagtaatgctttgagtccaggttatactgaggtgcatgttggagaatgggagcgggaccaggattcagtgacccacgtctgtttgaggctgttctatgttgttccatccaagctgagcgcattcttggcttcagataccctcctccaggtgaatgacgctctgatttgtgagaattctggtgcgcacagagttaaaatatttccaaatcctcgatctctatgctatgcatctatgactcagggtggggctaagggtcttgaccttgtcactcttcctgaggacaagacaagaggagcagatgaatccaactgtgaatgcagtgtcccagaaaagagaggcaaaaatcctttttag

SEQ ID NO: 2712 - DNA, 423 bp, Homo sapiens
  SIMILAR (120)..(347): 891254mologous to Homo sapiens DNA-binding protein,accession number AF038951,Smith-Waterman Score=362.
gcagtcagagctccaggtctggttcttacttctcctaaaggcccaggctgtgtggccccgtgtcctgcaggtattgggagatccacggctaagacaccgggacctcctggaagccaaaaatgggaccattgcaatttagagatgtggccatagaattctctctggaggagtggcattgcctggacactgcacagcggaatttatataggaatgtgatgttagagaactacattaacctggtcttcctgggtattacggtttctaagccagacctgatcacctgtctggagcaaggaagaaaacctttgaccatgaagagaaatgagatgatagccaaaccctcagtgagcttccttcaagtttcacagggagaagcaaaggcccttctttgtgacttataaaagactgcacagtgtggctgct

SEQ ID NO: 2713 - DNA, 1024 bp, Homo sapiens
  SIMILAR (85)..(705): 771254mologous to Homo sapiens Zinc-finger protein,accession number D70831,Smith-Waterman Score=934.
  misc_feature (1)...(1024): n = a,t,c or g
atgtcgaagcgtcgttggttaacgggaaacggaagtgatcgagagaacattcgcctggatttgggatttctggtcagcgatgaagagaaacggtacaaatgtgaagactgtggcaaagcctttaaccgctcctctaaccttactacacataagaaaattcatactggagagaaaccctacaaatgtgaagaatgtggcaaggcctttaagcgctcctctatccttactacacataagagaattcatactggagagaaaccctacaaatgtgaagaatgtggcaaagtttttaagtacctttcttccctttctacacataagataattcatactggagagaaaccctacaaatgtgaagaatgtggtaaagccttcaactggtcctcacaccttactacacataagagaattcatactggagagaaaccctacaaatgtgaagaatgtggcaaaggctttaagtactcctctacccttactaaacataaaataatccatactggagagaaaccctacaaatgtgaagaatgtggtgaagcctttaagtactcctgttcccttactgcacataagataattcatactggaaagaaaccttacaaatgtgaagaatgtggcaaagtgtttaagcactcctctcccctttctaaacataagagaattcatactggagagaaaccctacaaatgtgaagaatgtggcaagagactttgcccaggnaatatagcagcaccaacgatgttaagtaatgccagtaaaggcgccaaacccgctccgttggnctgtggaggtcccggtgtcttagctgtggatctcccaatacctgcaggacacggggccacacagcctgggcctttaggagaagtaagaaccagacctggagctctgactgcagcgagagacaaaggccccgccaaatcccggaagccgccctgtccgctccagttgcgtgcctgattggacggtccccagctcagggtccctgattggaaaacgtctaaggcccagccccttcaggccttaa

SEQ ID NO: 2714 - DNA, 549 bp, Homo sapiens
  SIMILAR (481)..(341): 381254mologous to Caenorhabditis elegans Similarity to WP:T22F7.1,accession number Z68219,Smith-Waterman Score=82.
atggctcaacaaggcccaggtacaactcaggccaccacttcagaggatgcaaacttactggaatttctgatcaaggaaattagccaagaaaaagaaataaaagccttggaaactggaaacaaagaggatcccctggatgtttttgttgttgcagatacagatgtggtgtataaaagcgagaatggacatgtcattaaactgaatatagaaacaaatgctaccacattattattggaaaacacaacttttgctgtccgcacgcacagtggcctgccagcgtgtcggaggtgctgcatgctcagtgtgtttactgaagttgtgcccatgatcacttggcatttttcccttaccagtcgagtgctgcaagaagaaggaaataagaaggccagttggtgccagaatatagaaactccagtaatcactcaccctctcccaatgaaaacagggaaaatgcctttagcatttgaacatcaagcatcaaaggccacgtctaagcccaggacctgcctccagacctccagctcttcccactctaacccaactgactaa

SEQ ID NO: 2715 - DNA, 1647 bp, Homo sapiens
gtttcttctctcgtaccagctctaccccatctcttcattgattttagtgccctgacatttgatgataagtcaccagaaatgtctaagaatgatgtattgccccagataccatggttctgttcccttttgcaagacttactgcccacgcactccacagtcccagccagcatcctgcatccacccttttttttcaagcccactgcattagaccatggaaactcaggatgtgtggccacaacggcccctgctctggatccagctggcccaccacgtggcgtggccgtgaccttagtcacacttccccctgacatcctggccgcaactacgaacctcagaaagaatgcttggagcagctatacgaggactctgaaaagccacagtccccaagtaaccctgcagtggctacagcagccagcagcaaggggagcctgcaagacagggaactctgagggaggaaaaccttcctctagattcaacagtgccatgattccaagaaatctaccaatgactttgagaactgaagacctagctcccagatcggccactgtggagcacacacacaggatatatccaaatggtgctgcaaatgctaacacaggaccacagctcatagaaggtggttggaacttgttctctgaacctaaccattatcaactgcctgctaaaacaaaaatattgacattctccataggatttagacaagatgcagagtttcataacataatattcaaaatgccctggataaattcaaaattactcagcatggaaaaatacaatcaacaggaattggagctgcaagacgttcttgttgaattctcaagtttgattcagttacttgatctccttgaattccagaagagaccacctgatctgggatcttccagattgtcacagacaggttcccaaccttcttggcaacaatcagataatggcagcacagcaaggttaaatttcacagcaaaagacacacctcctctttcatatccaaatggacagcttactaagaatttgaaagctgatggggaacaagggtggctggatatcctacagcagcagttggcaaactttttctacaaaaggggaattaaagaaccagaaccacaaggtagtgaatatggggaagaggggatgtctatgaaagatgtttcagagaaaggagaaagactcagcagctttgatgaccaactaagtatgagctgtgagggtgataaaagtcatgcaggagaatccggaacagtgccaagaattctacttcagaatcctagaggaatggacgcacattcacacggaacactctcctttcgctctcaaccccgaacacgctctggactatcccaagagggtctttggggacccgccagagatcgatactgctcccacgtgcctccattaaacccttgtccaaacatgcacaaggcgccaagggcatgtgcagtatcagccctcagagttctgtgcacccatcccccaacttctgcaggcttgtctcctaactgctcacacctgcagctttcttcagagaactacccttgggctaccggacccacttcactggacctgctgagagctggcaggcttatgtccctccccatctctccctccaccacccccaattctgatcctgggcagcccataagcaataactaa

SEQ ID NO: 2716 - DNA, 384 bp, Homo sapiens
  SIMILAR (91)..(378): 231254mologous to Bacillus megaterium gas vesicle protein GvpT,accession number AF053765,Smith-Waterman Score=93.
atggtatcttggattgaatcttggaacagaaaaaggacattagtggaacaactgatccagaaagaatggagcagggagcatattatcatggaaagaattcaagaacatgtctcagacctgaagatcatgaggttcctgattgaaatgtctagcacaatggatgaaaatagacccaccctaaggcacaccattgagaaagttcagaacactgagaataaagagaaagggcctacgagcttccagagtgaaacaaaacaaaacacaacaaaacaaaacaaaacaaaaacatgggaagcacttggagaatatttagatgggaagaaggagagtgaggaggatcaaagcaagagctacaaacagaaagaagaaagccgattggtatga

SEQ ID NO: 2717 - DNA, 422 bp, Homo sapiens
  SIMILAR (173)..(385): 391254mologous to Homo sapiens Human yb37_1 protein- 2,accession number Y28685,Smith-Waterman Score=86.
catgcagaagagacataattgcaaaaaagttcatgccttacctccagcagtcttgggcttccagagggcttcaggctgtcgatttgcgaacaagagatccaggattacgcattttgggggccgaaggctcagcctgactcccgcttcggactcggcaggtgtctagcaccgcgggcccaggcggaaggcgctggcgcagcgcagagcagggactccacttatcgaggactggaaactccccttgccgcccggcctccgcgctgcgctccttgctgtcaccgctccgagcgacgcaggcacgctccccgctgcctcctagtcctggtgggtctctctgctctcttctccgggttcgtccgctccctcacagaccacaccctgtcacctcagcaaccctccactccttcctctttgacacgaaa

SEQ ID NO: 2718 - DNA, 807 bp, Homo sapiens
  SIMILAR (436)..(579): 681254mologous to Homo sapiens NAG13,accession number AF194537,Smith-Waterman Score=169.
atgctgcgcacgggaaccgggcggcgggcctcgcggtcgggtctctgcgccggccgcggcgcgccgggaggctggagcatcctggacgccgccagagctccccggtgcgcttttcgcgcagaacctccgtcagcagctcctcgcttcgcagataaagaagtaaaggcgacggaggagaaatggagagaaaagggaagacttacttgggggccgaaggctcagcctgactcccgcttcggactcggcaggtgtctagcaccgcgggcccaggcggaaggcgctggcgcagcgcagagcagggactccacttatcgaggactggaaactccccttgccgcccggcctccgcgctgcgctccttgctgtcaccgctccgagcgacgcaggcacgctccccgctgcctcctagtcctggcagcagacattagaataggcctggaaactttccctgcaagatcagggacacagcaagaatgtcctctctcaccatgtgtattcaacattgtattggagttcctagctaatgcaataagacaagaaaaggaaataaaagacatgcagtttgaaaaagaagagatatcagaacaaggatctgctgctattacacaaaccaagcagggttccctctgccattctcatgtcttcaccgagcagcaagaaaggagagggaacaaccaagtagaagttagggaagaatatagtggaggtgacagtgtgctcatcctgagcctaggtatcaagaggccttgcctgcaactgttcactctcttagaacactgcccagctgccatgaacaaacctgtgtga

SEQ ID NO: 2719 - DNA, 532 bp, Homo sapiens
  SIMILAR (487)..(386): 411254mologous to Chironomus thummi Sp12 gene homologue,accession number X70780,Smith-Waterman Score=47.
ggggcctccatccccattcccagagttgactgcaggctttctcgctatctgttttcttgtcaaggtgctataggagaaaagcacttggttggctccatcgggtctggagaatcccctccagcagtcttgggcttccagagggcttcaggctgtcgatttgcgaacaagagatccaggattacgcattcactgcaagcaaatgtgaaatccttaaattgctggcctcagtgttcccatgtcaactggcatatgctcaggttggagatcatacaggtctgcaaatgcgaacagctgtatcttgccttcttttgatttcggtcgtttcttttgtgaaattcaaggatggactctgattctcaagccccaagtttaacactccgtggttcttacagtgtctcttgggggccgaaggctcagcctgactcccgcttcggactcggcaggtgtctagcaccgcgggcccaggcgcaaggcgctggcgcagcgcagagcaggaactccacttatcgaggactggaaactccccacgaaa

SEQ ID NO: 2720 - DNA, 885 bp, Homo sapiens
  SIMILAR (406)..(873): 971254mologous to Homo sapiens putative p150,accession number U93572,Smith-Waterman Score=774.
  misc_feature (1)...(885): n = a,t,c or g
atgctgcgcacgggaaccggncggcgggcctcgcggtcgggtctctgcgccggccgcggcgcgccgggaggctggagcatcctggacgccgccagagctccccggtgcgcttttcgcgcagaacctccgtcagcagctcctcgcttcgcagataaagaagtaaaggcgacggaggagaaatggagagaaaagggaagacttacttgggggccgaaggctcagcctgactcccgcttcggactcggcaggtgtctagcaccgcgggcccaggcggaaggcgctggcgcagcgcagagcagggactccacttatcgaggactggaaactccccttgccgcccggcctccgcgctgcgctccttgctgtcaccgctccgagcgacgcaggcacgctccccgctgcctcctagtcctgctgataagcaacttcagcaaagtctcaggatacaaaatcaatgtacaaaagtcacaagcattcttatacaccaacaacagacaaacagagagccaaatcatgagtgaactcccattcacaattgcttcaaagagaataaaatacctaggaatccaacttacaagggatgtgaaggacctcttcaaggagaactacaaaccactgctcaaggaaataaaagaggatacaaacaaatggaagaacattccatgctcatgggtaggaagaatcactatcgtgaaaatggccatactgcccaaggtaatttacagattcaatgccatccccatcaagctaccaatgcctttcttcacagaattggaaaaaactactttaaagttcatatggaaccaaaaaagagcccgcattgccaagtcaatcctaagccaaaagaataaagctggaggcatcacactaccgacttcaaactag

SEQ ID NO: 2721 - DNA, 458 bp, Homo sapiens
  SIMILAR (304)..(116): 311254mologous to Zea mays cell wall protein (put.); putative,accession number M36913,Smith-Waterman Score=80.
atcattgcttcgttgcccagaaggggaagaaatgaaaagaacccaaataataataaagtcctcaagctttacacgcctcggtttagcagtccaacaaaccaatttccgaggatgggggagccttggactggctcgtggaggaaccccagaaaaagacaggtgggaaaatattagcttgggggagaactggagagggcttgggtgtttgcaccggccagggggtggccggccgcggccccgtgggtaaaagaaaaagtaagatcggcgaggggtggatgaaaggatggagaggaaggcttggggagatggaagagccaagctgcttcccaaaagcggtgccggcaggttaggggctgcgcagcctgaaggctggggctacggagaagcccactgcagtgtcactccagcccccgaaggcgtgtgcgcacacactcccgcacacacacacccgcacgaaa

SEQ ID NO: 2722 - DNA, 1152 bp, Homo sapiens
  SIMILAR (199)..(1149): 1001254mologous to Homo sapiens 2P domain potassium channel TREK2,accession number AF279890,Smith-Waterman Score=1630.
atggaatactatgcagccataaaaaaggatgagttcatgtcctttgtagggacatggatgaagctggaaaccatcattctgagcaaactatctcaaggacagaaaaccaaacaccgcatgttctcactcatagcttggaaggcctcccaaaagcctgaattaatgaaagcttctgatgtgccgatccctttctctggcaggaaaaagcaagtgagtcagaccaagatccgggtcatctcaaccatcctgttcatcttggccggctgcattgtgtttgtgacgatccctgctgtcatctttaagtacatcgagggctggacggccttggagtccatttactttgtggtggtcactctgaccacggtgggctttggtgattttgtggcagggggaaacgctggcatcaattatcgggagtggtataagcccctagtgtggttttggatccttgttggccttgcctactttgcagctgtcctcagtatgatcggagattggctacgggttctgtccaaaaagacaaaagaagaggtgggtgaaatcaaggcccatgcggcagagtggaaggccaatgtcacggctgagttccgggagacacggcgaaggctcagcgtggagatccacgataagctgcagcgggcggccaccatccgcagcatggagcgccggcggctgggcctggaccagcgggcccactcactggacatgctgtcccccgagaagcgctctgtctttgctgccctggacaccggccgcttcaaggcctcatcccaggagagcatcaacaaccggcccaacaacctgcgcctgaaggggccggagcagctgaacaagcatgggcagggtgcgtccgaggacaacatcatcaacaagttcgggtccacctccagactcaccaagaggaaaaacaaggacctcaaaaagaccttgcccgaggacgttcagaaaatctacaagaccttccggaattactccctggacgaggagaagaaagaggaggagacggaaaagatgtgtaactcagacaactccagcacagccatgctgacggactgtatccagcagcacgctgagttggagaacggaatgatacccacggacaccaaagaccgggagccggagaacaactcattacttgaagacagaaactaa

SEQ ID NO: 2723 - DNA, 885 bp, Homo sapiens
  SIMILAR (523)..(876): 271254mologous to Homo sapiens cyclin-dependent kinase 5 activator isoform p39i,accession number U34051,Smith-Waterman Score =95.
atggatgtgggagatgcagacttagacgtttctctgaggaaatttccagtgggccacccttctcttcgttctgcagtgggaataccaaatctcaaagctgctcgttatgcgttcatctgctctttgcctaaagggagcaggtacttttatcatttccggttctcaagttgggaagcagacacagagagtactgaggctgaatgcagagattattgcctgagcagcaggcattcacgctcctatagaaactgcgttctcaccctgccagagaaagggatcggcacatcagaagctttcattaattcaggcttttgggaggccttccaagctgaggccacaagaacacaactagcagggggtcccattagagtcaaaggagaaataccccaatgttacaatacctctggacacaccaggaacaaagtgacagcggaaggggaagaaatgaaaagaacccaaataataataaagtcctcaagctttacacgcctcggtttagcagtccaacaaaacaatttccgaggatgggggagccttggactggctcgtggaggaaccccagaaaaagacaggaggcccgtgccagccatgagccttttgttctgggaccgctccgcatctgctgcgctctccccgcccggggaagctcgctcccaaggcacagcttggtcccttccccagctacctgcagccggactggggccgctggtcgttggctggaaaggaggcttgagagaggcacgggggcccccggaggaaagcggagttgccaagacccggcagctcccggaagcggcggccccgggatcctgggaccagcagggcagatgcgaagggacccagacctgttcccggaaaggggctaaacctggagcattcgtctaa

SEQ ID NO: 2724 - DNA, 418 bp, Homo sapiens
  SIMILAR (108)..(416): 971254mologous to Gallus gallus beta-5 tubulin,accession number L29435,Smith-Waterman Score=527.
  misc_feature (1)...(418): n = a,t,c or g
gctgacgatttcgcacgannaaaaactgcgactgcctgcagggcttccagctgacccactcgctggggggcggcacgggctccggcatgggcacgttgctcatcagcaaggggtcagacacggtggtggagccctacaacgccacgctgtccatccaccagctggtggagaacacggatgagacctactgcatcgacaacgaggcgctctacgacatctgcttccgcaccctcaagctggccacgcccacctacggggacctcaaccacctggtatcggccaccatgagcggagtcaccacctccttgcgcttcccgggccagctcaacgctgacctgcgcaagctggccgtcaacatggtgcccttcccgcgcctgcacttcttcatgcccggcttcgcccccctcacagcccggtg

SEQ ID NO: 2725 - DNA, 597 bp, Homo sapiens
  SIMILAR (65)..(418): 931254mologous to Mus musculus tubulin beta-3,accession number AF312873,Smith-Waterman Score=575.
  misc_feature (1)...(597): n = a,t,c or g
cgccnnccngccaagacgcgcccagtatgagggagatcgtgcacatccaggccggccagtgcgnaaccagatcggggccaagttctgggaagtcatcagtgatgagcatggcatcgaccccagcggcaactacgtgggcgactcggacttgcagctggagcggatcagcgtctactacaacgaggcctcttctcacaagtacgtgcctcgagccattctggtggacctggaacccggaaccatggacagtgtccgctcaggggcctttggacatctcttcaggcctgacaatttcatctttggtcagagtggggccggcaacaactgggccaagggtcacttacacggagggggcggacttgggttggattcggtcctggatgtggtgcggaaggagtgtgaaaactgcgaccacctggtatcggccaccatgagcggagtcaccacctcctttgcgcttcccggggccagctcaacgcttgacctgcgcaanttgggccgtcaaacattggncctttttcccggngccttgaatttctttaatgcccggttttggccccccttaaaagcccnggggcaanccagcantaccgggct

SEQ ID NO: 2726 - DNA, 2054 bp, Homo sapiens
  SIMILAR (508)..(1437): 471254mologous to Homo sapiens beta-tubulin,accession number U47634,Smith-Waterman Score=515.
  misc_feature (1)...(2054): n = a,t,c or g
gacgtacgaccggnttggaattaccgggtcgacgatttcatcagcccgcccgcgcccgtccgcaaccgcccgccagaccgccgcccagtattgaggggagaatcgtgcacatccaggccggccagtgcgggcaaccagatcggggctcaagttctgggaagtcatcagtgatgagcatggcatcgaccccagcggcaactacgtgggcgactcggacttgcagctggagcggatcagcgtctactacaacgaggcctcttctcacaagtaagacactcgaaccatttaaggtggatcttaaacccggacccatggacagtgtccgcttcaaggggcctttggacatctcttcaggcctgacaatttcatctttggtcagagtggggccggcaacaactgggccaagggtcactacacggagggggcggagctggtggattcggtcctggatgtggtgcggaaggagtgtgaaaactgcgactgcctgcagggctttccagctgaccccactcgctgggggggcggcacgggctccggcattgggcacgttgctcatcagcaaggtgcgtgaggagtatcccgaccgcatcatgaacaccttcagcgttgggccctcacccaaggtgtcaagacacggtggtggagccctacaacgccacgctgtccatccaaccagctggtggaggaacacggatgagacctactgcatcgacaacgaggcgctctacgacatctgcttccgcaccctcaagcctgcccacgcccacctacggggacctcaaccacctggtatcggccaccatgagcggagtcaccacctccttgcgcttcccgggccagctcaacgctgacctgcgcaagctggcccgtcaacatggtgcccttcccgcgcctgcacttcttcatgcccggcttcgcccccctgaccagcccggggcaagccagcagtaccgggccctggaccgttgcccgagctcacccagcagatgttcgatgccaagaacatgatgggccgcctgcgacccgcgccacggccgctacctgaccgtggccgccgtgttccgcgggccggcatgtcccatgaaggagggtggacgagcagattgctgcccatccagagcaagaccagcagctacttcgtggaggtggatcccaaccaacgtgaagggtgcccgtgtgtgacatcccgcccccgcggccctcagaatgtcctccacctttcatcgggaaacagcacggcccatccaggactttttcaagcgcatctccgagcagttcacggccatgtttccggcgcaaggccttacatgcactggtacacgagcgaggggcatggacgagatggagttcaccgaggccgagagcaaaatgaacgacctggttgtccgagtaccagcagtacccaggacgccacggccgaggaaagagggcgagatgtaacgaagacgacgaggaggagtcggaggcccagggcccccaagtggagctgctcgcagctggagtgagaggcaggtggcgccccggggccgaagccagcagtgtctaaacccccgggagccatcttgctgcccgacaccctgctttccccatcgccctagggctcccttgcccgccctccttgcagtatttatggcctcgtcctccccacctaaggccacgtgtgagctgctcctgtctctgtcttattgcaagctccagccctgacgttttacgggtttggtttttactggcttgagcctatattgtcgaaaaccccggagacatcttgttggcgagaccctgtttttccctcgccctaggggtcccttgccggcctcctgcagtatttatgggctcggcctccccacctagggcacgggggaggtgctcctgtgcttgttttttgcaaatcccggcccggcggtttaccgatagggtttttctggatggggtgtatttttcggcgacataataaccctattggcgggggggcaaaaaaataaaaggggcaccctttttttttctttccttctccccaccttcccctggccgtctcgggtatcgttctctttctc

SEQ ID NO: 2727 - DNA, 1045 bp, Homo sapiens
  SIMILAR (716)..(982): 241254mologous to Bacillus anthracis pXO1-05,accession number AF065404,Smith-Waterman Score=80.
tttcgtgcccgctttgacttagagccctccgcatatccttcccctggctggagcagccaaggcgcggaggacagctccgaggccagatgtttactgcgcagatgcccgactttacaccggggtccgggctgtgccgggcgctgggggaagcgcccaccttccagagagcgaaatcatggagccttccaagaccttcatgagaaacctgccaatcacaccaggctatagcggctttgtgccattcctcagctgccaaggaatgtccaaggaggatgacatgaaccactgtgtgaaaaccttccaggagaaaacacagcgctataaagaacagctgcgggaattgtgctgcgcagtggccactgccccgaaactgaaacctgtcaactccgaggagacggtcctgcaggccctgcaccagtacaatctgcagtaccaccccctgatcctgggtagcagcgccctgaaaccatttcccctcacccctgaatgcaaatatgtaaagaaacctctccaggagcccccgatccctggctgggcaggctacctgccgagagccaaggtcactgaatttggctgtggcacgagatacactgtcatggccaaaaactgctacaaggacttcctggagatcacggagagggccaagaaggcacatctgaaaccatatgaagaaatatatggagttagctccacaaaaacttctgctccgtctccaaaagttttgcagcatgaagagctgctgccaaaatatcccgatttttctattccagatgatcacactagctccccagcaatggttcttaaccagattgaaatggctgaaatgtcagacatagaattcagaatctggatggcaagaaagctcaatgagacacaagagaaggttgaaacccaatccaaggaaaacaataaaatgatccaagggttgaaagatgacatcaccattttaagaaagaaccaaaatgaacttctggaaatagaaaatttacaggaatttcataatacaattggaagcattaacaacaattggaatagaccaacctga

SEQ ID NO: 2728 - DNA, 954 bp, Homo sapiens
  SIMILAR (399)..(247): 301254mologous to Afipia felis ferredoxin,accession number X81826,Smith-Waterman Score=76.
tttgcggagaagcaccctctttattccgacatgacaaagaacggcctttatcattaatgacatgcaaccgggaaccactcaggatgcaggcggcagataaaaaattcttgttactaaacttctttattgctcactgggcgcgaatccaacatgagaatggcgggttttggaagccccacttaaagttcacctccttgggagactctgcgcttctagccttctgcatactttgcggaggacagtggctctagatacatcttcccactgcatggtatacttggcctctgagcacagccacatgtcaacggagttttgggggcctctctcaagggccttccaagggcaagggcaccttccatctggaatagaaaaatcgggatattttggcagcagctcttcatgctgcaaaacttttggagacggagcacaagcttttgtggagctaactccatatatttcttcatatggtttcagatgtgccttcttggccctctccgtgatctccaggaagtccttgtagcagtttttggccatgacagtgtatctcgtgccacagccaaattcagtgaccttggctctcggcaggtagcctgcccagccagggatcgggggctcctggagaggtttctttacatatttgcattcaggggtgaggggaaatggtttcagggcgctgctacccaggatcagggggtggtactgcagattgtactggtgcagggcctgcaggaccgtctcctcggagttgacaggtttcagtttcggggcagtggccactgcgcagcacaattcccgcagctgttctttatagcgctgtgttttctcctggaaggttttcacacagtggttcatgtcatcctccttggacattccttggcagctgaggaatggcacaaagccgctatagcctggtgtgattggcaggtttctcatgaaggtcttggaaggctccat

SEQ ID NO: 2729 - DNA, 462 bp, Homo sapiens
  SIMILAR (7)..(393): 291254mologous to Homo sapiens Human N-methyl-D-aspartate receptor subunit encoded by clone NMDA24,accession number W87504,Smith-Waterman Score=106.
atggggggctgcaggtgccgagccctgccccacagcgaggcggctgaggcccggcaagaattcgagcctagagcgggtgggccggcagtgatgcggaactcggcgcatactccgcagcggctggctctgggtgctaagcccgtcactgcccagggcctgtggcgccagcctgaccgctctgagtgcagggccgccctgcgtgtgccgcgcgcagcctcagttcccgcctgtgcctctccctccacacctccccgcaagcagagggagcaggctccggccttggccagcccacagacgggctcccacagtgcagcggtggggcgaagggctcctcaagcgcggccagagtggacgtccaggccgaggagacacggagagcgagcaagggctgccagcacgctgtcacttcttattaagtcaagcattggacatgaccttgatattgctggtgattacccatag

SEQ ID NO: 2730 - DNA, 351 bp, Homo sapiens
  SIMILAR (6)..(56): 821254mologous to Macaca fascicularis hypothetical protein,accession number AB055298,Smith-Waterman Score=80.
atgggccggacgcagttgctcacgcctgtaatcccagcactttgggaggccgaggactctcataactgtcacctgagttggttccaacggatacgcagaatagaagacaaatgggagaagaatattgacaaactgcaagaaccagccacagcgacagcccaaacaactgcaggggaacttgccaataactcgcggcaaatgctggaggaagtaccgcctccaagctacagcggcgccgccgaagccaagagcggcgccttccgcagagggactgcggcttcctgcgcagcgccccctaccggacaggcggcgggaaaacgccgcgcaactcagaccactggagcggagtag

SEQ ID NO: 2731 - DNA, 396 bp, Homo sapiens
  SIMILAR (196)..(309): 681254mologous to Homo sapiens Human secreted protein, SEQ ID NO: 4848,accession number G00767,Smith-Waterman Score=102.
atgctgatgctgatgctgatgcttctggtttggagcacatactttgagaccactgctctaatggaatcagtagtcacaaggccaagcagccagcttgaaggcggtacttcctccagcatttgccgcaagtattggcaagttcccctgcagttgtttgggctgtccctgtggctggttcggggtgtgcggccagccatggagcgctctgggcccagcgaaggtgggttcatgaggcgagtccgggcgggtgacaggctcaacgcgtcgggaccggacccgcagcttgcggtcaccatgggcttcacgggttcgtgtgctcttgcctctgggacaccaattgtacgtcttagtgttgcgcgcggaaggcgctttcgtcccacgggatatggggcctaa

SEQ ID NO: 2732 - DNA, 458 bp, Homo sapiens
  SIMILAR (93)..(458): 971254mologous to Homo sapiens Human GTPase associated protein-13,accession number Y99662,Smith-Waterman Score=592.
gcattgaaaccatgcccaggccggaattcctgggacgacgattgtctgtccctgtggctggttctggggtgtgcggccatccatggagctgttctgttcccagcgaagtgacaggctcaaacgcgtcgggaccggacccgcagcttgcggtcaccatgggcttcacggggttcggtaaaaaagctcgcacatttgacttggaagcaatgtttgaacaaactcgaaggacagctgtggaaagaagtcgcaaaacactggaagcaagagaaaaagaggaagaaatgaacagagagaaagaattaagaagacaaaatgaagatattgagccaacatcctcaagatcaaatgtggtcagagattgctccaaatcatcttccagggatacgagcagcagtgaaagtgaacagagctctgactcttctgatgatgagttaattggccctcctttacccgctaaa

SEQ ID NO: 2733 - DNA, 411 bp, Homo sapiens
  SIMILAR (207)..(79): 321254mologous to Rattus norvegicus collagen alpha 1 (III),accession number AJ005395,Smith-Waterman Score=43.
atggccagccacatctatgaccaaattgacctaagctttcagatgttttccaaaacatcggactgccacagagacgaagccttcagcagcatttccctggaccctcttctctctggtcccaggtcaggttctgtacagcaatggaaagcaggggagaggatgcccacgctgtgcgtggccgtttggagcagactcagggaccagtgggacctcctcttctgggctgaaggggacgtcacagaagccccaagtgggtcacggcagagcgtcagccagaacctccagggctcactcccaggcctcagtcaccagatgcttcgtggctacctgggttgccagaacctgatgtttttgctgttcgtggtgttggatggctgcaaaggggtgacggcggttcaagcaggcttctga

SEQ ID NO: 2734 - DNA, 1020 bp, Homo sapiens
  SIMILAR (193)..(1017): 611254mologous to Homo sapiens p40,accession number U93567,Smith-Waterman Score=783.
atgagaagacatgtgaaggaggccatgggtttgcctgtggcttccaggtgcccctctgagacgaagcttccagatgaaggatcaggcagcaacatttgccgttctgcaatatttgctgttctgcagcctccgctggtgatacccaggcaaacagggtctggagtggacctccagcaaactccaacagacctgcagctgagggaagggagctcctcaccagcaatggaacaaagctgcacggagaatgactttgacgagttgagagaagaaggcttcagacaatcggcattaacaaacttctccgagctaaaggaggatggccaaactcattgcaaagaagctaaaaaccttgaaaaaagattagacgaatggctaactagaataaacagcatggagaagatcttaaatgacttgatggagctgaaaaccatggcacaagaactacgtgatgcatgcacaagcttcagtagtcgattcgatcaagtgaaagaaagggtatcagtgatggaagatcaaatgaatgaaatgaatgatggggagaatggaaccaagttggaagacactcttcaggacattatccaggagaacttccccaacctagcaaggcaagccaacattcaaattcaggaaatacagaaaacaccacaaagatactcctcaagaagagcaactccaagacacagaattgtgaaattcaccaaaattgaaatgaaggaaaaaatgttaagggcagtcagagagaaaggtcgggttagccacaaagggaagcccatcagactaacagctgatctctcagcagaaactccacaagccagaagagagtgggggccaatattcaacattcttaaagaaaagaatgttcagcccagaatttcacatccagccaaactaagcttcataagtgaaagagaaataaaatactttacagacaagcaaatgctgagagattttgtcaccatcaggcctgccttacaagagctcctgaaggaagcactaaacatagaaaggaacaaccggtag

SEQ ID NO: 2735 - DNA, 517 bp, Homo sapiens
  SIMILAR (3)..(419): 1001254mologous to Homo sapiens Hb2E,accession number AF235097,Smith-Waterman Score=747.
ttgccttccagctgccctttgctgagggcgcgggcgatggggcgcgcctcgacttcgtggtgcgctatgagacccctgagggcactttctgggccaacaaccacggccgcaactacacagtcctgctccggatcgcacccgctcccacacccactgatgccgaagggctgccccagcagcagcagctgccgcagctggagccacagcccgagtgccagggtcccgtggaggctgaggccaggcagctgaagagctgcatgaagccggtgaggcgcaggcctgccgaggaggaactgaagacgaagaacatggatgataacacctttgccatggcagagcatcctgatgtccaggagtcagtgggtccactggtagcccccacccctctccgtccatggccccagatgacacttcaggtctgctggagtttgttggagttccactccagaccctgtttgcctgggtatcaccagcagaggctgcagaacagcaaagattgctgccttttccttcctct

SEQ ID NO: 2736 - DNA, 621 bp, Homo sapiens
  SIMILAR (584)..(619): 751254mologous to Homo sapiens Human secreted protein sequence SEQ ID NO:103,accession number Y87064,Smith-Waterman Score =40.
atgctttttccacggaactgtgtaaccaatggatcggaagatcccgctcacgaacccacaccactggagcctagcgtcccaaccctggaacacacagattctcaacagcctctcagctggaatctgtttaagcctactgaactcctggggagaggggtgaccagcaccacagctgtgatttcctgctgtgtaagcctgtttgagctccttgggtgttcgtcagatacccctgacctatctggctatgaggtgtcaggcactgtatttggtgttgctgatatggtgtcaagtacaatgatagagcaagacagaacagcagcaaaaggggtccgatggtactcaccacatggcgaaatcccagatgagcccccaagatatgtccggagttggttccttctggtggttcatggtcttgctgacttcaagaatgaagctgcgggttttcacggcccctctgctgcaggtctgctggagtttgctggaggtccacttcagaccctgtttgcctgggtatcaccagcggagggtacagaacagcaaagattgctgcctgttccttcctctggaagcttcgtccctgaggggcacctaccaaatgctagccagagttcttctgtatga

SEQ ID NO: 2737 - DNA, 1233 bp, Homo sapiens
  SIMILAR (631)..(1230): 551254mologous to Homo sapiens p40,accession number U93567,Smith-Waterman Score=527.
atggacccagtccttatggatcatagtccaggaaagaggaaacaccggataggagagctcaaggttaccactgactatttcctaacagtacacatgggctccaaaaatcatgttttcacccaaaccagctcttccctggaaaaactatctttctcaccaactgagctgaaggggatgggagtagccccagacaaaaaggtggcaaactcacactgttcttccccaaattccagtgctgctgataagtctgatgacattctggttgccattttttctgtgaacaaaagtgcctgcctgccagctctggagagagcagcagatctcccagcacagaggactggtcaaagaactaccgaagaaaacattcctttggggccaccagtgaatgaaaatgtgagtctagctatctcaggcagatacctctcagcaggggttgacagacacctcatacaggagatctctggctggcatttgctgggtgcccctctgggacgaagcttccagaggaaggaaaaggaagcaatctttgctgttctgcagcctccgctggtgatacccaggcaaacagggtctggagtggaccaccagcaaactccagcagacctgcagcagagaggccttactgttagaaggaaaactaaccaacagaaaggaatagcatcaacatcaacaaaaaggatgtccacacaaaaaccccatctgaaggtcaccaacatcaaagcacgggaacaaaactggacagagaatgagtttgacaaattgacagaagcaggcttcagaaggtgggtaataacaaactcctctaagctaaagcagcttgttctaacccaatacaaggaagctaagaaccttgaaaaaaggttagacgaattgctaactagaataaccagtttggagaaggacataaatgacctgatggagctgaaaaacacagcacgagaacgttgtgaagcatacacaagtatcgatagccgaatcaatcaagcaaaagaaaggacatcagacactgcagatcaacttaatgaaataaagtgtgaaggcaaggttagagaaaaaagaatgaaaaggaacgaacaaagcctccaagaaatacgcgaatatgtgaaaagaccaaacctacatttgattggtgtatgtgaaagtgacggggacaatggaaccaagttggaaaacactcttcgggatattatccaggagaacttccccaacctagaaagacaggccaacatttaa

SEQ ID NO: 2738 - DNA, 1563 bp, Homo sapiens
  SIMILAR (952)..(1548): 551254mologous to Homo sapiens p40,accession number U93570,Smith-Waterman Score=522.
atggatccaaaccaagataaaatctttgaaatgccagatacagaattcaaaaggttaattattaagctactcaaggagataccagagaaaggtgcacctcagggacgaagcttccagaggaaggaacaggcagcaatcattgctgttctgcagcctccactggtgatacccaggcaaacagggtctggagtggacctccagcaaacagcagcagacctgcagaagaggggcctggttgttagaaggaaaactaaaaaccagaaaagaatagcatcaacatcaacaaaaaagatgtccacacagaaacctcatctgaaactcatcaacatcaaagaccaaaggatcacaactcctcaccagcaagggagcaaaactggatggaaaaatgagatagatgaattgacagaagtaggcttcagaagggtaggtaataacaaaatcctcctaaaggaggagctaaaggagcatgttctaacccaaggcaaggaagctaacaaccttgaaagaaggttagacaaattgctaactagaataaacagtttagagaagaacataaatgacctgatggagctgaaaaacacagcacgagaactacatgaagaatgcagaagcctcaggagccaatgtgatcaactgaaagaaaggacagcagaagatctccaagcacagtgctcaagccctgctaagggacagactgcctcctcaagtgggtccctgactgctgtgtctcctgactgggagacacctcctagcaggggtcgacagactcctcatacagccaggtgcccctctgagagaaagcttccagaggaaggatcaggcagcaacatctgctgttttgcaatatttgctgttctgcagcctccgctggtgatacccaggcaaacagggtctggagtggacctccagcaaactccaacagacctgcagctgagggacctgactgttagaaggaaaactaacaaacagaaagaaatagcatcaacattaacaaaaagcacgcccatgcaaaaaacctatccaaagtgcacaaaactgaacagagaagagtatgacgaattgacagaagtaggcagaaggtgggtaataataacaaactcctttgagctaaaggagcatgttctaacccaatggaaggaagctaagaaccttgataaaaggttacaggaagggctaactagaataaccagtttagagaagaagataaatgacctgatggtgctgaaaaacacagcacgagaacttcatgaagcatacacaagtatcaatagtcgaattgatcaagcggaagaaaggatatcagagattgaagatcaacttaatgaaataaagcttgaagacaagattacagaaaaaagaatgataaggaaaggacaaagcctccaagaaatatgggactatgtgaaaagaccaaacctacgattgattggtgtacctgaaagtgatgaggagaatgtaaccgagctggaaaacactcttcaggatatcatccaggagaacttccccaatctagcaagacaggccaacattcaaattcaggaaatacaaacactactaagataa

SEQ ID NO: 2739 - DNA, 246 bp, Homo sapiens
  SIMILAR (233)..(126): 361254mologous to Homo sapiens Human epidermal protein- 4,accession number Y44987,Smith-Waterman Score=64.
atggccagccacatctatgaccaaattgacctaagctttcagatgttttccaaaacatcggactgccacagtctgagtgatgaaatgagaagcacgcctacgacgacgctgctgcccatcaaagcacagcggtcctggagaaaagcagctgtgcagctgtttggattgcaagctgaactggccacctttttggtagcacattatttacacgtgacctacagacaaaccacggtcgttcaggcttga

SEQ ID NO: 2740 - DNA, 747 bp, Homo sapiens
  SIMILAR (575)..(417): 311254mologous to Homo sapiens Human receptor molecule (REC) encoded by Incyte clone 2326441,accession number Y32205,Smith- Waterman Score=58.
atgggctacagctaccgcttaaaaatgtggacggatggactgcgggaggaggggcagtgcgagagcagcagcccatccgtgaagagaggagaagctgggaatgtatggagcgccatttgtcttcagagagccaccaaacttcaagcacactatgactcctccccaagtggcaggcatgggaaccaggggggtgatagctacaagatttcataccaggtgctgcacaaacaccaccatcagcatggacgctgctggccgggagagctggcgcggggctctgcggccctcagctttgccatgcacaaaccctctatttactggatggggaggcccagagcagtctgctccacgggagatggcgagaagctggtgcgggacttctggttgctgcaatacctggcaaaaggaaagtcacagccagagaacgtgactcccggtgagcctggagccagcgtgactgcagagggccagtccccaggtgatgccggtacgctggagaaggcctgggaagatgtgcggagacagacacctgggacacctaaggaccaagcccagagccacgctgctgatgtagcctcatcagagaggcaaacacattcttgggttgatgtggtctatgatcagccctgccaggaacgacgaagaaacatgtaccctaacgtattcaccgaagactccaaactaacacaaacttatctcaaattatcagggaaccagatcatctacagcaaccagaagcagctgtga

SEQ ID NO: 2741 - DNA, 861 bp, Homo sapiens
  SIMILAR (574)..(714): 851254mologous to Homo sapiens pot. ORF I,accession number X03145,Smith-Waterman Score=221.
atgtatttagtcccttgcaacagaactgaaccggagtatggatttattgaaagtgaaatctacaaagcaaatatagacagtcagtctggagctacaattcacaatgcgaactttcgcaagctgctctgtttggagcttcaatctagtcctgcctcccatacacaagaaaacaaacaacagcagaatcgtgtgggatcgaaagacaccggagaacgaccaggaataacaagttgcagacaaaactcctcagacaccgagttaaagaaggaagggttttattcggctgagggtatcggcaagactcctgtctcaagagccgagcgtgtgagaagacttgggccagatctcagaccaagaatccactggctgaagaagctgaattcccaggaagaaggaccctgcaatcccatgacaaacgatcacagctccttgccagctatggaacaaagctggatggagaatgactttgatgagttcacagaagtaggcttcagaaggtcggtaataacaaacttctctgagctaaaggagcatgttctaacctattgtaaggaagctaaaaacgttgaaaaaagcaaatgtaaaaaaacagaaatcacaacaaactgtctctcagaccacagtgccatcaaattagaactcaggattaagaaactcacccaaaaccacacaactacatggaaactgaacaacctgctccagaatgactactgggattccacgattactcaaaaacacacaactgtgataaagagaaaacagcaacctcatacatcagcgtacacaatgcaaggcttgccaattaacaggtgcaaactacagtggggaaagctgcatcagaataaacttcgaacaggataa

SEQ ID NO: 2742 - DNA, 1278 bp, Homo sapiens
  SIMILAR (127)..(204): 381254mologous to Mus musculus Ig mu-chain precursor V-D-J2 region,accession number M31957,Smith-Waterman Score=60.
atgccctacagagtgcttgtatgcagctcatccagtgatcttgtggtagttagaacctttacatggcagcccagggctccaaaagcaagtgttctaggaaacaaagaggaagctgtaagcccttttatgacaaagccttggacatcagctactctgttggtgaatgcagtctcaagcctactcacattcaagtgggtgtcatgggagccagctcttgctgatggtgaggagcctcattatcttaagacaacacacagtggagatgtgctttacgtaattggcctgccctgtgaaaacccctggctgttttttcaggctcttctagggaaaatttgcgtctgtggccttagtccagaacacaccctagtcttctctggagggaaacacagtcagggaaggaagagattttgtaatgtggacagtgttcggtgttcatcgctgaggaatctgagtactcagcccccactgcacccaggtgaaataaacagccttgttgctcttcacatggatgcgtgtgacactagccagggatggagagtgtgtaatactgagagtagggattattctaggcacctgaatagaacagccagccaggatggcttgttcctgctctcctatgcttctatcattggcagtaaacttgtgcaaacactgggatccctggataccatgaattcagagtctgagcctttcatcttgagctgtagcaggaccacccgcagacaaaactcctcagacaccgagttaaagaaggaaggggtttatttggccggggcatcggcaagactcctgtctcaagagctgagcttcccgattcaattatttggcgcttcctaccatgtacattttcaatttaaagtgaggctacgccaacccctggcaaggcttgtgccccacatgataccaaccagccaagtacctgcttccagaagcaatctgtggacagagcttgcaaaggtccatgagatcactgttgcaaaccggggagaggtcaaggcaagaggaagtatcttgggaacagtgctgggtttcaaagtaggcatcagggcagggctgctagttaaagggggtggtcagcaggcccagagggcccaggttgccctggggaagcctggagaaggctgtgaagttccaagcttaaggcaggcaagggaaggccatatggtgtgtggtgaaaaatggcggaggaaaacagaacaaacaaggctgaggagtgggagcacagctgagaaggaagtgagaagagcacgatgtaacggaagctctggagagcaatga

SEQ ID NO: 2743 - DNA, 630 bp, Homo sapiens
  SIMILAR (8)..(109): 471254mologous to Homo sapiens Amino acid sequence of a human secreted peptide,accession number Y12951,Smith-Waterman Score=70.
atgacccagcacttttgcattatccccccgcagcccgtgcagcagggccaggcacaggaagccctaccccagaccagtcccaccctagctcagccccacggcggccctccaggactggggcactgtgtcctcacaccgaggctacagctggaccctgtcacttcccgcttttgcatttataacagtcccaactgcagcagtggacaccctgccatcagaatctgctggggagcttttccagagtgtgggtgtcagtcccaccctggcctactggatcggaacccaaaaccaaaagccctgcctcagcgagcaagttcaaagtcattggcccaaaggaaaaactccaagtcctttgttggtcattcagtgagagcatcaggcctgccaacaaccccatggtacaacaagaaaatggctgtgctggagaaatttgactccatggagctgcattaccatatgctgactgtgtgtgtaagcattggacatgtatggaaaaacatcgaaacttcctcagtaaacgaacaggtgcactttatgtatgactgtacgtgtgaaagtactgtgaagacagatgctcaatctgatttaccaaatgaagaggacgcaatcggatattccaactggtcctag

SEQ ID NO: 2744 - DNA, 175 bp, Homo sapiens
  SIMILAR (175)..(68): 361254mologous to Feline immunodeficiency virus envelope glycoprotein precursor,accession number M73965,Smith-Waterman Score =53.
ctaacgcttgaggtcaccttcatggtttttccagtgaccttggccattaatgagctcccaccgcttccccagctgcagctgtattatagcgccagagtcttccaagcctgcaggttgtgccaagcctggagggatttgcaaaagtaagtagccagtggtttccgtgcactggtcc

SEQ ID NO: 2745 - DNA, 1079 bp, Homo sapiens
  SIMILAR (242)..(340): 931254mologous to Homo sapiens Human elongase homologue HS3,accession number Y79266,Smith-Waterman Score=165.
  misc_feature (1)...(1079): n = a,t,c or g
tttcgtgccgggaggaggagagccccttagagaggagctgggagcggaggcgcaggcaatgctcagccctggatgtagctgagaggctgggagaagagacgaccgctggagaccgagcggcgtggggaagacctaggggggtgggtgggggaagcagacaggagaacactcgaaatcaagcgctttacagattattttattttgtatagagaacacgtagcgactccgaagatcagccccaatgaacatgtcagtgttgactttacaagaatatgaattcgaaaagcagttcaacgagaatgaagccatccaatggatgcaggaaaactgggtgatgtctgcgcgacagggaaggcgggagagatgccacagtccagattcgccttacctgtggttcccctcccctcccccggtttttcatctaggattttggggttttcttcgcttgggcctnttccccgcaaccggagttttgaaagggcagtgggaggggagggaccttgttcttcctgttggcctttaaccctctcccgcccgccgcccttggccctgggcctcgctgtctctccatccctcgtgtccttcctttctccttgcagcgctcctacttcaccgtcctcctctttctgccgctcctcaggcggatgccccctttttagtacccctttccccacgcggttccctttccggtttcatagagagaccgggtgggagggaggaggggacaatgaaaacagtaataaatgaatgaacccgagcgagtggagccacgccattattaagtttctgttttacggaaacgccttttggacacacttctaattctgtgcgtagctgctgattggagttcaggcacacagattaaaagcccctccgtctgcagagtccttaggggctcttccctaggaaactaataatcagggaaaacacctttcttgtttactgtagtccccccgccagaccttttgaaaatccctgtgtgggaggcgatccagtgtcaccttgcaatatttaacagaggagggtgtgctcatctcgcttcttgtagacagggttgtggcagaggcattcctctcctc

SEQ ID NO: 2746 - DNA, 295 bp, Homo sapiens
  SIMILAR (211)..(182): 701254mologous to Homo sapiens Human secreted protein, SEQ ID NO: 7083,accession number G03002,Smith-Waterman Score=41.
ggatgtgttcggagtttcttccttttggtgggttcgtggtctcactggctcaggagtgaagctgcagaccttcgcggtgagtgttacagctcctaaggcggcgcgtctggagttgttcgttcctcctggtgggttcgtggttttgctggcttcaggagtgaagctgcagaccttcgcggtgagtgttacagctcataaaggtagtgtgaacccaaagagtgtgcagcagccagatttattgcaaagagcaagtgtgaaaggggacccgagcgggttgccactgctggctcgggca

SEQ ID NO: 2747 - DNA, 2277 bp, Homo sapiens
  SIMILAR (46)..(1683): 921254mologous to Homo sapiens glycerol-3-phosphate dehydrogenase,accession number U36310,Smith-Waterman Score=2585.
atgctcaaaccccttatgggagggggagcacacagaagggcagctgcaggagccaggaaatgggatggtactgctatcattgcatctacctctggattagaggttctttgggtcactacctctagatcgaagactgttgagagcgtcggactggcaaagccaggacaacataacgatgcacggatgaaccttgccattgctctgactgctgccaggtatggggctgccacagccaattacatggaggtagtgagcttgctcaagaagacagacccccagacagggaaagtgcgtgtgagcggcgcacggtgcaaggatgtcctcacagggcaggaatttgacgtgagagccaaatgtgttatcaatgccacgggacctttcacggactctgtgcgcaaaatggatgataaagacgcagcagctatctgccagccaagtgctggtgtccatattgtgatgcctggttattacagcccagagagcatgggacttcttgacccagcgaccagtgatgggcgagttattttcttcttaccctggcaaaagatgacgatcgctggcactactgatactccaactgatgttacacaccatccaattccttcagaagaagatatcaacttcattttgaatgaagtgcgtaattacctgagttgtgatgttgaagtgagaagaggggatgtcctggcagcatggagtggaatccgtcctcttgttacagaccccaaatctgcagatactcagtctatctcccgaaatcatgttgttgatatcagtgagagtggccttattactatagcaggtggaaagtggacaacttatcggtctatggcagaagataccataaatgctgctgtcaaaactcataatttaaaagcaggaccaagtagaacagttgggcttttccttcaagggggtaaagattggagccccacactctacattaggcttgtgcaggattatggacttgaaagcgaggtggcacagcatcttgccgccacctatggtgataaggcctttgaggtggccaaaatggcaagtgtgactggcaaaaggtggcctattgttggagtacgtcttgtgtcagaatttccatatattgaagcagaggtgaaatatgggattaaggagtatgcctgcactgctgtggatatgatttcacgtcgtactcgcctggcctttctaaatgtccaggcagcagaggaagccctacccaggattgttgaactgatgggcagggaactgaattgggatgattataagaagcaggaacaacttgaaacagccaggaagtttctatattatgaaatgggctataaatctcgatcagaacagttaacagatcgctctgaaattagcctactgccttcagacattgacaggtataagaggagatgtcataagtttgatgcggaccagagaggctttatgaccgttgttgaggtgcagcgtgtattagagagtatcaatgtccaaatggatgaaaatacactccatgaaattctaaatgaagttgatttgaataaaaatggacaggttgaactcaatgaatttttgcagctgatgagtgctattcaaaaaggaagggtatctggaagccggcttgctatactaatgaaaactgcagaagagaacctcgacagaagagttccaattccagtggaccgtagttgtggaggattgtatttctgtgtccggaattggtgggttcttggtctcactgacttcaagaatgaagccgcggaccctagcggagtgaagctgcagaccttcacggtgagtgttacagctcgtaaaggcagtgtggacccaaagaactcaggagcccagttggcttcacccagtggatcccgcactggggctgcaggtggagctgcctgccagtcccgcgccctgcgcctgcactcctcagcccttgggtggtcgatgggactgggcgccgtggagcacggggcagtgctcatcggggaggctcgggcggcacaggagcccatggagggggtgggaggctcaggcatggcgggctgcaggtcccaagtcctgccccgcgggaaggcagctaagacaccgagaaatcacctaagatttcttggagctgcctccactcagctcctcaaactaaaaatgcttacatcggccaaaatctatttcttcatcccaattagttcagcaaagatagactatactattcaaggcttcagtctcaatgccaatacacaagggctctgcacagaccttgcagatacctcatctgtgcacgcagctttagaggtatga

SEQ ID NO: 2748 - DNA, 339 bp, Homo sapiens
  SIMILAR (152)..(3): 661254mologous to Homo sapiens Human secreted protein, SEQ ID NO: 7678,accession number G03597,Smith-Waterman Score=133.
atgaagccgcggaccctcgcggtgagtgttacagctcttaaggtggcgcgtctggagtttgttccttctgacgttcggatgtgtttggagtttcttccttctggtgggttcgtggtctcgctggctttaggagtgaagctgcagacctttgcgactcaggagcccagctggcttcacccagtggatccctcactggggctgcaggtggagctgcctgccagtccctgtgcagtgcgcccacactcctcagcccttgggtggtccatggggctgggcgccgtggagcagggggcggcgctcatcgaggaggctcgggccgcacaggagcccacggattgg

SEQ ID NO: 2749 - DNA, 447 bp, Homo sapiens; identical to SEQ ID NO: 58
  SIMILAR (131)..(340): 411254mologous to Streptomyces coelicolor A3(2) putative acyltransferase,accession number AL391515,Smith-Waterman Score=123.

SEQ ID NO: 2750 - DNA, 819 bp, Homo sapiens
  SIMILAR (138)..(1): 671254mologous to Homo sapiens Human secreted protein, SEQ ID NO: 7420,accession number G03339,Smith-Waterman Score=146.
atgtgggaaagtttgacactttctagagacttcttgaatggctttgaccaaaatgctgatagtggtatagacaataaagttcaggttgaggtggcctcagatgaagatgaggaacttgttgggaactggaataaagaaagggaaaacccattttctggggagaaattaaagccagctgccgaaatttgcataagttacaaggagccaaatgctaatcaccaagataatggggaaaatgtcgccagggcatgtcagagacctttgcagcatcccctcccatcacaggcccagaggcctaggaggaaacaacggtttcctgggccaggttcagggcccacctgggacttggtgccatgcatcccaggtgctcctgccttgactaaaaggggccaaggaaaccaaaatcatggtattctgaaggccagagatatgaatctccgtcatttggcatcccactgggatcggatttgtttcactactaatgctctgctgctaaaaccatacaagttgcctccctctaggcccagggactactgcggaagagctgccttccctcgtggcagggttcgggacctgcagcccgccatgcctgagcctcccacccactccatgggctcctgtgcggcccgagcctccccgatgagcaccaccccctgctccacagcgcccagtcccatcgaccacccaagggctgaggaatgcgagcacacggcacaggactggcaggcagctccacctgcagccccggtgcgggatccactaggtgaagccagctgggctcctgagtctggtggggacgtggagagtctttatgtctag

SEQ ID NO: 2751 - DNA, 720 bp, Homo sapiens
  SIMILAR (317)..(556): 351254mologous to Hydra sp. mini-collagen,accession number X61047,Smith-Waterman Score=98.
atgggctgcaaacattggatgacctgtggcagagcacggaaagaaggcaaggatgacagctacatgcagacccaatggctccatcgtgccttcgctgctccaccagagacctgtccctttcctctccgggaccacattcagacagggagggacttgtatattctaggtacatttgagaagtgtgtattttggggtggggcagaaagggaggtgtggagggagaggcaccagcgggaaccggggctgcgtgcagcatttgcgggccagttggagttcccagcgggtgtgggcttggcgggccccgcactcggagcagccggccagccctgctggccccggggcaatgagggacttagcaccagggccagtggctgcggagggtgtactgggtcctccagcagtgccagcccaccggtgctgtgctcgatttctcaccaagccttagctgccttcctgcggggcaggtctcgggacctgcagcgcgccatgcctgagcctcccaccccctccatgggctcctgtgcagccggagcctccccgacgagcaccaccccctgctccaaggagcccagtcccatcgaccacccaagggctgaggaatgcgagtgcacagcgcgggactggcaggcagctccacctgcagccctggtgcgggatccactaggtgaagccagctgggctcctgagtctggtggggacatggagagtctttatatctag

SEQ ID NO: 2752 - DNA, 444 bp, Homo sapiens
  SIMILAR (399)..(187): 641254mologous to Homo sapiens hypothetical protein,accession number AL162044,Smith-Waterman Score=229.
atggcagaaggtaaaggagaagcaggcaccttcttcacagggtggcagactggaccaccagaaaggcagattgtggttggaatatgttccatggcaaagaaatccaaatccaaaccaatgaaggaaattcttgaacggatctccttatttaaatatatcacagtagtagtatttgaagaggagggcagggctcgggacctgcagcctgctatgcctgagcctcccacccactccatgggctcctgtgcggcccgagcctccccaacgagcaccaccccctgctccacggcgcccagtcccatcgaccacccaagggctgaggagtgcgagcacacggcgcgtgactggcaggcagctccacctgcagccctggtgcgggatccactgggtgaagccagctgggctcctgagtctggtggggaggtggagagtccttatgtctag

SEQ ID NO: 2753 - DNA, 519 bp, Homo sapiens
  SIMILAR (321)..(416): 651254mologous to Homo sapiens Human secreted protein encoded by gene 81,accession number Y00337,Smith-Waterman Score=126.
atgggactgggcgccgtggagcagggggcggcgctcgtcggggaggcttgggccgcacaggagcccatggagggggtgggaggctcaggcatggcgggctgcaggtcccgagccctgccccgcgggaaggcagctaaggcccggcgagaaatggagcgcagcgccagtgggccggcactgctgggggacccagtacaccctccgcagccactggcccggtgcagcggtgggctgaagggctcctcaagtgtcaccaaagtgggagcccaggcagaggaggtgcccagagcgagcgagggctgtgaggactgccagcacgctgtcacctctcctaaccacctggactcagtgatatggtttggctgtgtccccaccgaaatctcatcttcagttgtagctcccataatccccacatgtcatggaaaggaactggtgggagtaggaggtgctgctcaggcaatgcatgctcaggcacacaggactgctcaggcaatgcgtgctgagcaaatgaatacatga

SEQ ID NO: 2754 - DNA, 864 bp, Homo sapiens
  SIMILAR (341)..(706): 371254mologous to Homo sapiens Human secreted protein sequence encoded by gene 6 SEQ ID NO:140,accession number Y91419,Smith-Waterman Score=106.
atgggccatccagatggagattccaagtatacagttgtagatacggatgtggaacttagaatgaaagagaagaaacataccttgaaagttgtagatgtcctagcatcaacaccagcttgcacaaacatgcgtgaagttcttattgacagctgtgtgctagatacctggtgctgtgagatcacagatgaaatacggcaccggcttgtcgtggctgcggccactgtgactctttacagcatcctccttgatgtctgtgagtggcccagtcccctcgtcacgcagccaggcaaaaaacctgtgtctacatacatttttttcatccatcgttcagccagggtccgcagcttgcagggaggtgtggagggagaggcacgagcaggaaccggggctgtgtgcagcacttgtgggccagctggagttacgggtgggcgtgggcttggtgggccccacactcggagcagctggccagccctgctggccccgggcaatgagggacttagcacccgggccagtggctgcagagggtgtactgggtcccccagcagtgccagcccaccggcgctgcgctcgatttcgcaccgagccttagctgccttcctgcagggcagggctcgggacctgcagcccaccatgcctgagcctcccacccactccatgggctcctgtgcggcccgagcctccccaacgagcaccacccgctgctccacggcgcccagtcccatcgaccacccaagggctgaggaatgcgagtgcacggcgcgggactggcaggcagctctacctgcagtcccggtgcaggatccactaggtgaagccagctgggctcctgagtctggtggggacgtggagagtctttatgtctag

SEQ ID NO: 2755 - DNA, 654 bp, Homo sapiens; identical to SEQ ID NO: 627
  SIMILAR (218)..(370): 411254mologous to Myxococcus xanthus response regulator FrzZ,accession number AF049107,Smith-Waterman Score=105.

SEQ ID NO: 2756 - DNA, 801 bp, Homo sapiens
  SIMILAR (316)..(600): 321254mologous to Homo sapiens Human bcl2 proto-oncogene mutant protein fragment 72,accession number Y21224,Smith-Waterman Score=112.
atgagggcactgactgcttcttggtggtaccaagtctcaaccaagaaaaacagcagatcatccaatgcctccaataaacagatgactccctttctatatggaagagtatccagggaaattaaaaaagaaaactggaaactcaaagaagagcaaaatcctgtatcaggaagccacggaccaaatctgacaaagactgcagtgtggaatgttttgagctacttgtggagtgtaaagaaaaaggcccacttgaccttcactcttagaacatcgtttgtcaagtggaccaagggaggtgtggagggagaggcacgagcgggaaccggggctgcgtgcggcgcttgcgggccagctggagttccgggtgggcgtgggcttggtgggccccgcactcggagcagccagcaagccctgctggccccgggcaatgggggacttagcacccgggccagtggctgcggagggtgtactgagtcccccagcagtgccggcccaccggcactgtgctcgatttctcgctgggccttggctgccttcccgcggggcagggctcgggacctgcagcccgccatgcctgagcctcccacccactccatgggctcctgtgcggcccgagcctcccctaggagcaccaccccctactccactgcgcccagtcccatcgaccacccaagggctgaggaatgcgagcgcacggcgcaggactggcaggcagctccacctgcagtcccggtgcgggatccactaggtgaagccagctggactcctgagtctggtggggatgtggggagtctttatatctag

SEQ ID NO: 2757 - DNA, 930 bp, Homo sapiens
  SIMILAR (536)..(772): 381254mologous to Hydra sp. mini-collagen,accession number X61048,Smith-Waterman Score=115.
atgagaaaattttgcaggggcagagatattgagaaacacagcatccagttctacccactcctgggaccctcttttactgtcttcgttaagcatcttctgcatataacttgtggcctgcagcacctggctaagatcttcctccactccctccctgggagactgcacagcctagctgggaaagtcaaagccatcaaggacccagaaaatgttacaagggctcctcaaaagccagcaagtgccagaaccaccacccaagcagctggttgcagagccgactccccgttcttaaagggcctgagcctatgggaccggaagagctccacagtctgcctgtctctggtggtggaagaccactctcagaagcgcgggctgaggcttgcacacagtcagattcccgcgcagcacgtgcacagacccacctctgctcagagtgagcctaaggtaggagcaggagagagagcatgtcttaagagagaaagccaccttcatgaacagacgctcacctgctccattaatgccaagagcagccagccagccctgctggcccggggcaatgggggacttagcacccgggccagtggctgcggagggtgtaccgggtcccccagcagtgccggcccaccggcgctgtgctcgatttctcgccgggctttagctgccttcccacggggcagggctcgggacctgcagcccgccatgcctgagcctcccacccactccatgggctcctgtgcggcccgagcctccccgacgagcaccaccccctactccacggcgcccagtcccattgaccacccaagggctgaggaatgtgagcgcacggcgcaggactggcaggcagcttcacctgcagccccggtgcgggatccactaggtgaagccagctgggctcctgaatctgatggggacgtggagaacctttgtatctag

SEQ ID NO: 2758 - DNA, 3594 bp, Homo sapiens
  SIMILAR (160)..(636): 851254mologous to Mus musculus retinoid X receptor interacting protein No.6,accession number U09416,Smith-Waterman Score=711.
atgagggagtggaggcgagggagtgggcgatgcaacagggaaggagggaaaaccaaagaggtcagttgtcaagatccctggtgtgggggaggccagcttgatgccactgggagcagcacagagaactgtcagcagagggtggctgtgaataagctaagaatggtaatgcagtttcaggggttagaaaatccaattcaaattagtcctcactgcagctgtacgccgtcaggatttttcatggaaatgatgagtatgaagcccgcgaaaggtgttttaacagaacaagtggcaggtcctctgggacagaacctggaagtggaaccatactcgcaatacagcaatgttcagtttccccaagttcaaccacagatttcctcgtcatcctattattccaacctgggtttctacccccagcagcctgaagagtggtactctcctggaatatatgaactcaggcgtatgccagctgagactctctaccagggagaaactgaggtagcagagatgcctgtaacaaagaagccccgcatgggcgcgtcagcagggaggatcaaaggggatgagctgtgtgttgtttgtggagacagagcctctggataccactataatgcactgacctgtgaggggtgtaaaggattaagggagggttgtggagggattgggcactggggagtggggctctggccccacagctgtggggctgggtggggcttggtgccacagctgttgacacagtctgagatctgttggagtgctgttgtatttggtcttcagtcaccagtgggaaaggtctctgtgacaccatcctggggtactgagcacactcttccatcacgtctggccctggctgtctccttcattcagctcagggatcccattggtgctacacattccccagatggcaatgccaaccctgtctacttatcctgtattaccagcaaggctctgttcctcagtgaatttcctttccattcattttcaaatgacttttctgatatgagcattgttgaatatgcacaagaaagaggcagagttcaggcattggtagcctctcagttgtattatggcaatagtctcctctctctagtctccaatacgcgttccacctttaccttgctccgaggagcttcccaacatacaggtttcttcaggagaagcattaccaaaaacgctgtgtacaagtgtaaaaacgggggcaactgtgtgatggatatgtacatgcgaagaaagtgtcaagagtgtcgactaaggaaatgcaaagagatgggaatgttggctgaatgtatgtatacaggtattcacttcaagcaattacatttcactaaaaatctcttaaggaggcagatgtcaggcttgttaactgaaattcagtgtaaatctaagcgactgagaaaaaatgtgaagcagcatgcagatcagaccgtgaatgaagacagtgaaggtcgtgacttgcgacaagtgacctcgacaacaaagtcatgcaggttaaaagaagaattcagtgcagaagaaaattttctcattttgacggaaatggcaaccaatcatgtacaggttcttgtagaattcacaaaaaagctaccaggatttcagactttggaccatgaagaccagattgctttgctgaaagggtctgcggttgaagctatgttccttcgttcagctgagattttcaataagaaacttccgtctgggcattctgacctattggaagaaagaattcgaaatagtgggctggccaaggctggagcccactcccttagcttgcagggaggtgtggagggagagacgcgagcgggaaccggggctgcgtgcagcgcttgcaggccagctggaattccgggtgggcgtgggcttggcgggcccctcactcggagcagccggccagccctgctggccccgggtaataagggacttagcacccgggccagtggctgcggagggtgtactgggtcccccagcagtgccagcccaccggcgctgcgctggatttctcaccgagccttagctgccttcccgaggggcagggctcgggacctgcagcccgccatgcctgagcctcccacccactccatgggctcctgtgcggcccaagcctccccaacgagcaccaccccctgctccacggcgcccagtcccatcgaccacccaagggctgaggaatgcgagcgcagggcgcatgactggcagacagctccacctgcagccctggtgccggatccactaggtgaagccagctgggctcctgagtctggtatctctgatgaatatataacacctatgtttagtttttataaaagtattggggaactgaaaatgactcaagaggagtatgctctgcttacagcaattgttatcctgtctccagcctgggcaacagagcgacaccctgtcttcaaaaaaagagaaagaaaaaaacccagtaactgcctggagggagttataaaggctgcagcggaacttgctgtgggtttaccctggaacttgggaaagtttcatacaggagatggtacttctgctgggcttcaagggatagccccaaattcagtgggtccaggtcagccagctcccgagtggatgtggggttgggagcggctcttaacagaccaggataaaactcagggaagcgccttcagctgcaccgcaacattccaggacgctcagaagcaattattacaggcgaggttcattcacctctcaggcctgtgggaacaacaggacgggctgtggctttcgaactggctgtcgctgaaaggccagatcggaggacctgctctgactgaaccacttcgcctttcagtgaacagagggacttggccaccgaagctccgagacgcccggaggcgcagcgctggacgcgctgacaggcgagcgcccacgggtcgcgtgcttcccggcagcccgggggcggggcctcagaccacgcccccgccttatgattggtcccttcgaaacaggcggcggccagcggctactgaccctgaggcccaggcggcggcggcagcggcggcggttggtcaggggcgtgttggccccgcacagattgagccgagttgtcgccccgctgggagaagtgaccctcctgcgcctggccccgaagctgaggtttgttgggtctcccggctgcgggagccagtacgctctgcgtttgcctggctgcggcagtcgcgtgctctgattggctcctggggccgtcaaggtgacgttgcgcctgccttcacctgtccacccaatgcggagagaggggcgacaggtgtgcggggcggttggggctgctggtgtgggcgagctcagctggggaggagggatccagccgctactcgccctgctttaaatccagagcggtatcagagcccgaagtccatgcagggtctagaacgcccacatgtgcggaactggggaatagagctggagaccctgcgcgatgccttccgcccacaaccctcagtttggaggactgcccggggagaggctggcaaaagaaagggaaggcttgtagagtgccttggaagtcagaggaaagttttggagggcgtgctcctctatgcagtcacccgtggttcctttcctaatcttttcacaccgagggattga

SEQ ID NO: 2759 - DNA, 654 bp, Homo sapiens; identical to SEQ ID NO: 1923
  SIMILAR (643)..(170): 311254mologous to Bovine herpesvirus 1 UL36,accession number Z78205,Smith-Waterman Score=95.

SEQ ID NO: 2760 - DNA, 444 bp, Homo sapiens
  SIMILAR (1)..(141): 911254mologous to Homo sapiens PRO1546,accession number AF116638,Smith-Waterman Score=222.
atggaatactatgcagccataaaaaaggatgagttcatgtcctttgtggggacatggatgaagctggaaaccatcattctcagcaaattatcgcaaggacaaaaaaaccaaacaccgcacgttctcactcatagcccttgggtggtcgatgggactgggcgccgtggagcagggggcggcgctcatcggggaggcttggccgcacaggagcccacggagtgggtgggaggctcaggcatggcgggctgcaggtcccgagccctgccccgcgggaaggcagctaaggcccggcgagaaatcgagcacagcgccgcattcaatccttataaacagttgcgaaaatcctatgtatacaaacagctaccagtgccaatacctctgctaagggccacacccttactgcgccatcacagaccctatggaaacactgaggtcctctgctaa

SEQ ID NO: 2761 - DNA, 1560 bp, Homo sapiens
  SIMILAR (1122)..(997): 881254mologous to Homo sapiens Human secreted protein, SEQ ID NO: 7217,accession number G03136,Smith-Waterman Score=187.
gtaggcctttcttacctggacactactgtttgttctggatatgctaaccactttaaagacgttgatgattctaaacactcattcaggctggccaaggccggagcccactacctcagcttgcagggaggtgtggagggagacgcacgagcgggaaccggggctgtgtgccgtgcttgcgggccagctggggttccgggtgggcgtgggcttggtgggccccacactcggagcagccggccagccctgctggccccaggcaatgggggacttagcacccgagccagtggctgcggagggtgtactgagtgccccagccgggctggcccaccggcactgcgcttgatttctcgccgggccttacctgccttcccatggggcagggctcgggacctgcagcctgccatgcctgagcctcccacccactccatgggctcctgtgcggcccgagcctccccgatgagcaccaccccctgctccacggcacccagtcccatcgaccacccaagggctgaggaatgtgagcgcacggcacaggactggcaggcagctccacctgcagccccggtgtgggatccactaggtgaagccagctgggctcctgagtctggaactaacatttccattacacctggaaatgccacatttgtgacccgggtgcagggacaggcttggtttgcctcatgtatcactggtcatgatatgtctagtttaaaaacttccagtgtcgtggtattaaggagacaatctgaggcacttctaccagccaatttgacatgcaattggcaagattcttctgcccttgccaccttagaaagtgccctgtcccaggtcagacacaaaagattcacatttacacttatggtctttacaggctcagccatagacattatggcaactgttagcattgctgttgtatctattactgaatcagtacaaacaactgcttttgtagataatctggccaaaaatatatgtgatgaacttctcctacaggacatggatgaagctggaaaccaacattctcagcaaaataacacaagaacagaaaaccaaacaccacatgttctcactcataagtgggagttgaacaatgagaacatacggatacagggaggggaacattacatactggggcctgttggtggcagggatgagaagacgctgttgctgaggacttactgtttaaagtcacaagaaggagcagacacaaaatgcagaaataagcacaacaaagagacacagaaacagtccaagtctctggtatactcttccaccctgaatcctgagaaactcttagtgtgtaagagactgtctcttgaactaactcggccagaaaacactctcagatgcactaacatagggaagctaaaagcagtcgcggggggtatgtctgcagcttcaggaatatatctggaaacagacacacaaccctaccccctgaaacaggaattaaaagaaattaaagaatgtgtaggcaaaaactcagttgtagataagcacaacaaagagacacagaagcagtccaagcctctgacaaactctcctgtcctgaatccttaa

SEQ ID NO: 2762 - DNA, 1827 bp, Homo sapiens
  SIMILAR (1200)..(148): 851254mologous to Homo sapiens putative helicase RUVBL,accession number AF218313,Smith-Waterman Score=1534.
tcactcagaataaaggcagaggacgtcccaggccaacagccggcagccttccagacatggcaggaggaccccaggagggatcacgcaacggcaggaggagaaccgactacctgaaggggccatccttgtgggcatatgcacgacatgcaaccccctcaactcttcaggcaggtactcctgatccacaggctcgctgtacatggggttgtacttgtagcctttgccatagcccaaatccttcatcagcctagtgggcgcgttcctcaggtgcaggggcacggggggcagtggcccctggtggttcctcaggcaggctttgacgttgttgtaggcgctgtacacctcaatggactttggggctctggcaaagtagaccacacactgggccagaagcacctcacattcaggcatgcctataaaatgacagccttggtaggcagcaaccgcttgtgttaacgcagatgggtctgccagacctatgtcctcgctggcaaacctgacaagcctccgtgccacgtagagtgggtcctctcctccctcgagcatgcgagccagccagtagagggaggcgttctggtctgagccccgcatggacttgtgcagggcggagatgcagttgtaatgctcctcacctgcccggtcatataaaatgtgggatcgctgtaggccctccttcacgtcattctctgtgatcagaactctactgggagaataggattgcccactcttcttacagaacatcttcctagagcttaacctagccagcaccgccagctgcagtccgttcaacccagctcgggcgtcaccgtcactgaggtaagccagggtgtctactgctttatcctctatgaacatggcgggctctgagctgctgttgctgctgtggctcagagggtcagtgggacggctagagtctaggacgtggattcccagggagttgatcgctcgcattaaaatagtcaccattgcctctactggaagcttctcaagaacaatcactcgacagcggctcagaagagcagcgttgacctgctgagatttattgaaccgatgaatctcatcaataaaaaggatggttttccttttgaaaaagctcttttcattttgagcttgttttatgacatctcgcacatcatttgtcttggcatttgttgcagataatgtcacaaaccttatgctatgtttcttgctgttgctggctatgatgtgagccagagtggtttgaatcgaggagacttccacatctttgctatccattgcgcctggctttgtccactcgctgacttcttcatatataagctcattttccacgagcgggaaccggggctgcgtgcagcgcttgctggccagctggagttccgggtggacgtgggcttggcgggccgcgcactcggagcagccggccggccctgctggccccgggcaaagggggacttagcacccgggccagcggctgcggagggtgtactgggtcccgcagcagtgccagcccaccggcgctgcgctcgatttctcgccgggccttagctgccttcccgcggggcagggctcgggacctgcagcccgccatgcctgagcctcccacccactccatgggctcctgtgcggcccgagcctccccgacgagcaccaccctctgctccacggcgcccagtcccatcgaccacccaagggctgaggagtgccagcgcatggcgcgggactggcaggcagctccacctgcagcccggacatatgtagagtgtgtcggtcagaaggaacacctgagaaaccgctttatcatccttgtgtatgtactggcagtattaagtttatccatcaagaatg

SEQ ID NO: 2763 - DNA, 2770 bp, Homo sapiens
  SIMILAR (1682)..(2767): 941254mologous to Homo sapiens putative p150,accession number U93563,Smith-Waterman Score=1815.
tcagggacagtcccgcccacatttgtgaggacagtcattcaggcacaaggggctcgtacagtcattcagcaatcgttgattgggagcctctatatattcagacactgtgttaggtgccaggggattgagtctgtctttgtcatcattctggagaaccctgaagtctagaagtggcctggagtagccccgtctgcgatctgccgggacgcttccggccgcgggctggcacgcccttggctgcgcaaatccaagtgcctggcctgccaccttgtggacaccaggagtaaaaccgccggtgggctggctccagtgccctctgcccaccttatctctgtgcgccctatctctgaaatgcatctctataagaacttccacttggacgttcagaatgatctctaacatcacctcaccacagccatcacaatcactttccttaattgcataaccatcatctcttggtgacatacggtcatttctccaggaagagattggctctctgcatggaggacctccataattctctcttccacgtgatatgggaccggcactgcgcttgatttctcgccgggccttacctgccttcccatggggcagggctcgggacctgcagcccgccatgcctgagcctcccacccactccatgggctcctgtgcggcccgagcctccccgatgagcaccaccccctgctccacggcacccagtcccatcgaccacccaagggctgaggaatgtgagcgcacggcgcaggactggcaggcagctccacctgcagccccggtgtgggatccactaggtgaagccagctgggctcctgagtctggaactaacatttccattacacctggaaatgccacatttgtgacccgggtgcagggacaggcttggtttgcctcatgtatcactggtcatgatatgtctagtttaaaaacttccagtgtcgtggtattaaggagacaatctgaggcacttctaccagccaatttgacatgcaattggcaagattcttctgcccttgccaccttagaaagtgccctgtcccaggtcagacacaaaagattcacatttacacttatggtctttacaggctcagccatagtcattatggcaactgttagcattgctgttgtatctattactgaatcagtacaaacaactgcttttgtagataatctggccaaaaatatatgtgatgaacttctcctacaggacatggatgaagctggaaaccaacattctcagcaaaataacacaagaacagaaaaccaaacaccacatgttctcactcataagtgggagttgaacaatgagaacatacggatacagggaggggaacattacatactggggcctgttggtggcaggttgccaacatccaaactcgctgttgattgccagctcctgctccttgcagcagcccagcatgctctctgctggtgccaaaatacccttccaccaaaccccgctaacttctggaactgtcctagagggtttcctaccctagcaagtgagcttgcctatgtcagccctaaccttgctcttgtcattcagctgagccagaggaaaaaatttgagctattctggggtggtctacagagaaccatcttctttcccttcagtgttctcagaatattgactgttgatgaacaagccaatgatgtgagtgtggctgcagcaaggacccttcaaattttcagagatgacatgattgtatatctagaaaaccccattgtctcagcccaaaatctccttaagctgataagcaacttcagcaaaatctcaggatacaaaatcaatgtacaaaaatcacaagcattcttatacaccaacaacagacaaacagagagccaaatcatgagtgaactcccattcacaactgcttcaaagagaataaaatacctaggaatccaacttacaagggatgtgaaggacctcttcaaggagaactacaaatcactgctcaaggaaataaaagaggatacaaacaaatggaagaacattccatgctcatgggtaggaaaaatcaatatcgtgaaaatggccatactgcccaaggtaatttacagattcagtgccatccccatcaagctaccaatgactttcttcacagaattggaaaaaactactttaaagttcatatggaaccaaaaaagagcccacactgccaagtcaatcctaagtcaaaagaacaaagctggaggcatcacactacctgacttcaaactatactacaaggctacagtaaccaaaacagcatggtactggtaccaaaacagagatatagatcaatggaacagaacagagccctcagaaataacgctgcttatctacaactatctgatctttgacaaacctgagaaaaacaagcaatggggaaaggattccctatttaataaatggtgctgggaaaactggctagccatatgtaggaagctgaaactggatcccttccttataccttatacaaaaatcaattcaagatggattaaagacttaaatgttagacctaaaaccataaaaaccctagaagaaaacctaggcattaccattcaggacataggcatgggcaaggacttcttgtctaaaacaccaaaagcaatggcaacaaaagacaaaattgacaaatgggatctgattaaactaaagagcttctgcacagccaaagaaactaccatcagagtgaacaggcaacctacaaaatgggaaaaaattttcgcaacctactcatgtgaaaaagggctaatatccagaatctacaatgaactcaaataa

SEQ ID NO: 2764 - DNA, 1038 bp, Homo sapiens
  SIMILAR (597)..(746): 941254mologous to Homo sapiens Human secreted protein, SEQ ID NO: 7141,accession number G03060,Smith-Waterman Score=247.
tcatacctctaaagctgcgtgcacagatgaggtatctgcaaggtctgtgcagagcccttgtgtattggcattgagactgaagccttgaatagtatagtctatctttgctgaactaattgggatgaagaaatagattttggccgatgtaagcatttttagtttgaggagctgagtggaggcagctccaagaaatcttaggtgatttctcggtgtcttagctgccttcccgcggggcaggacttgggacctgcagcccgccatgcctgagcctcccaccccctccatgggctcctgtgccgcccgagcctccccgatgagcactgccccgtgctccacggcgcccagtcccatcgaccacccaagggctgaggagtgcaggcgcagggcgcgggactggcaggcagctccacctgcagccccagtgcgggatccactgggtgaagccaactgggctcctgagtctagtgggaacttggaggacctttatgtctagctcagagcttgtaaatataccaatcggcactcggtatttagctcaagctgtaacactcaccgtgaaggtctgcagcttcactgctgaagccagcgagaccacgagcccaccgggaggaacgaacaactccagacgcgccgccttaagagctgttacactcaccgcgaaggtctgcagcttcactcctgagccagcgagaccacgaacccaccagaaggaagaaactcccaacacatctgaacatcaaaaggaacaaactccggacacgtcggcttttaagaactgtaacactcacggcgaaggtctacagcttcactccttgagcccggggagaccaccaaccccaccgggaagaccaaacaactggagaaaccctgggcttaaaagctggaacacttacccggggaaggtccgcaactttcattggctgttctccaagaaggagattgaagacatccgaaataccaccctgcgggacgtgctggtcgctgttatcaacattgaccccagtgccctgcagcccaatgtctttgtctggcataaag

SEQ ID NO: 2765 - DNA, 382 bp, Homo sapiens
  SIMILAR (357)..(295): 381254mologous to Lycopersicon esculentum glycine-rich protein,accession number X55691,Smith-Waterman Score=38.
cctgcgatcacaatcacgagggggtagatctggatttccattggtggttttcttttcggctgcaatttccttttcggcgctgtgctctgtttctcgctgggccttagctgccttcccgtggagcaaggttcgggacctgcagcccgccatgcctgagcctcccacccactccatgggctcctgtgcggccggagcctccctgacgagcaccgccccctgctccacggcgcccagtcccatcgaccacctaagggctaaggaatgcgagcgcacggcgcaggactggcaggcagctccacctgcagccctggtgcgggatccactaggtgaagccagctgggctcctgactctgtgcctaatgtgggtgatgactgtgaataa

SEQ ID NO: 2766 - DNA, 1041 bp, Homo sapiens
  SIMILAR (890)..(588): 351254mologous to Homo sapiens Human bcl2 proto-oncogene mutant protein fragment 72,accession number Y21224,Smith-Waterman Score=117.
atggtgattattaaaagtcaagaaacaacagatgctggtgaggctgtggataaacaggaatgctttgatactgttggggaaaacttggccctggggagtaacaggaatgaaaatcatatggtaagtcataaggacctgacagagccagagttccgattagtgtctgtcccagcaatgtgccagcagaaaggggaagggttggagttcatccgagctggtaggggatggggctccctgaaagcctgcaaagagccctgggatatgatccatcttcagatctctcagccacggataccactacctgttccagtggaggccttcagtgagaaaagtaactgcagatatggtggaaatactaagataactacaataatggagcctgaagctataactaagtttcagaaatcttgtgaaatacactcaggagcccagctggcttcacctagtggatcccgcactggggctgcaggtggagctgcctgccagtcctgcgccgtgcgctcgcattcctcagcccttgggtggtcgatgggactgggcgccgtggagcagggggtggtgctcgtcggggaggctctggccgcacaggagcccatggagtgggtgggaggctcaggcatggcaggctgcaggtcccgagccctgccccgcgggaaggcagctaaggcccggcgagaaatcgagcgcagcgccggtgggccagcactgctggggtacccagtacgccctccgcagccactggcccgggtgctaagttccccagtgcccggggccagcagggctggctggctgctccgagtgcggggcccaccaagtccatgcccacccggaactccagctggcccgcaagcaccgcacgcagccccggttcccactcgcgcctctccctccacacctccctgcaagctgagggagtgggctctggccttggccagcccagaaaggggctcccacagtgcagtgggggctgaggggctcctcaaatgccgccaaagtgggatcccaggcaggggaggtgccgagagcaagcgagggctctga

SEQ ID NO: 2767 - DNA, 642 bp, Homo sapiens
  SIMILAR (375)..(473): 501254mologous to Rattus norvegicus huntingtin,accession number AJ224997,Smith-Waterman Score=83.
ctaacaagataatggtgtcaaggacaggtttttagcaaaatgcactgcattttccattcgaacaataaattgtttccaatggttgtctcttcttttatcatctcgggtttttgttatttcatcctctaagtgatcccaaagctgccccgaggtatacaaatcaaattcagtgcatgtgcagctgccacattgcttcttgggttttgcaccgtcaaaatactttgatattggctcagaacctgagaacttgtttgacatattctgatattctgtaatttttccattcccttcttcacaatgtggtgaacaaaaactaccaaatgagtagcgtgccttagctgccttcccgcggggcagggctcgggacctgtagcccgccatgcctgagcctcccacccactccatgggctcctgtgcggcccgagcctccccaaggagcaccaccccctgctccacggcgcccagtcccatcgaccacccaagggctgaggagtgcgagcgcacggcacgggactggcaggcagctccacctgcagccctggtgcgggatccactgggtgaagctagctgggctcctgagttgtttgggtccacgctgcttttaagagctgtaacactcaccgcgagggtccgtggcttcat

SEQ ID NO: 2768 - DNA, 999 bp, Homo sapiens
  SIMILAR (373)..(453): 1001254mologous to Mus musculus JNK3,accession number AB005665,Smith-Waterman Score=136.
atggataggcctgaaacctgggtacacaagggcagacctgacgcctatgtctgcaaatatttgcctacatctgtagaggctggccttatccttgggtccacagggggctacttggctctgggattggctttgagtctgagtctgcaggaaatagtcagttactgggatggatctgatgtccaggattataggggacagcccagtgctggagaagttccagaggctgggctgctaaggggtcctggacaaggtcgcttggatagcggcctaaccacagcattatacatgctcaggaagaggcaaagccggaaatttaccacttggcaaagcgtctttacaaaaccagagtttggctttgtggtagcttccttagaacttatctacaaggaagtaatgaattcagaagaaaagactaaaaatggtgtagtaaaaggacagccttctccttcagcttgcagggaggtgtggagggagaggcacgagcgggaacccgggctgcgtgcggcgcttgcgggccagctggagttgcaggtaggcgtgggcttggcgggcccccgcactcgggacagccagccagccctgctggccccgggcagtgagggacttagcacccgggccagtggctgcggaaggtgtactgggtcccccagcagtgccggcccaccggcgctgtgctcgatttctcgccgggctgtagctgccttcctgcggggcaaggctcaggacctgcagcccgccatgcctgagcctcccacccactccatgggctcctgtgcggcccgagcctccccgacgagcaccaccccctgctccatggcgcccagtcccagcgaccacccaagggctgaggaatgcgagcgcacagcgcaggactggcaggcagctccacctgcagccctggtgcgggatccactaggtgaagccagctgggctcctgagtctgtgactaaacaagaaaaggaggaggaactgctaccttcacaagacatgaaaacccag

SEQ ID NO: 2769 - DNA, 1700 bp, Homo sapiens
  SIMILAR (695)..(597): 781254mologous to Homo sapiens Human secreted protein, SEQ ID NO: 7102,accession number G03021,Smith-Waterman Score=144.
tcacacagattttctcttgttgtcttctaggagttctatgattttgcattttacatttgggcctataatccattttgagttaatttttgtgaaacatgtaagatctttgcctagatgttttttcaagtgtttggccagttcttcagcgcaatttgttgaaaacaatatctttgcttcattgtattgctttgtcgctttgtcaaaggtcagttgactgtatttatttggctctatttctggagctctattctgttccattgacatgacttcaagcgtagaagccgcggaccctcgcagtgagtgttacagttcttaaaggcggcgtgtccggagtttgccccttctgatattcagatgtgttcggagtttcttccttctggtgggttcgtggtctcgctggctcaggagtgaagctgcgggaccttcgcggtgagtgttacagctcttaaggtggcgcatctggagttgttcgttcctcccggtgggttcgtagtctggctggcttcaggagtgaagctgcagaccttcgcagtgagtgttacagctcttaaggcagggcgtctggagttggtcgttcctccctttgggctcgtggtcttgctgggctcaggagtgaagctgcagatcttcgcggtgagtgttacagctcttaatgcactgcgtctggagttgttcgttcctcccggtgggctcatggtctcgctggcttcaggagtgaagctgcagatcttcacggtgagtgttacagctcataaaagcagtgtggacccaaagacccttgggtggtcgatgggactgggcgccgtggagcagggggcggcgctcgttcggggaggctcgggctgcacagaagcccatggagggggtgggaggctcaggcatggcgggctgcaggtcccggagccctgccccgcgggaaggcagctaaggccctggcaagaaatcgagcgcagcgccggtgggccagcactgctgggggactcagtacaccctccgcagccactggcccgggtgctaagtctcccattttgcccagagccagcagggctgcctggctgctccgagtgcggggcccaccaagcccacgcacacccggaactccagctggcccgcaagtgccgcacacagccccggttcccgctcgcgcctctccctccacacctccccgcaagctgaaggagagggctccggccttggccagcccagaaaggggctcccacagtgcaggggggaggctgaagggctcctcaaatgccaccaaagtgggagcccaggcaggggagaagaattgtggcattcacgatagaagtgggggtgttgagggaagatctgttttgaatggtgatcctactttgaacattttgggtgtagagcagtacgaggccatcaggtatccaggtggagatggcatactgctgagccagcaggaaaaggcaacaggacgaggggcaggatttgccactggaatgtcagcaggccatacctcaggcgttcagctccatggagcaaagacagtagtgatcacgttccttgacaacagtgctagtgtgcggggagcttttagttttccttttctctgctccttgaaccaagaatccagcatcagcatcagcatcagcatcagcatcagcatctgctcagctgtaggccatgattgtctgtactgtttaccagcagctcatgtaatatgcttgatgtaa

SEQ ID NO: 2770 - DNA, 266 bp, Homo sapiens
  SIMILAR (58)..(135): 441254mologous to Homo sapiens Extended human secreted protein sequence, SEQ ID NO. 482,accession number Y36097,Smith- Waterman Score=60.
tgaacacagcgctgttacggatcggcggagacttggtccatgagtggcgttgtcaggcgaggaatatggctgcgctatgtcgtgtctcttgggagccgccatcttagcacccattccgtacagtgggctgttccacagaaggcgggggcgagagggcgttcacgggtagaatccctctaagggcaagattctgggagaagctggtctttggaactcggttctataagtttgggcaaagtttaaagaagcagaggtgcgccacgaaa

SEQ ID NO: 2771 - DNA, 366 bp, Homo sapiens
  SIMILAR (205)..(315): 371254mologous to Drosophila melanogaster CG14524 gene product,accession number AE003767,Smith-Waterman Score=64.
atgagtgggagtcgaaaggcaaaagttaggtttgtggatgtgcaaggaccattgatgatagaagttacccgtgggagattcggggccctcagtttggcagtgcctcctactgccatcacaggctacagtgatcttgtaaaagggttacacaaccatggaggagctaagggagccttctggcttacctgtcacattagagctgagggctctttctctgttcaccatttgggcaaagagattgaaagaggggagtcacataatcagcatacgtttatgaagattacccccacagctgtgtggcaagtgatcaaaaaggaacaggaccagagaagagcaggaaaactggtcagaaagcaggcgccctaa

SEQ ID NO: 2772 - DNA, 421 bp, Homo sapiens
  SIMILAR (292)..(327): 581254mologous to Homo sapiens Human neurofilament-M wild type protein fragment 10,accession number Y20668,Smith-Waterman Score=42.
cacagcggctctgggagagggtgcacggtggatgtggccaggtacggtggccgagatcatgaggacagcgggactttcgtcgatctacctgtcagtggcgatgtacaacccccaacctgctgaggggcagaggctcagaggccagtaaccaaaaggtagacactggcagatgccagaggtgggcactacacctgacttccctccccatgactctcggcaacccggcaagacccttaccacacagacgccactccgaggggagggggtcctcaggcgtgtgtggctgccttctcagcccctgaggtcccgcagaagtgccccatcttacatgcaagaactcttaggcagaacaggggcttgagagaccaatgaagttttgacgtttgctgagacagaactaaggtgactttttttgacgaaa

SEQ ID NO: 2773 - DNA, 550 bp, Homo sapiens
  SIMILAR (225)..(91): 601254mologous to Homo sapiens Human secreted protein sequence encoded by gene 11 SEQ ID NO:72,accession number B24447,Smith-Waterman Score=120.
atggtggacacccctccctccaccaagctcaagcattccaggttgacttcagactgctgtgctggcagtgagaatgtcaagccagcggatcttagcttgctggtctccatgggggtgggatctgctgagctagacgactcggctccctggcttcagtcccctttccaggggagtgaatggttctctctcgctggtgttccagggcacccctgggttgtgaaaaaaaaactcctgcagctagctcagtgtctgcccaaatggccgcccagttttgtgcttgaaacccagggccctggtggtgtaggcacctgagggaatcctctgggtctgtgggttgcaaagaccgtggggaaagcatagtatctgtgccggaatgccccgttcctcacggcacagtccctcacggcttccatgggctcagcaagggagttccctggccccttcccgtataagacgacgccccaatgtgctaaggatccgcctctgtagggtgcaccacctttataaccagtcccagtgagatgaggagcgtggacgcggcctcggtcat

SEQ ID NO: 2774 - DNA, 599 bp, Homo sapiens
  SIMILAR (192)..(329): 311254mologous to Homo sapiens dJ71L16.5 (KIAA0267 LIKE putative Na(+)/H(+) exchanger),accession number AL022165,Smith- Waterman Score=45.
  misc_feature (1)...(599): n = a,t,c or g
aaaattggtttcagatacttgtggtcaaagctataccacattctgaagccaattttaacccactctggtcctccgctgactacaacattacctgaatggtgtggtccgatttccaggctgcttaccagtcctcaagcctatggggaacagctaaaagaggatgatgtcggaatgcattgtaacccagggatgaactacccataaattacccaggagcaagcctcctcaccctgcagtcctcctgccaaggcttaggtctggaccagaaagcttcaccccagaccgccaggcanacggaaaacatttatgagggagacctcggccctgggaggctatgaactcaagcttgagcaaactttgggtcaatcccagtttgaattaattggcatgaagagtacagatgtaatcacaagtaatgcaagactcactgaggaatacaagccaagctgatgaggcagtacaggggagaggctggaaaacatattaagagcataaattggagagaatcaaagccttgtcacatggatcctctggtgcctgaagaaatgagattttattatccctctctattatgcaaatgaatttagttttttgacagc

SEQ ID NO: 2775 - DNA, 993 bp, Homo sapiens
  SIMILAR (73)..(2): 661254mologous to Homo sapiens Human secreted protein, SEQ ID NO: 7133,accession number G03052,Smith-Waterman Score=97.
atggagaaattggaatctttgtgcactgttggtgagaatgtaaaagggtgcagctgctatggaaaacaacttgtgtcctttgttggtggaagagcatctgcctgggttctttcttgtcagagctggagtggcaccagtcatggtcccacagtggagagtaacatgcttttagctattctgtccttgaggaaaaagcacccagagcctgcagtgcacacagtcagccttggtcagccacccctcatgactgacacccactcgctgctcttgggcattccaggcataattctgtgtctacatgaaccagtagaaggaacggcaaagggcttggcacctgtaacccaagggctagtccatagcgagggatgtgggaagaagtgtttgcagttgctgggaaggggcagtgaggaaataaagctgctacagtctttcctgtttgaggaacagctaaaagaggatgatgtggaatgcattgtaaaccaggatgaactagccataaattaccaggagcaagcctcctcaccctgcagtcctcctgcaaggctaggtctggaccagaaagcttcaccccagacgccaggcaaggaaaacatttatgagggagacctcggcctgggaggctatgaactcaagcttgagcaaactttgggggttgcctatggctgggtgtgccctgccctaaatgcagcaccactttcaagcttagtaggaccattccaagaaaaccaggtttcttctccccataccacgttgtgcctgaagaacaagccttcccgtccttgcctgcatctcttgtactcagagtgccagctgaagcaggcactgaaagctaatgtatgggacatgcagggatcctgtgggccagaaacagctaacagactagcaagacaagtcactgaaggaatgaagagagcagggatggactggggaggcgtcccagagaagggaaacctgagtcaagcagaggggcacagatgccgcctttcccactag

SEQ ID NO: 2776 - DNA, 369 bp, Homo sapiens; identical to SEQ ID NO: 746
  SIMILAR (11)..(130): 451254mologous to Sus scrofa pol protein,accession number AF038601,Smith-Waterman Score=81.

SEQ ID NO: 2777 - DNA, 321 bp, Homo sapiens
  SIMILAR (89)..(6): 411254mologous to Homo sapiens Human myelin protein zero polymorphic region,accession number W94673,Smith-Waterman Score=66.
atgaagaaaacaccaattcttgaatttcctccttcttgctgtgggaaatgtatagctgatgaagcccattcccttgtccacaacccacacatatcacggagcagaaaacgccagtctgaaagtcaaaggaagaagtgtagcaggacaagccgcagacaaaacccctcagacaccgagttaaagaaggaagggctttattcagccgggagcttcggcaagactcacgtctccaaaaaccgagctccccgacatctggacgtcaatccagtcctacttctgttgaatgccgcagagtacactttaaaccgttgggacctttaa

SEQ ID NO: 2778 - DNA, 779 bp, Homo sapiens; identical to SEQ ID NO: 747
  SIMILAR (20)..(70): 761254mologous to Homo sapiens Human secreted protein, SEQ ID NO: 4518,accession number G00437,Smith-Waterman Score=72.

SEQ ID NO: 2779 - DNA, 646 bp, Homo sapiens
  SIMILAR (328)..(453): 431254mologous to Homo sapiens gamma-glutamyltransferase 1,accession number AJ006854,Smith-Waterman Score=73.
atagcaatgcctcggggagcttcctcactctgtcctctgtctgcctttcagctgtgagaggaactgcaggccagttaatgccagcaaagacattctgctcagggtcaccatgggggaggactctccagtggctatgttcagctggtatttggacaacaccccaacagagcaggctgagcccctcccggatgcctgcagactcagaggattttggccaaggtccttaaccctcctccagagcaacacctccacgttgctgttgaacagctcgtttctgcagtcccggggagaggtcatccgaatcagagccacagcactgaccaggcatgcctatggggaggacacctatgtgatcagcactgtgcctccccgtgaggtgcctgcctgcactattgccccagaggagggcaccgttctgacgagctttgccatcttctgcaacgcctccacagccctgggacccctggagttctgcttctgtctggaatcagtctgccatgtcttcagcatccagggaatatggtgcacggcatccgttgagatactgcggctgctgggcaagagggcaagagctttcctggaccctcacttgacgaatctgggcactgccaaccagcttggagttcccatcagtgataaagcctaa

SEQ ID NO: 2780 - DNA, 564 bp, Homo sapiens
  SIMILAR (545)..(495): 761254mologous to Homo sapiens Human secreted protein, SEQ ID NO: 4518,accession number G00437,Smith-Waterman Score=72.
cagttcatgttatctatagatttacagacattgtacaagaaaagcactgtgaaaatccgtgtcctgttctgttctgttctaattaccggtgcatgcagcccccagtcacgtaccccctgcttgctcagtcgatcacgaccctctcatgcagacccccttagagctgtgagcccttaaaaaggtcaggaattgctcactcggggagctcagtttttggagacgtgagtcttggccaaagctcccagccaaataaagcccttccttctttaactcggtgtctgaggggatttgtctgcggcttgtcctgctacagggttacagggcgtgagtaaccacatccaggcacatgtgtattaactttctttaaaacattttaaggcactgcagtaaatttgggtctcaaagttggacacaagaagatccatggccaggtgtagtaagtagctcttgcctataatccaaacagtttggaggctgaagggggaggactgcttgaggctgcagtgagccatgatcgggccactgcaccccagcctgggtgacagagcaagtcaccattgtcaa

SEQ ID NO: 2781 - DNA, 408 bp, Homo sapiens
  SIMILAR (87)..(404): 791254mologous to Homo sapiens Human Protease and associated protein-2 (PPRG-2),accession number Y70008,Smith-Waterman Score= 402.
agtgtgagcccggcgcctacaacgcaacaccccgcgctcctctccggctcccccgccgtgcggatcggagccagccggttgttgccatggcattcgccagctggtggtacaagacgcatgtcagtgaaaaaaccagtgaatcgccttccaaaccatgagaaaagaaaggatcatatgagaaaaaagcagcaagcctcggcagcagtcaatcctccagaacctatgctggtggaacagcctctgtcaccaaggtgtcagctttctctggtgcaaccagcaagtcttacagtatgaatcccacagaaaccaaggctggtaaaacagatcctgagaagaagtcacagtgtaccaagccaatgagcctacccaagcatgcatcagatactggaagtagcgatgctcacaata

SEQ ID NO: 2782 - DNA, 1512 bp, Homo sapiens
  SIMILAR (272)..(30): 381254mologous to Hylobates klossii dopamine receptor D4,accession number AB032916,Smith-Waterman Score=95.
  misc_feature (1)...(1512): n = a,t,c or g
atgttcccggggaaggacaagcgggccagcaggcgggccgcggccaatagtccccaaggcgcacggggacaaggagaggcacacaggccaggccgcgtccacgcacaggcagggccacgcgcagtggcggaaggccaggcacgggcacagggcgcacaggcgcggccaaagcggcccaagttggaaggtggtggaaggatgggcggcgtcacatggtcaggcagtcagcaggggcttgggcggaatgggggtaagccaggggtgcacacggggaggccgtggttggccacaggcacacatgccacatggggcagttgcacaagggcatggcaggtcatgcaggtcacccaggcagcaccaccagcaggggcagagggttctgcccacctggcaccgccttgggatgtgcggagctcagtgccagcccggtcccggccaagcgagtgtgagcccggcgcctccaacgcaacaccccgcgccctcgccggctccccgccgtgcggatcggagccagccggttgttgccatggcattcgccagtggtggtacaagacggtaaataggagcggttgtgcctgggcaggacccgaagggagtgtgttggaagggagtgtgtttgctttgcccttctgggcgtgggatgaagcgttgtccggggtttggcggggaaggggtgcggaccgggtggacctcctcgcagaccttcagagggcgattgttggacgtacttcgccgacgcaaaggagaggcagctgcaatgtgaggcaaggagaaaatccaaacatcaaggggcagaagcaactgagatctgagaccaagacccttgagagagcggtggaggggtggaggaaagaaagcgagaaaagcttgtcagctgtgatgagcacattgtccttagccctgctctcatctatgtccctgctaactaaatctcctcagacctacagctgtttggaggtgaatatgcacaatgctggcctgttctttcttcctgtgcggctgactttccgggtcctcagtttccacagtgaagcccaggtctacatgttcacgttacggtttttagcacccagaaagttttttcctctatcttcatttaatttcattactcagtccccacctcccaatgaggaaagaaaacctgccgtttgggtcagttcaagtcaggtctaccattggtccagtcaactgtggctgtggagaagagggatagagcaatggggagccatgatgggatctggaatctactccaaaggaggaacagggtggatnacaagcgacctgcttgtgcgatcgacacctcgactgaggactttgaccgcggactatgacaacccgctgtcgcacaacttgaacgcgctctccaccgtacccacgcggctgcactacccatccataaagcatgattccgcaacgcatacgaccacgcagtcaactaagcacaccgccatcttcgcgcccaccgttagcgacacagctaccgatatatatacacagaccagctaccggtag

SEQ ID NO: 2783 - DNA, 405 bp, Homo sapiens
  SIMILAR (32)..(280): 951254mologous to Homo sapiens tyrosine kinase,accession number X78549,Smith-Waterman Score=421.
cccacgcgtccggccgctgcgcccgcccgtcatggtgtcccgggaccaggctcacctgggccccaagtatgtgggcctctgggacttcaagtcccggacggacgaggagctgagcttccgcgcgggggacgtcttccacgtggccaggaaggaggagcagtggtggtgggccacgctgctggacgaggcgggtggggccgtggcccagggctatgtgccccacaactacctggccgagagggagacggtggagtcggaacctgcgggacacgcaggctgtgcggcactacaagatctggcggcgtgccgggggccggctgcacctgaacgaggcggtgtcctttctcagcctgcccgagcttgtgaactaccacagggcccagagcctgtcccacggcctgcggg

SEQ ID NO: 2784 - DNA, 1026 bp, Homo sapiens
  SIMILAR (754)..(822): 521254mologous to Bradyrhizobium japonicum RagD,accession number AJ225023,Smith-Waterman Score=72.
atggaggctgaggaccgaggggcccctctttgtgtctatgctctgtatctcccgccgagcggcaccagcccgggcagcttcattaagggcctccgccagctctgcagctcacctgctgcagcgcccctcgcgctccgcaaggacattagaaaccgtcaaccaagattaatagttgcccggctccggggcagggagatgagcccagatactgcggcggcggcgctcgcttcgcgcgagccaacccggcacgggctgggcgcaccacctgccgctgctgtcgctccactccgccttcctttcttctcctcctaccactcgcccgcgcacctgaggctctcagctcaaaacgttgccgagacgcttcgatactatcaaagcaaagagactgagatcgcggcagctatagatctgataaatcagcttgatatgaataaacttgagcaaatagttgctgatgtgaataaggcgaaatctgattctcaagctgcgcaaaatcaggctgaattagcgcgtgacgatgcggtaagatcaaaagatgcggcatctgttagcgctcaagaagctaaagacgcagctaacagcatcaatgctgaaaatcttttaactaaggatggaaacttggctggtcttgaggataaaaaagagtcaagaaaaaatattgggttaggtgaaaatgatgctgttaactttcttactattaacaccacgggtgctataggtgcaggaaggaactcatgggacggttctaactggggtagtaagaccatgttgtcatcattgatgattatgtcacctgatggaatatcctcgccagggatttacggtaatgcttacaccgctgatagtggtgctgaaaactatcaatcacttattgctggatcgtgcgacaccagaggtctgggatacgttggcggcgtagcatttggcatgatgactacgggtttatggcttcagggcaaatatcttacgctggaccgcaaggggctggaagtttccaacaggttccggcatctgacagaaatataa

SEQ ID NO: 2785 - DNA, 1044 bp, Homo sapiens
  SIMILAR (517)..(1038): 341254mologous to Bacteriophage N15 gp25,accession number AF064539,Smith-Waterman Score=212.
atgccaaactgtaaggcttataaggtgaccaatggaggacacagaccctttctgaccatcctctacaaaccttggaaagcaaatctatcaaccactcttaaactgaatcctgatcaacgatgctcaactacgctcattttttttttcagagatgccctactttgcacatgtttctccctcgttgtccaaaaaaagccctcctactgtgtcttactccgtggcaataggcgtctgtaccaacagaaaggactggctggggttgtctgggctgagaggccctcccgcaaaccccctcacccaaatgcaatccggctgaccattgtgtggggattctccagcattttgaaccttttctttggtcagaaatacttgaatgactcagagagtttcccaataaaagatgaattgccaggaggtcttcaccacggggctggaagggtaatgcttacaccgctgatagtggtgctgaaaactatcaatcacttattgctggatcgtgcgacaccagaggtactgggatacgttggcggcgtagcatttggcatgatgactacgggtaataatgaatggcccagggcacaaatatcagtaggcactcaagatagggatggatcaggcaatattggtctgcaaatgcatttcaggtttatggcttcagggcaaatatcttacgctggaccgcaaggggctggaagtttccaacaggttccggcatctgacagaaatataaagcacagcataaaggatgatgaatcaagcattgcatacaacaacataaaatcaatgagatttaggaactttatatttaacgatgatgagcaagaaagggtaaggagaggtgttatagctcaggagatagaagagatcgacaatctatatgttaagagaagggtgtatgagagccacgagctaaacgggccaaaagttgaaaggcttgagcttgatacaactcctttattgcttgacactatgagagctttacaggatacaataaagaaagttgaagagttacaagaagagataaaaatgttgaagtccaaatga

SEQ ID NO: 2786 - DNA, 1575 bp, Homo sapiens; identical to SEQ ID NO: 685
  SIMILAR (559)..(807): 841254mologous to Homo sapiens peroxisome proliferator activated receptor,accession number L02932,Smith-Waterman Score= 362.

SEQ ID NO: 2787 - DNA, 1356 bp, Homo sapiens
  SIMILAR (1)..(420): 871254mologous to Homo sapiens putative p150,accession number U93564,Smith-Waterman Score=657.
atgggcaaggacttcatgtctaaaacaccaaaagcaatggtaacagaagccaaaattgacaaatgggatctaattaaactaaagagcttctgcacagcaaaagaaactaccatcagagtgaagaggcaacctacagaatgggagaaaatttttgcaatctactcatctgacaaagggctaatatccagaatctacaaagatctcaatcaaatttacaagaaaaaaacaaacaaccccatcaaaaagtgggtgaaggatatgaacagacacttctcaaaagaagacatttatacatccaacagacacatgaaaaaatgctcatcatcactggtcatcagagaaatacaaatcaaaaccacaataagataccatctcacaccagttagaatggcgatcattaaaaagtcaggaaacaacagaactaaaaaaaactactttaaatttcatacggaaccaaaaagagctcgtatagccaagacaatcctaaacaaaaagaacaaagctggaggcatcacactacctgacttcaaactatactacaaggctacagtaaccaaaacagcgtggaagtggtatacagagagtaagaacacagatgtaaatgcattcataatgctcacatatccaacagcaatcatacacacccacaataagggtaatgcttacaccgctgatagtggtgctgaaaactatcaatcacttattgctggatcgtgcgacaccagaggtctgggatacgttggcggcgtagcatttggcatgatgactacgggtaaggatgttaagccaaagatgttaactggcttcgaccatgggcatgcagtgtgtcttctgctctacctacaacttttcacaatgagagcaatatttcagtacgcatatttcaggattctatacattgcattatataagaatcaagaaaagtcccgaaggtgtacgactgaccaatttgcctgcgtccctgggcaacagtgcatcccagctttatctctctgcttacattctggaagcaggcaaatagctctcatgatgtttatatggatttttacaactgctaatactcgaatatttggagttttcctgatcttgttggatgtggctctgatctttgctgacctaattttcactgatagcaaagtttatattcctttggagtatcgttctatttctctagctattgctttattttttctcatggatgttcttcttcgagtatttgtagaaggacaccaaagaacatctgctagcatcaacactgtccgagaaaacatgacctcaccaaatgaactcaataagacaccagaggccaatcctggggaaacagagatacgtgacctttcagacaaatcaaaatag

SEQ ID NO: 2788 - DNA, 3726 bp, Homo sapiens
  SIMILAR (3248)..(3544): 231254mologous to Homo sapiens bA526D8.4 (novel KRAB box containing C2H2 type zinc finger protein),accession number AL136981,Smith-Waterman Score=44.
atgggtaagaggttgggccagaccaacgagggcttgatccccgtgagtatgcatcgatcctggcttgctgtcaaccaggctcttcccgtgtccaacacccacatgaaaaccagcaatctagcaccccccaaaagtgggaaagcctgtgtgaacacagcccagctatctttgtcacagcctggcaatgtagaaggaaaaaaggccattttcagagcaaacttcaagaagacttcagatatttgcattaaaaagaagaccagtgttaacagagaacacgttactaatgggtgcacctgggtttggggatcagggaagacagtggacatggactcgtaccaatacctggactcttcacacaccaaatcctgggggccaggcactgttgtaggtgccagatatttaattcacatcacagatgtgccattcttgcttctactcctgccatatgaagcatctccttgcccgttggacttctggccctgcggcctagaagagaaaaatggtttcctgggccagctccatggcctccctgctgtgtgcatcctcaggacactgctgcctgcatccgtgcagctccagctccagccatggctgaaagatgcacagccctcacacccctgtgccatggatgtgggacaaggattccaaaaggatgattttggagctgtaggattgaatgactggcctgctgcattttggacgttcatgtatcctggtaatgcttacaccgctgatagtggtgctgaaaactatcaatcacttattgctggatcgtgcgacaccagaggtctgggatacgttggcggcgtagcatttggcatgatgactacggatggggacattggttttggacctttacaacagaggatgtctgaagaagtttctttccagtctgagattaatattaatctcttcacaagagatgacccatattccattttagaagaattgtggaaagacgatgaacacacaagaaaatgtggagaaaaccagaacaaacctttaagtcgtgttgtcttcattaacaagaaaacactagctaatgacagcatctttgaatataaggacattggggaaatagttcataaaattcatactagagagagcctctatttgttttctgactacgtaaatgttttctccccgaagtcacatgcctttgcacatgagagtatttgtgctgaagaaaagcagcatgaatgccatgaatgtgaggcagtcttcactcagaagtcccagcttgatggcagtcagagggtttatgcaggaatatgcactgaatatgagaaggatttttccctcaagtcaaaccgtcagaaaactccttatgaggggaattactataaatgcagtgactatggaagagcctttatccagaagtcagatctgttcagatgccagagaattcattctggagaaaaaccttatgagtacagtgaatgtgagaaaaacctccctcagaattcaaaccttaatatacataaaaaaattcatactggagggaaacactttgaatgtactgaatgtggaaaagctttcacaaggaaatcaacactaagtatgcatcagaaaatccatacaggagaaaaaccttatgtatgtactgaatgtgggaaggcctttatccggaagtcacattttatcacacatgaaagaattcatactggagaaaaaccctatgaatgcagtgactgtgggaaatcctttattaaaaaatcacaactccatgtgcatcagcgaattcacacaggagagaatccctttatatgttcagaatgtgggaaggtcttcactcacaagacaaatctcattatacaccagaaaattcatacaggagaaagaccctatatatgtactgtgtgtggtaaggcctttactgacaggtcaaatctcattaagcaccaaaaaattcatactggagagaaaccttataaatgcagcgactgtggaaaatcattcacctggaagtctcggctcaggatacatcagaagtgtcatactggagagagacattatgaatgcagtgaatgtgggaaagcattcattcagaagtcaacattaagtatgcaccagagaattcatagaggggaaaaaccatatgtttgcactgaatgtggtaaggccttcttccacaaatcccattttattacacatgagagaattcatactggagagaaaccctatgaatgcagtatttgtgggaaatccttcactaagaaatcacagctccacgtacatcagcagattcacacaggagagaaaccctataggtgtgctgaatgtggaaaggcttttactgacagatcaaatctctttacacaccagaaaattcacactggagagaaaccttataaatgtagtgactgtgggaaagccttcactaggaagtcaggtctccatatacatcagcaatcccatactggagaaaggcattatgagtgcagtgaatgtgggaaagcctttgcaagaaaatcaacactaattatgcatcagagaattcatacaggagagaaaccctatatttgtaatgaatgtgggaaatccttcatccagaagtcacacttaaatagacacaggagaattcatactggagagaaaccctatgaatgcagtgactgtggcaagtctttcattaagaaatcacaactccatgagcatcatcgaattcacacaggagagaaaccatatatatgtgctgagtgtggaaaggccttcaccatcagatcaaatcttattaaacaccagaaaattcatactaaacagaaaccctataagtgcagtgacttggggaaagccttaaactggaagccacaactcagtatgcctcagaaatctgacaatggggaagtagagtgctccatgccacaattatggtgtggggactcagaaggcgtcagaaaaatggctacaaacttcctagtacatgagaagatctggttcgacaagttcaaatatgacgacgcagaaaggagattctacgagcagatgaatgggcctgtggccggtgcctcccgccaagagaacgacgccagcgtgatcctccgtgacatcgcgagagccagagagaacatccagaaatccctggccggaaactcaggccccggggcctccagcggccccagcggagaccacagcgagctcgtcgtccggatcaccagtctgaaagtggagaaccagagcctgcgcagtgtggtacaggagctgcagcaggtcatctccaagctggaggcccggctgaacgtgctggagaagaactcgcctggccaccgggccacggccccacagacccagcacatgtctcccatgcgccaagtggagcccctggccaagaagccattcacaccagcagaggatgacgacgatgatgacactgacctgtttggcagcgacaatgaggaggaggacaagaaggcggcacagctgcaggaggagcggctgcagcagtacgcggagaagaaggccaagaagcctgaactggtggccaagtcctccatcctgctggatttcaagccttgggacgatgagactgacatggcccagctggaggcctgtgtgtgctccatccagctggaagagctgctggtgcccatgggctacggtatccggaagctacagattcagtgtgtggtggaggacgacaaggtggggacagacttgctggaggagatcaccaagtttgaggagcacgtgcagagtgtcgatatcgcagctttcaacaagatctga

SEQ ID NO: 2789 - DNA, 757 bp, Homo sapiens
  SIMILAR (2)..(442): 871254mologous to Homo sapiens elongation factor 1 alpha- 2,accession number X70940,Smith-Waterman Score=644.
  misc_feature (1)...(757): n = a,t,c or g
ggcgggcgtgggcgagttcgaggcggccatcttcaaaaatggtcagactctggagcatgccctgctggcctacacgctgggtgtgaagcagctcatcgtgggcgtgaacaaaatggactccacagagccggcctacctcgagaagcgctactactagatcgtcaaggaagtcagcgcctacatcaagaagatcgggtactacccggccaccgtgccctttgtgcccatctccgggtggcacggagacaacatgctggagccctcccccaacatgcctgggttcaagggctggaaggtggagcgtaaggagggcaacgcaagcggcgtgtccctgctggaggccctggacaccatcctgtcccccacgcgccccacggacaagcccctgcgcctgccgctgcaggacggtgtacaagatttggcggcattggcacggtgcccgtgggccggtgttggataacggcatcctgcggccggggnatggtggtgacctttgcgccagtgaacatcaccactgaggtgaagtcagtggagatgcaccacgaggctctgagcgaagctctgcccggcgacaacgtcggcttcaatgtgaagaacgtgtcggtgaaggacatccggcggngcaacgtgtgtggngacagcaagtctgacccgccgcaggaggctgctcagttcaccttcccagtcatcatcctgaaccaccccgggcagatttagcgccgctactccccggtcatcgactgccacacagnccaca

SEQ ID NO: 2790 - DNA, 3527 bp, Homo sapiens
  SIMILAR (814)..(2166): 1001254mologous to Homo sapiens tyrosine kinase,accession number X78549,Smith-Waterman Score=2422.
ccatgggcgcttccaggccgcactcacggtccttgcctgccccctggcgtccgtgtggaggaaggcagtgcccgtttcttcagccgtgggtgcccctggctctgcctccccggggatcccccaaaaccctcgggccctcctcttccgggaagtcctccgggccgacccacacagctgtcgctgccctgattccactccctcttccctgcttggcccttacccgagggcgggcctgcccatgaggccgctctcaggacgcctgcccacagcagctcctgacattgggccctgtgctcaggggtggagtctggggctgggtgagggcaccgacgggtggaggggaagctgccggaagcggggagagaggcggcccccacctgtgcccccgcagctctgagggttgggaaggcagcgcctgcagccctcaccttcctgccctcaggctgcgaggcttgttcccagagggccgttggcttccctgagtgcctgagtgtccataagttggacccccaagaagccccaaccgggaggtcctcctccccctctcctgcgctcaggccggccctggcggtgcttgcccagtgggttcccatagtgcgggcgctaagtgctcagatgggccccagtgggcctgaggacttgtggggccggctgggccctcaggaggagccggggtgctctggagcgcctgtgggtgctgggtgtggctgcttcccggcctgtcatgaggaagtgggacggcccgcctgccacgcccagctctgggtgctccagctgggccacagcctggtcctgccgctgcgcccgcccgccatggtgtcccgggaccaggctcacctgggccccaagtatgtgggcctctgggacttcaagtcccggacggacgaggagctgagcttccgcgcgggggacgtcttccacgtggccaggaaggaggagcagtggtggtgggccacgctgctggacgaggcgggtggggccgtggcccagggctatgtgccccacaactacctggccgagagggagacggtggagtcggaaccgtggttctttggctgcatctcccgctcggaagctgtgcgtcggctgcaggccgagggcaacgccacgggcgccttcctgatcagggtcagcgagaagccgagtgccgactacgtcctgtcggtgcgggacacgcaggctgtgcggcactacaagatctggcggcgtgccgggggccggctgcacctgaacgaggcggtgtccttcctcagcctgcccgagcttgtgaactaccacagggcccagagcctgtcccacggcctgcggctggccgcgccctgccggaagcacgagcctgagcccctgccccattgggatgactgggagaggccgagggaggagttcacgctctgcaggaagctggggtccggctactttggggaggtcttcgaggggctctggaaagaccgggtccaggtggccattaaggtgatttctcgagacaacctcctgcaccagcagatgctgcagtcggagatccaggccatgaagaagctgcggcacaaacacatcctggcgctgtacgccgtggtgtccgtgggggaccccgtgtacatcatcacggagctcatggccaagggcagcctgctggagctgctccgcgactctgatgagaaagtcctgcccgtttcggagctgctggacatcgcctggcaggtggctgagggcatgtgttacctggagtcgcagaattacatccaccgggacctggccgccaggaacatcctcgtcggggaaaacaccctctgcaaagttggggacttcgggttagccaggcttatcaaggaggacgtctacctctcccatgaccacaatatcccctacaagtggacggcccctgaagcgctctcccgaggccattactccaccaaatccgacgtctggtcctttgggattctcctgcatgagatgttcagcaggggtcaggtgccctacccaggcatgtccaaccatgaggccttcctgagggtggacgccggctaccgcatgccctgccctctggagtgcccgcccagcgtgcacaagctgatgctgacatgctggtgcagggaccccgagcagagaccctgcttcaaggccctgcgggagaggctctccagcttcaccagctacgagaacccgacctgagctgctgtggagcgggcatggccgggccctgctgaggaggggcctgggcagagggcctggacctgggatcaaggcccacgcgcttccctggggtttactgaggtgatgggtgcaggaaaggttcacaaatgtggagtgtctgcgtccaatacacgcgtgtgctcctctccttactccatcgtgtgtgccttgggtctcagctgctgacacgcagcctgctctggagcctgcagatgagatccgggagactgacacgaagccagcagaggtcagaggggactctgaccacagcccgctctctggctgtctgtctgcagtgcccggctgagggtgggaggcaaacacgccttgttcctgctcttcccagttcagcttggtgggagaaagtcattcgcgtggctcgggacgctcatgtaaatttggttttggtgctcaagggttctttcctcccaggggcaggtgtttctttcctgtttgtcttgtgtcttgagagcttggccttatgaccagtgagaactctctccctggtctctgccagcccaagcatcactgcccgaggcgccagctcagtttcaccgtccacgtccacaaggggcttttcccaccttcacctttgtcgctgggtcagtgctggaaagcgcccctcactcctgcgctgacaagggcccttctctactgtctgtggggtggttccgggctgggggggctgcctcctttgcacctgattttgaaggtgtctctttcatccatggttaagtcataaaaagcttattggttttggttttgactcacctgaaagtttttttggtttaaaagaagaataggcggggcacggtggctcatgcctgtaatcccagcactttgggaggctgaggcaggtggatcacgaggtcaggagatcgacaccatcctggctaacacggtgaaaccccgtctctactaaaaaatacaaaaaattagctgggtgtggtggtgggggtgggcgcctgtgatcccagctacgtgggaggctgaggcagcagactggtgtgaacccgggaggtggagcttgcagtgagccgagatcgcgccactgcactccagcctgggcgacagagcgagactccatctcaaaaaaaaaaaaaaaaaaaagaaagaaagaaaaataattttgggagtttctggaaaggtactaggatttctcaaaaggatttgtcttctcccttgtgaaagacagatgtcagactaatcaggcttatccgatgtgctacatgagatggaaatgcgtgtgaaatagtaagtcacactaagtcttctggaggttctatttacgggtttggtttgatatgaatgttgcagaaactctataaaattctaga

SEQ ID NO: 2791 - DNA, 2667 bp, Homo sapiens
  SIMILAR (1864)..(2382): 341254mologous to Bacteriophage N15 gp25,accession number AF064539,Smith-Waterman Score=211.
atgaaggggttatggcgtgaggcgttccagtccgtatgcggattacctaacggggttttcaacaagaagcaccaaccttgccctaactgcggcggcaaagaccgttttcgctggactgacaatctgaatacttctggcgacggcggcgcgatctgcaactcctgcggtaacgactccgggattggttggttgatgaaattaactggtatgccgtacagcgaatgtataaacatcctgggaagatttctcggaaaggttccgcaggaatatatcgtcaaggcgaacaagaaagcgcgccgaactccggtatcaggtgtcaacgtcatgatggcagaccatgaagcagtaatgaaagttatggagcgtacagagaagcgcgtaaacacacccctaagtatttttgagtcactacccactgaatcattcgacgttggcgtaaaacgtcgagaagatggcggagagagcgtatttcacactatcccgtgtcaacttgtgcatgaggatgggcttgatgacgagttttgcaatattttgattattgatgaggaaggaagggagtcattttacgcgaagaaatacacgagttgctcggttgccgtgactggtaaaacagagaaggcgatctacttatgtctgaactggattgatgctcagcatattgcatttcacacaaagcaagaagtatgggcctgcttcacccctgaaaatctcgaaatggttgcatacaggtataaaggtgatcgagaagtaagggtggcgtgcgaaccttcagacaaggataccttgtacatggcagacgaccgacaattaaaaataatcatcacgaatcctggaggataccgttcaggaatgcaagccaaattattctcagcaagagtttatactatggctttatatagacgcggtactgcatcaatggatgcagacggcacggttcacggaaccgatacaaaatggaaagatcagcttgctctgattcgagtcggtgcaactatcgtattcctggagcaaccaattaagctggcggtaatcagcgatattgtgagcgacacagagctaaaggctatctctacggatggtcagactgcagctgacggaaagtatgtgatcttgcttaacgattcgttgactgttaacggcttagctcaaaacgttgccgagacgcttcgatactatcaaagcaaagagactgagatcgcggcagctatagatctgataaatcagcttgatatgaataaacttgagcaaatagttgctgatgtgaataaggcgaaatctgattctcaagctgcgcaaaatcaggctgaattagcgcgtgacgatgcggtaagatcaaaagatgcggcatctgttagcgctcaagaagctaaagacgcagctaacagcatcaatgctgaaaatcttttaactaaggatggaaacttggctggtcttgaggataaaaaagagtcaagaaaaaatattgggttaggtgaaaatgatgctgttaactttcttactattaacaccacgggtgctataggtgcaggaaggaactcatgggacggttctaactggggtagtaagaccatgttgtcatcattgatgattatgtcacctgatggaatatcctcgccagggatttacgtaagaaaagaacatagcgataatggttatgctgggactttattattttatgagggggcaaactacttcgagactaacaatagattcagagccaatcagtttttatgcaagaaaacaactatgagttataaccagatgtggtctgcttcatgcttccagggtaatgcttacaccgctgatagtggtgctgaaaactatcaatcacttattgctggatcgtgcgacaccagaggtctgggatacgttggcggcgtagcatttggcatgatgactacgggtaataatgaatggcccagggcacaaatatcagtaggcactcaagatagggatggatcaggcaatattggtctgcaaatgcatttcaggtttatggcttcagggcaaatatcttacgctggaccgcaaggggctggaagtttccaacaggttccggcatctgacagaaatataaagcacagcataaaggatgatgaatcaagcattgcatacaacaacataaaatcaatgagatttaggaactttatatttaacgatgatgagcaagaaagggtaaggagaggtgttatagctcaggagatagaagagatcgacaatctatatgttaagagaagggtgtatgagagccacgagctaaacgggccaaaagttgaaaggcttgagcttgatacaactcctttattgcttgacactatgagagctttacaggatacaataaagaaagttgaagagttacaagaagagataaaaatgttgaaggccctgaaagattggtcaggtgaagagaactgtacctttggagttagtctccaggatcccaggattaagcctcaagtctatccctttatccaccaacttctgagactagtgctctggagccacaacaccctttacgaagctaataaagagctgcaaacattggcaggaagagaacccacccacacactggcaagagcaacagcagtgatgagaagagccctgcaaaggctaaagaacatgggtacagaagtggcagctgctaatcaggaccagcaggaggcctag

SEQ ID NO: 2792 - DNA, 2778 bp, Homo sapiens
  SIMILAR (1464)..(1607): 331254mologous to Homo sapiens dJ697K14.6 (probably 5' part of dJ697K14.7 and dJ697K14.11),accession number AL121829,Smith- Waterman Score=43.
  misc_feature (1)...(2778): n = a,t,c or g
atggaggctgaggaccgaggggcccctctttgtgtctatgctctgtatctcccgccgagcggcaccagcccgggcagcttcattaagggcctccgccagctctgcagctcacctgctgcagcgcccctcgcgctccgcaaggacattagaaaccgtcaaccaagattaatagttgcccggctccggggcagggagatgagcccagatactgcggcggcggcgctcgcttcgcgcgagccaacccggcacgggctgggcgcaccacctgccgctgctgtcgctccactccgccttcctttcttctcctcctaccactcgcccgcgcacctgaggctctcagctcaaaacgttgccgagacgcttcgatactatcaaagcaaagagactgagatcgcggcagctatagatctgataaatcagcttgatatgaataaacttgagcaaatagttgctgatgtgaataaggcgaaatctgattctcaagctgcgcaaaatcaggctgaattagcgcgtgacgatgcggtaagatcaaaagatgcggcatctgttagcgctcaagaagctaaagacgcagctaacagcatcaatgctgaaaatcttttaactaaggatggaaacttggctggtcttgaggataaaaaagagtcaagaaaaaatattgggttaggtgaaaatgatgctgttaactttcttactattaacaccacgggtgctataggtgcaggaaggaactcatgggacggttctaactggggtagtaagaccatgttgtcatcattgatgattatgtcacctgatggaatatcctcgccagggatttacgtaagaaaagaacatagcgataatggttatgctgggactttattattttatgagggggcaaactacttcgagactaacaatagattcagagccaatcagtttttatgcaagaaaacaactatgagttataaccagatgtggtctgcttcatgcttccagggtaatgcttacaccgctgatagtggtgctgaaaactatcaatcacttattgctggatcgtgcgacaccagaggtctgggatacgttggcggcgtagcatttggcatgatgactacgggtaataatgaatggcccagggcacaaatatcagtaggcactcaagatagggatggatcaggcaatattggtctgcaaatgcatttcaggtttatggcttcagggcaaatatcttacgctggaccgcaaggggctggaagtttccaacaggttccggcatctgacagaaatataaagcacagcataaaggatgatgaatcaagcattgcatacaacaacataaaatcaatgagatttaggaactttatatttaacgatgatgagcaagaaaggctgggccacagcctggtcctgccgctgcgcccgccggccatggtgtcccgggaccaggctcacctgggccccaagtatgtgggcctctgggacttcaagtcccggacggacgaggagctgagcttccgcgcgggggacgtcttccacgtggccaggaaggaggagcagtggtggtgggccacgctgctggacgaggcgggtggggccgtggcccatggctatgtgccccacaactacctggccgagagggagacggtggagtcggaaccncggggcatctccaagaatgggcagacgcgggagcatgccttgctggcctacacgctggagccggcttacagcgagaagcgctacgacgagatcgtcaagaaagtcagcgcntacatcaagaagatcggctacaacccggccaccgtgccctttgtgcccatctccggctggcacggtgacaacatgctggagccctcccccaacgagggacaccagtgtttgctgctcacctctgacagccagacaagggctgtgctcaggggcagctcggctgggcacacagtaggtgctttagcggacagcactgaggcccccagcaagaagcccatgagctcctccccctcccgcagtgccgccgacatctacatccgggagtatttccacagccacgtcagcggcggccaccccgaggccactcctctccgtgtgatgtacacggaccggccgctgagccagacggacccagtcacgctgcagtactgttgcctgaccgacgaccgccaggctttccgcccgcccacacgggcagagctggcgcggcaccgcgtggtggtcaccaccacctcccaggcccgtgagctcagggtgccggtcggcttcttctcccacattctcatcgatgaggcggcccagatgctggagtgcgaggccctcaccccgctggcctatgcctcgcacggcacccgcctcgtgctggcgggcgaccacatgcaggtcacaccccggctgttcagtgtggccagggcccgggcggccgagcacacgctgctgcaccgcctcttcctgtgctaccagcaggagactcacgaggtggcgcggcagagccgcctggtcttccacgagaactaccgctgcacggacgccattgtcagcttcatctcgcggcacttctacgtggccaagggcaaccccatccacgccaggggcaagggtccgccccacccccggcactacccgctcatgttctgccacgtggcgggcagcccagaccgggacatgtccatggcgtcctggctgaatctggctgagattgcgcaggtcgtcgagaaggtgcaggaggcctacaacacctggcccagctgctggggcggccgcgagcagaggtgcatctgtgtcgtttcccacggtgcccagtga

SEQ ID NO: 2793 - DNA, 662 bp, Homo sapiens
  SIMILAR (375)..(599): 381254mologous to Mus musculus type IV collagen alpha 6 chain,accession number AB041351,Smith-Waterman Score=109.
cgctcttcacagtgcctctccgaaatgaagagcttctcttggggcagaaaccaacacgctgctcccttctaggagaaagtctcactctgggagaaatgttcactgagcctcaaggtgtgttcccagacggtcccatggatttacacgccgccggcaccaggcccctgagcaatccaactactgtccttttggatgaggctgtggatgctgagagaggggctgtggctgagtccaatctcaagaaccaaagacctgaactgcagacgaagcttccttcccacctcctgggctttgaggagcctgcattccctgcccactcttctcctgctgtgcccacagcagggctgagtgccaaatgggccattttcctcttccccagcaagcagggcctggaaggggtggaactaaggcaaggctgtgcaggggtctcaggcaaggagcccgtcctcactacaccacacatggagggcatgaggctggaccacaccagaacgtccctccccccggagcctggagctgcaggtcttgatgcggagaggtttccatctgggccacccagaccttgctctgaggctctcccgatcctggaacaagcagatcttgccaagttcctgtattggaagataaatcatattgaaattctctttaaaacccatagatga

SEQ ID NO: 2794 - DNA, 245 bp, Homo sapiens
  SIMILAR (243)..(49): 1001254mologous to Homo sapiens Secreted protein 108-006-5-0- E6-FL,accession number Y59672,Smith-Waterman Score=346.
ggtgaggatgaatgtaaaagtgtagagcaagctttcagacaacttcaaagtttgtttttggcgcttccgtttgtaagcaatcaagatggtgagagacgctatcccaaagaagaaagtctgtaggaaccagagtagctgagcccgaccacttgtgatgcctttatgcttgcacaatactatggcatacaaggactctcccacatgaatcagccaggcaagccaatacccattgcacaggagggtgt

SEQ ID NO: 2795 - DNA, 566 bp, Homo sapiens
  SIMILAR (76)..(330): 951254mologous to Homo sapiens Human secreted protein, SEQ ID NO: 6171,accession number G02090,Smith-Waterman Score=454.
atggctacggcagccggcgcgacctactttcagcgaggcagtctgttctggttcacagtcatcaccctcagctttggctactacacaaggatggtgaagtcggaggccagcaatgcggctaccgcctatttccgtccagcaagacccttgccctctctggtcacagtcctggggctgggctacttcgcgtgggttgtcttctggcctcagagtatcccttatcagaaccttgggcccctgggccccttcactcagtacttggtggaccaccatcacaccctcctgtgcaatgggtattggcttgcatggctgattcatgtgggagagtccttgtatgccatagtattgtgcaagcaaaatgagctaagaatacggataaaggtatgtgaatgagaacaagttatgatgaccccaggaaaacccttctccgggttacctaagccaccaacttgtgacccttctgaaggaggaggaaacaagcactgctgttcagtgagcctgctcttccaagatggcaactcatctttatttttctttactaaatatcatacacatttacaggatca

SEQ ID NO: 2796 - DNA, 404 bp, Homo sapiens
  SIMILAR (2)..(235): 351254mologous to Homo sapiens Jak3 N-terminal-associated protein MAJN,accession number AF252258,Smith-Waterman Score=101.
  misc_feature (1)...(404): n = a,t,c or g
ggagaagtacgtggaggaacttgcagcagggaggcttacccttcagacagacctggagacatccattcggcggattgccgacctgcaggctgccttggaagaagtggcatccagtgacagtgatactgagagtgtccagacggcagtggattgtggcagcagcggccgaaaagagatggataacgtctccatcctcagctcccagccagagggcagcctgcagtcctggttgagctgtactctgtccctggccacagatactatgaggactccttctcgacagtcagccaccagcagccgcatcctcagccccaggataaacgaagaggctggggacactgagaggacccactcggcattggcactgagcagagcccggtccaccaatgtccacagcaagaccn

SEQ ID NO: 2797 - DNA, 647 bp, Homo sapiens
  SIMILAR (283)..(540): 331254mologous to Homo sapiens Jak3 N-terminal-associated protein MAJN,accession number AF252258,Smith-Waterman Score=100.
atggaaaagtgtgcaaatcacggtgcgcccactgagtctgatgcttccctagcagatggaggatgggatgcagagggcggcaagggggcaatggtggagggtggaagatgccagcagcatttccccaagttgcgactgccaaaaatgtctccagacatgaccaaatgtcccctggggggcaaaatcactcttagatgggctgagtatccactgtgcgtggtggtgcagattcagagcatggccctggggtcagatgcattgggagcagcaccccctgcacaggagaagtacgtggaggaacttgcagcagtgaggcaaaccctccagacagacctggagacatccattcggcggattgccgacctgcaggctgccttggaagaagtggcatccagtgacagtgatactgagagtgtccagacggcagtggattgtggcagcagcggccgaaaagagataatcaggggacataaaagtagagtccctgttttaaagatgatccagataagggataacgtctccatcctcagctcccagccagagggcagcctgcagtcctggttgagctgtactctgtccctggccacagatactatgaggactccttctcgacagtcagccaccagcagccgcatcctcagccccag

SEQ ID NO: 2798 - DNA, 705 bp, Homo sapiens
  SIMILAR (375)..(542): 321254mologous to Homo sapiens sco-spondin-mucin-like; similar to P98167 (PID:g1711548); details of intron/exon structure uncertain,accession number AC004877,Smith-Waterman Score=75.
ttggtgaggttggtgcttgggactcctcagctgcagagctgagtcccaggccggctggagactgcgagcggcaaggaattcggagccagggccagggcagtgcttcattccagtggaaacgtgtgctagctgcggatttctgggtggtgtggtatgggctggagccggctggcatggatggaggcacaacaacttccgaacagcagttgtgtgccaagcccaagcgggcactgcgggtgccaaggtaaataggtctcaagttctgtctcctcccagctccttccctgcagccttttgatgttatttccaaaggcggttacaaaagcaggctgccaagagcacctcctgcaggggacgacccgcatggcaccttctctggagactgccagcccctgcctggtgtagctgcctgcaatcccgccctggccaccttacctgcagattccttgaattactatgacaaagagccctctcagtggaactggttgctttgggggccaccagacacctgcaccctgtcctgtcctggtgagttcaccattgtttgactcttctactagggaagtgcgcccaagcaacctggggagcttgcatgtggtgttcatctgaaagccctggttagggacccagtcaacagtcagcatcacctccaggcatcaaagtgaatgagacttcatgccattcctgctctcaagcctcaagcct

SEQ ID NO: 2799 - DNA, 1059 bp, Homo sapiens
  SIMILAR (178)..(345): 311254mologous to Arabidopsis thaliana small zinc finger-like protein,accession number AB025617,Smith-Waterman Score=69.
atgacacaggcccagtccccgcaaggcactcacagtgatcgaataaatgagcaatttttcttggacttaaaaattcatttggtcaccacactttccagggaatacctgcagtattgcggaggttcttctgttctcattgctcagccccattcagttgcttccctcttctgtacagatgctaatggcacacagattttgtggttggtggcagagggagagtgtgagcaaatgggtatgggaactggagtgaatgagagctggaacaatctggctgcttcagcaccagtgggatcaaagttcactcactcagacacactgtgttctactccttgtgggaggcagcacacagtaaagtgtagaggagaaaaagagtatagcatagcagaatggtgtgatactgtgattgtgaagatcaatgcctctggattcagacacctaggctcaaaccttgattttccttctcacctgctctgtgaccttgtacaacctcctaaactgacattctacctcctcattcatgcagggaagaccataagatcctggctagtgggccttttccagaggccctcgacaactgagggggccatggtgtcattgcgtcatcaggccacagccaggctcagagtgtctgcctctgcagaaacactcctgaacaagcatcaggagaatgcctttccccagtctagtgtagagtgtgatggaagaaaaatagcaaatatgcccatgatgaggatgcaaacttcagctgggcctcagaagtcatcagtagcaaaacccatcttttcttctgccagacgtcctcacagagaaatctgttacctaaatggatttaccactgcccaggttctagccctcaacctgcaggcccagaaacctgatataccaacacagagaacacatccatgtctttcagtagacacatacaagttcacagggatccatgaaacacaagatgcctatctactcatctacaaagagatgctctaccacaatttataccacaaactcgcaatctccaagtggcctaaattgcatgttaccttcttacaagaagactga

SEQ ID NO: 2800 - DNA, 592 bp, Homo sapiens
ctggtcagataaggcatttaaacctgacacctcagatcctttcaacgccaaaaccagatgtgctcagctggaaagaggaaagggttcctctgtgttcaacaaaatccaagctctctgcagtgaagagggccaaactgacaagcaggccaaggcttcagttctacatgttggaatagatcatctggaccctctggattctggtcctgtactgaccttcaagctgtctctttcagctttctgtgctgaggcagaaaagaggaaagctggaccacacccagccaggactacacgtgcagtcctcttctactatgaaattggaaagaaggtgatagtggacccagcactctcatttcatgaatctgtcggttttaagaaaccaatacacatatctctcacgttacagtctgacaaggagagtgaagtgtgcgtacatcagggcaattggcctgtcactgccgtcaataaaggaaagctgcttgctgagaagataactcatgtcatcctgactgaagctgaaatgggagatttctctgtgccttttatattccccacaatcctgtgcccacgagataattctccagaggattgctga

SEQ ID NO: 2801 - DNA, 466 bp, Homo sapiens
  SIMILAR (387)..(55): 301254mologous to Homo sapiens HTRM clone 2019742 protein sequence,accession number Y73338,Smith-Waterman Score=95.
atatgttgtgcaatcattgggtcaactaattgccatgaaggcagagtcttcgtatgaacaagttgcagctgaggggcctttggaacattcaaagggggatgtgttgcagggaatgggataaacaggtcagacctccagcagagaggtaagggattgaaacatgcagttgggagcaggaggaaatgccttctcagagcacggcaatggcagtcattttctggagatgtcgggtgccatttcatctggcttcctggaggagctgcatttctcaatcaaaaccctggacctgagcaggaaggctggaagggagataagcagacatcctttttctttggactggagtctgggagaagagagtgccctggagagctgcctgctgttttgtagtcacatggagtatgagcatgccttcccagggaccctcacctggatggaaactccagagaaatactcactcagaacctga

SEQ ID NO: 2802 - DNA, 2791 bp, Homo sapiens
  SIMILAR (741)..(637): 451254mologous to Rattus norvegicus cytochrome P450 2C24,accession number S59652,Smith-Waterman Score=71.
atgattttaaactactcaaaattgaaaggcaaggaggagtgtgcctctgtctccagtgtgcctatggtcttcttcagctcacagtaccgtctacaccgcaagagccaatatttgaaaatggctgctgcaaaccttaccttctctcaggaggtggtgtggcagcgaggcctgcccagcattccttatagccagtacagctttgaccacctctacaataccaatgacatcatccatactccccagatcaggaaggcccggcctcagaaacctgttagcttcaagttcctgggttcctcaagtcccttaacaggagacacctccctggctgtgaagacagaaagctctgccaatcccgaaaagaagctgaagaaatcaaagccagccagcaccgtccgggaagcaccccgccctctcatccatcatccctgcatgcatccagatatgctgggtcggccaccttctctagatgtgaacctggaggaaagagaagcctggcttctgcctcctgagaaggaggccagagcgtgggaggccactgtgctggaaaagctgaacgagcgcacagcccgatggatccagagcaagcgtcctcgaaggcctggggcatcccccaacaagtggcagagcttcctgcgccagcagtacgactggagtcacattcgggatgagcttacctctgccagtgacctggagctcctgaaacagctggaggcagaagagacagcagagtttgaggatcaaagtgtcatcctgcccccacaggaaaagaagaagccagaactgctgcttcccgtttactacagattgcccagttacttccaacaagcagagacagttgagatcatgcctggcaacaagagcactgaggatatccatgaaaagacgagcctctcccagccccaaacccagagctactttcgccaggtgactccccgagctggaaagtttgcctactccacagacaacacctttgaacaggagatttactttgatgaagtccagatcatccaccagattggtgcaaagagagaccagattgtcctggaaaacctaaatcggtacaacaagcagctatctaaggtcttccctgaaactccagaaaagtggagtgcccaggcaattcctgaagcatcttacagacctgtgcaaggagccctgcgctggactgctttgcccacccccgccaaggatatgctgctgcaggtgggtgagaaggatgtgcctattaagaccaggagattgaagaagcaggcaaaatcactgcaggaggatgtgacctgggaactggtggtcctgcggaggatgctgaaggaatggaagactgcctgggctctgatcatagagtggcaccatgagacagtagagaacctgcttcagagcttgggagacctgcatgatgacgttcggatcaaagctatcaccacatgtgccacagctgctttggaacggccccggattgccaccagccagagagactcagacaagaccatccaggacttgccggaggttctactgcctgccctagaggctgctctttgtgacaagaatgcccatgtgcggatggcagcagcaatatgccaatatgccatacagtcacataatccccttgcccggaacatcatgcagactgcccttctgaagggtaacagtgtggatagctgggctgcagctcagtgcttggctctggaaggtactgctacttaccctgtgattaagaggatcctccaccagctgtttacaaagaagaatgaggacactgaggaacagtcttatatcctcctgagctatctgagtgagaagacagatgccatttcagaatgtaacttcaaggttctagtatctctaaaagtgattgtgaatatccatacaagtcttccatttcctcagaccctgatacacaccatgcttgctgtggagctgaacagctgtcaatggaagaaccggattgtggcctgccaggctttctcccggatcagtggaaatgtctgcttggatatgaaacataagttgatccagctgatgtggaatgactggaataaggaagtgaggagagcagctgcacaggcgcttgggcaaatgagcctcgggaaagaggtgcacgacataatcagggtcaagctaggtcaaggaaattcccaggagcgtgtggaagctctctacctgataggtgagctcaagcttatgaccgccaagcttctcccaagcttcctgcactgcttctctgatgacttcacagcagttcggcgggcagcctgtttggcagctggtgccctgcagatccgcgacaagatggtgcttgaatgcctcctgaacctgatgcagagagatccttactggaaaatcaaggcctttgccattcgagctttgggacagattgggcaagtaagtcccgagctgacggatcttctgctctgggctatccactatgaagagtcaccaggtgtacggctggaagcttgccgtagcatcctagccctgaaacttcaaggggaccgggtcagggacaccttcctagacgtgctgctcctggagaaccacgatgctgttctaaaagaaatgtaccagacaatgaagatactcaacttaggaaatgaaggaaaccaagaaatgcttcaggagatcaagaacaggattaaaacactaagccaaaaggacttgctgacacacaaaatactcaagctggagatggtcatgggaaaagtgagggaggaagcaaaacgtgtttacttgaaacccaaaggagaacaaggaccactaacactccagactttactccaagaaacttttcagg

SEQ ID NO: 2803 - DNA, 406 bp, Homo sapiens
atgcgtttgttgagagcctgaagctgactcacccaaatgagaaagtggcacaaagcaagaagtcctgagcagctcaatttctaccccagagccagtctctccaggaactaaatatgagggaggcaatttccatacctgccaggctagagaaggaagaaaaataaaagggggcagaaatattttgataagactaatttcctttggctgtgcagaggcagcacatacctcacctggggtggtgagtgtgctttattttaatcaagccgagtgtattcatagcttttcttctttggtgtccttgtgctttcagtctggctttctcatcctgtaataaatgtttaagtaggaaggaggcttaagagaaggtggaagagagacagaatgagtgacagaaaactgggaatgg

SEQ ID NO: 2804 - DNA, 1929 bp, Homo sapiens
  SIMILAR (1271)..(1014): 301254mologous to Bordetella bronchiseptica pertactin (P.68),accession number AJ250087,Smith-Waterman Score=80.
atgcatgacactgaaggacacgtcaacgatgttcctctggggcagagaagagggcctaagcctgcgaggtattcattcattcactcatccattccacctattttaagcacctactatgttccagataatgtgctagatgctgaaaatacagtatttaatattccagttgtctgtgttataaacggtgcttcagaaacagaggagctggggagagtggcctgttttctccacagtgctgctccagtttctgccgtcatcggtttccagcctcacagcggccgcatgtcgggggtcagggcgcaccggggcgcaacacattcagtacttgctcatcgccaatttcttgctccccttgctccttctgcagggctgcctttcccacctggccctccgctcagatcggatcctgttgtccctgaattattagggtggcagcaaagggtgcaagatgaaaaactgacctatgttaacgtatccttatcagagatgcaccgagaacaatcggagcagctaagtctaggacccgactttgtggctaaatggaactcgtttaaatgtgtacaagttcttagagcacaactccaggtggttggacacaaagatgcggaccgtatagccactgtccccagtgcttacagaataattcccttcctccttcaagtccaggcaaatctgccctgtgctctgcagaagcagcaggtctccaaaagcagcccatcgacagagcccacgtctcctttacccatggaggaaaactgccggttgagaaaacctatttctccttcattttccttttcaaaacagcaagggtgggatgctgatggaaactccatctggtgggggcagcaacagctgtgccaccgggaaggggatttggtaaattgcactatggctcttcatgcttctgcccctcccacggatatacagctgaataagtctgcaagtcagaggttaagaaaagttggctctggcatccgacaggctgacttggatgaggctctgcaatgctaccttggatgggcccgcattgggaacccgcatcgcctgcctggagctgagctgtatgctaacccgcgtcttcgggcgggccctgcgccccgaaggcgtctccctaaagccaaagtcgtagcggtctgcacgcctgcccttgggccctcggcctcagtttccctgtatgtaccatggggggtgggaggtggaagtgcgctcccagagccgggaagtgtcggtcatactgggccagcagaggaggccttctctggagcgcagggaatcggaaacagaaatcagattctggatttccagtggacccctggcctgctactcccacgcgttccccgaggactgcgcatggagatcaccgaggaaaagagccacgttttgagggctggcggtgtgtcacggtgttcggccactcgcgccatcttccgggtgcagttcaggggccccgcagagccgagccttcgcgcagcctggcaggtatggaaattgcctccctcatatttagttcctggagagactggctctggggtagaaattgagctgctcaggacttcttgctttgtgccactttctcatttggcccagacgtcagtgctcagcgtccttcgctgccactttgcgaggaactttggccggctcccctgcgccaccgggagcgggatgttaatgagtttagagcacagtggcgatgatactcccaaaggaagtggcaactgtagcccaacgggtgtccgtagatacaaaccaaagctggctaaaaccatgtctggaaagctgacaaatttccaggcaatctaccctgagcagcagacagaaataaaagagctgagggaggtccgagatgcgattagtcagggcgacggcccccagtgtccggctcggaagccgaagaatcgaaacatggctcaagaagctacttgtcactga

SEQ ID NO: 2805 - DNA, 626 bp, Homo sapiens
  SIMILAR (520)..(570): 261254mologous to Lily symptomless virus 32 kDa coat protein,accession number U43905,Smith-Waterman Score=38.
ctctgcccggccgccctgtctaggacgcagcaaatatgaagtctatggaccctgcctcaggttattcaaataacatcctcaccattgatcaaatgctcaagaaaaagcagacttgtatagtggccgatgcaactactattaaacaacatgtgaagagagctactgatacctataatttgggaattgcccttgaacaccgaaaagaaatgctaaacctctggcagaagatccgaggggatttgattgggatagactctagaaatgaggccttttatgacaccttttctacttatacatggtcctggaatgtttgccaagaattactttctcctaaggacttaaggttatatgatgcctatgtgaatagaaattcctcccataactgcagatcctcttcctcatcagataccagtgaatgtgacacagactcaggaagaaaaagaaaacggaaaggtttaaagggatttcaacaatgaaatttctacattttctaaacagctcatcacaaactactttttcatagttatcaaaattattgtttcttgcttttgtctaagtacattcttagaagctggaaattttgacatcttttggattctgaccagtaaaaaagtttaagtcataaa

SEQ ID NO: 2806 - DNA, 1489 bp, Homo sapiens
  SIMILAR (204)..(482): 981254mologous to Homo sapiens Human secreted protein, SEQ ID NO: 7703,accession number G03622,Smith-Waterman Score=482.
  misc_feature (1)...(1489): n = a,t,c or g
cgcgtttgctttcgctcgccgaggcgcgtatcagtcggaattttggggagccaaccgcgccgtctgtccctggcaagccagcggcggtttaaaggaggtggcgggaagcctgtgtgtgcttcaaatcgtcaccctcatggtcgctccggtttttcacgactgaaaacaacatagcaaaataagccaagatgtctgtggatccaatgacctacgaggcccagttctttggcttcacgccacaaacgtgcatgcttcggatctacattgcatttcaagactacctatttgaagtgatgcaggccgttgaacaggttattctgaagaagctggatggcatcccagactgtgacattagcccagtgcagattcgcaaatgcacagagaagtttctttgcttcatgaaaggacattttgataacctttttagcaaaatggagcaactgtttttgcagctgattttacgtattccctcaaacatcttgcttcgtgaagataaatgtaaggagaccccttatagtgaggaagattttcagcatctccagaaagaaattgaacagttacaggagaagtacaagactgaattatgtactaagcaggcccttcttgcagaattagaagagcaaaaaaaattgttcaggccaaactcaaacagacgttgactttctttgatgagcttcataatgttgggcagagatcatgggactagtgattttagggagagtttagtatccctgggttcaggaactccaggaaaacttacaggaacattaggaggacaatgtgggaaaagggattcgaaacgactgaaaatatcttaattgctcagtagtcaaaaggaggagcctgtcaaaaagtagaatcataaggactgttcaaaccataaggactgttccaaatcataccagtgactgttcaaaccaaccatactttttattagatttgctttgtcaactctttcttgtattctgtgttttcctcttttttggtccactttgctgaggtatgaagtgtactactttgaactaggctgaagcatctgagtcttctaataagtgggaagggatccaacaaagaagccatgaccagttaaagatatttgcagagttacaccttggtcataagtcctttgtgaccttgattatttttngccttactctttggatgagaccagacaagaaatggattaaacgggtggctcctttaatattattattattgtttttgagacaaggtccctttctgtcacccagggttaggagtaggatttcagtgggcacaatcttgggctcactggcaacctctgtgtcctggggctcaagtgatcctcctgcctcagcctcccaagtagctagggaccacaggtgcgtgttcaccatgcttgggctaaattttttttgcagaaacgaggcctcactatnttgtccngggttgagtgggctcttttatttaaccagtccattacactgcgggancagcccaacctagggta

SEQ ID NO: 2807 - DNA, 665 bp, Homo sapiens
  SIMILAR (456)..(322): 331254mologous to Ovis aries small proline-rich protein with paired repeat,accession number L77967,Smith-Waterman Score=66.
ttacggtaaaatgaggtcatatgagcaggacctaatccaagctgactggtgtccggcaagtaaaaagacggcgtgtggttctatacgcttgtctggggcttttattgtctgcaccctttggcctttttgagttgccagcttctccaggtcctccagcttctcatgagttgcatcacaccccttctcatctgtggtcccttctgagtctgagcccaggagttcaaaaacaaagatcagctgagagcagaaggagaatgacaatgtttctggggtcaccggatcatgatcattggggcacaagatgatgtctctgagtttctttggttgctgtaacagctcagagcagattttgggactgactctgtgtgcaggttctgggcattgggcttggcaggtgaggaaatgcagggagggctctggaaagggttaagcttctggaatttgcaggtggggaagagagattgcaatgcagtcagagaggacacgggtgattattaggtgggaatccaagaattaaatagggaagagagaattaagtttgaggttcagaggtacattagggataacagtaggcattagctcaacctggggcaagggtttccttaccgaagattatgggcaccatggagcttcagagcagctgatgggacagcagcagtgcaaat

SEQ ID NO: 2808 - DNA, 221 bp, Homo sapiens
  SIMILAR (34)..(111): 501254mologous to Trypanosoma brucei TSI1p,accession number AF181287,Smith-Waterman Score=57.
  misc_feature (1)...(221): n = a,t,c or g
ctttcccaaagatttntatccacantntacaatgctcactgggaaccaaagtcaggcatggggctgggctttaaggggnnctctggaaaaacaagcagcaaaaggngcagtatcaaactccacagaaattcacaaacatcaagncaccaagaaagctgcattcatttaatatncataggtgacaggctgggctctgtagctccagcnctgttatcctagca

SEQ ID NO: 2809 - DNA, 275 bp, Homo sapiens
  SIMILAR (219)..(34): 291254mologous to Homo sapiens Human secreted protein encoded by cDNA clone 3928599,accession number B14317,Smith-Waterman Score =64.
  misc_feature (1)...(275): n = a,t,c or g
aggttcccacctctcaagancattaggagcttcttttccaaatcctctgttttgcatgcattggaagataccccatcagcctgagtctcttaaaggcctttatacacatatgtctacacatagggatttggatganctcgggancccacatcctcgctgtcccctgtccccccanaacatcccanaccaatacctttctgaagttttcctagtccctcctttttgtttgtgctccttaaagcccaaccccatgcctgaactttggttncccagtg

SEQ ID NO: 2810 - DNA, 415 bp, Homo sapiens
  SIMILAR (39)..(155): 381254mologous to Human papillomavirus type 58 open reading frame E5,accession number D90400,Smith-Waterman Score=62.
tgtcaccttgatttaaatgaatgcagctttcttggtgtcttgatgtttgtgaatttctgtggagtttgatactgctccttttgctgcttgtttttccagagtccccttatcacttgacgtgctgttatattatgtttgatttattacagataccccatcagcctgagtctcttaaaggcctttatacacatatgtctacacatagggatttggatgatctcgggatcccacatcctcgctgtcccctgtccccccgcaacatcccccaccaatacctttctgaagttttctagtccctcctttttgtttgtgctccttaaagcccagccccatgcctgactttggttcccagtgagcattgtacatttgtggatattaaatctttggcaaagtcatttacctgggctggaaaaaa

SEQ ID NO: 2811 - DNA, 657 bp, Homo sapiens
  SIMILAR (581)..(444): 351254mologous to Micrurus corallinus alpha neurotoxin homolog 3,accession number AF197564,Smith-Waterman Score=65.
tttcgtcgcacggcgggtatagtggttccgcaaccttgggatgttcggctgagcgcctgcctaacatgggagcgcctgcctaaccctcctgactggagggtcagcggcggggagtcctggccttcaatcggccatcgccacggcagaaactggggcccgggctgcgtccaggcccttccccgtccgtccacaggtctcatgggcgcccggactggggctgatgtagtttcccgacctctgacacataggatctggagattaaagctgctctgctaataattaggttcccacctctcaagatcattaggagcttcttttccaattcctctgttttgcatgcattggaaggtggattttcacatctcaagccagctaagagtatgggaaataggactcgttaaagcacagataccccatcagcctgagtctcttaaaggcctttatacacatatgtctacacatagggatttggatgatctcgggatcccacatcctcgctgtcccctgtccccccgacaacatcccccaccaatacctttctgaagttttctagtccctcctttttgtttgtgctccttaaagcccagccccatgcctgactttggttcccagtgagcattgtacatttgtggatattaaatctttggcaaagtcatt

SEQ ID NO: 2812 - DNA, 507 bp, Homo sapiens
  SIMILAR (494)..(324): 411254mologous to Acidothermus cellulolyticus E I beta-1,4- endoglucanase precursor,accession number U33212,Smith-Waterman Score=91.
atggatgactgtcaagcccagaaggttcccggcttccgaggtggcattctgggagctgcaggcctccttacaggccctctccctcggctgcttgcccagttcaccgtgcatagccctgttgctcccctcaatccctgccgattcccacaccaccgtttgcctctggattggtcgcccactagtcagaaccgtgggagagaggaaacatctgccatgatgcaggcaaggaatgcaaagctcccagacatcatgtggctcactcaaggtcaccctactatggcccttgcctttctgagtgcctggtttgacctcttgatccctccaggggagaacgtcacagtcaaaggaggggtgcaagaggccagtggcacacagagagctgtggtcctagaggcagctctaggcggcaatgggctcttcggcttcctgacttctggtggtccagccactgctgcttctccttctgctggatctttcctggccgacttcactggcccttcaggctga

SEQ ID NO: 2813 - DNA, 489 bp, Homo sapiens
ctgctgacagctgagggctctagctctctagatttgggtagaaaggcctgggggtgggaatatcctccaggcgggaatagccctgtgacctgatctcacttgaattttcaggtgatctgactttccagtgatctaagactgtagtgcaaagaagccaagtctcaggcagttttttcagggacaggccttggtttagctctgcctgaaggtagatgactactttggcagataatgtggaggaaggaacactactctttggaatgccctcagctgtctaactgtgaccgattgtgcctggcccagctgcaacttgatctcaacaaatgttcaaggagaggagctgtgatggggccacttagattgctgtatagcaatctaaggagtatagcagttgaggttccatccttccagcaaggtgtagatggcctggattttttgtggaaaaacagtggacaggcagttcatttttgtgaaattgatttggtatag

SEQ ID NO: 2814 - DNA, 476 bp, Homo sapiens
  SIMILAR (2)..(202): 1001254mologous to Homo sapiens presenilins associated rhomboid-like protein,accession number AF197937,Smith-Waterman Score=357.
acgcaggtttaacttctttattcaacaaaaatgcggattcagaaaagcacccaggaaggttgaacctcgaagatcagacccagggacaagtggtgaagcatacaagagaagtgctttgattcctcctgtggaagaaacagtcttttatccttctccctatcctataaggagtctcataaaacctttattttttactgttgggattaacaagtggtggaataacctaagtgatggccagcggactgtgacaggtattatagctgcaaatgtccttgtattctgtttatggagagtaccttctctgcagcggacaatgatcagatatttcacatcgaatccagcctcaagtgttatttccaattttgtcagttacgtgggtaaagttgccacaggaagatatggaccatcacttggtgcatctggtgccatcatgacagtcctcgcagctgtctgcactaagatcccagaagggaggc

SEQ ID NO: 2815 - DNA, 1478 bp, Homo sapiens
  SIMILAR (463)..(1149): 491254mologous to Homo sapiens presenilins associated rhomboid-like protein,accession number AF197937,Smith-Waterman Score=398.
cgtggcgacggctgggcgcagagaggctggggctgcggccaggcgtggggtgcgtcggtgggcggccgcagctgcgagcgagctcactgcggtcctaaccccgccgcagctcctcggacgcagggtttaactgtctttatttcaacaacaaatgccggattcagtaaaagcaccccaggaaaggttgaactctcgaagatcagacccagggacaagtggtgaaagcatacaagaagaagtgctttgattcctcctgtggaagaaacaagtcttttatccttctccctatcctataaggaagtctcataaaacctttattttttacttgttgggtttacaaggcttgtgcattttggatcagctgctatttgggcaatatgaatcacttgaaatccaggggttccaggagttattttggatgggtattaaaaggctggattgggttgggataggcattaaggaccacaaaaaaggaagggagactttcaggaaagggagatttaacaagtgggtgggaataacctaaagtggatgggccagcggactgttgacaggtattattagctggcaaatgttccttggtatttctgtttatggagagtaccttctctgcagcgggccattgtccaggtattttcacatcggattccagcctcaaaggtcctttgttctccaatgttggctgtcaacaattcagtcacttctcctttatttcacatgggaagcaaatatgtatgttttgtgggagcttctcttccagcatagtggaacattctggggtcaagagcagttcctgggcagtggtacctatctggcaggtggttattttccaattttggtccagtttacgtgggtaaagttgccacaggaagatatggaccatcaacttggtctgggatcgcgccatcatgatgatcctcgcagctgtccgcactaagatcccagaagggaggcttgccattattttccttccgatgttcaccgttcacagcagggaatgccctgaaagccattatcggccatggatacaagcaggaatgatcctgggacggaaattttttgaattatgcagcacatcttgggggagctctctttggaatatggtatgttacttaccctcatgaactgatttggaagaacagggagccctctagtgaaaatctggcatgaaatgaggactaatgcccccccaaacaagaggtggctctaagtaaaactgggattgcacagtacccggtgcacctgtcttgtcctgccggagagccccaggagacatcggccctagagtgatcatggctacgttcccgcctggaagacgccagcatctggcctcccactgttttcagctgtgtccccgggtccgtgtcttttcagaaagtgaaaatgacatagttgtgacgtaaaggtttacatctagttcgtaaaaaataaaaaaataaaaataaaaatacattccttttaccttgcaaaaaaaaaaa

SEQ ID NO: 2816 - DNA, 528 bp, Homo sapiens
  misc_feature (1)...(528): n = a,t,c or g
cttcatttcttcttctaaccataccacttcattgaaaatactttttggtcatgggtcccacatctcagttgccagatccaatggcctcttttcagtccttgttctatttgaccttcctgtggcatatgagatcattgaaaacttgcttcttgaaagccagttctctcttagtacaatttttatctcaatgtttttatttttccatcttcttcataggcttctgtttctgtgcccaacccctgccctcctggaaatgaaatgcttggcactcttccatccatgctgaagatctctggtggtgtccaccagcctagcgcctgccctgatcagctcaccctgngaaagcaaaaaaggggcttggagttcaatggccaatgtccagtactgtgtgaggctgctcaaatctctgctgagtgtgagacacttagggtgactttctgtgatgctgctgagagacactcagcacagcggcactgtgtgctgggaggaggggatggaaaagatcccgtgtggcccggtgcatcctga

SEQ ID NO: 2817 - DNA, 597 bp, Homo sapiens
  SIMILAR (46)..(387): 991254mologous to Homo sapiens 2-oxoglutarate dehydrogenase precursor,accession number D10523,Smith-Waterman Score=600.
atgcccggcctcagccccgccctctggtccctgtgccggctgtgccagatcggcttcaccaccgaccctcggatggcccgctcctccccctaccccactgacgtggcccgagtggtgaatgcccccattttccacgtgaactcagatgaccccgaggctgtcatgtacgtgtgcaaagtggcggccgagtggaggagcaccttccacaaggacgtggttgtcgatttggtgtgttaccggcgcaacggccacaacgagatggatgagcccatgttcacgcagccgctcatgtacaagcagatccgcaagcagaagcctgtgttacagaagtacgctgagctgctggtgtcgcagggtgtggtcaaccagcctgagtatgagggtgaacccgcaggcacgctggctcaaacggagaggcacagagtgcagagtactttttcaaggtggagccaggggaaggacccagagcagggaaagctcagaaacaggactgcacccaaacagcccggcagcccaggccgcctctgccgcattcacaatgacggctttgccggcgagggcctgcaggtggtggtcatcactccccctgtccaatga

SEQ ID NO: 2818 - DNA, 564 bp, Homo sapiens
  SIMILAR (436)..(332): 481254mologous to Homo sapiens Human secreted protein, SEQ ID NO: 4454,accession number G00373,Smith-Waterman Score=69.
atgaaggggggccacctagttcctctccaggtcctctttgtgcagcctggagcaccagtggggagggaggacagccccctaagcaaccagactgctggggaagccatcaccagcagtagtacttgggtgaggggggctggctctgaagttccctccccagtggagcaagctgacgctctcacatctagcttagatatttcggatccagaagtaccttttttatatccagaaaagcgcaaggatgttggcagtgatgttgggacccactccacttggcactggctggtggtcatgcttccatcagaagaaccttgggccatgctgcaaagcgacaacaggacaaatccggggacccaggcaggcacgctggctcaaacggagaggcacagagtgcagagtactttttcaaggtggagccaggggaaggacccagagcagggaaagctcagaaacaggactgcacccaaacagcccggcagcccaggccgcctctgccgcattcacaatgacggctttgccggcgagggcctgcaggtggtggtcatcactccccctgtccaatga

SEQ ID NO: 2819 - DNA, 766 bp, Homo sapiens
  SIMILAR (41)..(76): 501254mologous to Mus sp. nicotinic acetylcholine receptor long gamma subunit isoform; nAcChoR l gamma,accession number S77465,Smith-Waterman Score=39.
tttttttttttttttttaaagggttttacgtaagtgcatgtgtaatttattgatagcaaggtttgcatgcatttattctgtgaatcagctcgggctggacttcctgggaatcccaggcgaagatctcagggtctctttctgctgatggctctcccttccacgaccggtcccttcccttccctgggcttcaatttccactttggtaaatggaaagggtttaagctaattctacaatccctttccttcttgggcattgttgattcctgggaaagccctgcaccccctccctcaaggcaaggcttcctcttccccaagcacacgcaaagttcttctcgggcctcccagctcttttcagcagctccccagaatggaacggcccagccatggcttctcagaggacagcttcttggcagagctgggagtgggtggagtagagcacattttttcctttgaggtccaaagggctgtcaaccctcttcagctgccctgcaagctcatgggaactccaggagcatcttggggttggagtgaaggtgtcctggcaggcatggctgctgcctccaggcttccccaggtcacagtgcagtcttctggtcttgttcatatcactgctatggttatgatcattagattcaatgcaatcacatacaagttcagggatgcaagaaatgacattgaagttgccatcaactatacagccttctgcaggccaactccagagctggagagttggtgggacttctcccaaggagttccctgaaagcat

SEQ ID NO: 2820 - DNA, 519 bp, Homo sapiens
  SIMILAR (449)..(484): 501254mologous to Xylella fastidiosa hypothetical protein,accession number AE003912,Smith-Waterman Score=44.
cacatcaaaggcaaactggggtgctccgaggatgcagaggggaatggatcggaagggatgtggcacttggcaccaccctctggtggcactggcctcatatcccttgtggcaattgtcaccaccatgattgctcaaggacttaggaaacatgcacagcatcttcaattcatcttctgccttagggcaggactggcaaacaaacagtttcataaagaggctggagagagaggggtaggttgcctgtgtcaggctgccaaatcttttgtctttttcctactctggagtcctatgccccagtccgagtatttgccgttgttatgtctgccaatcatgtttgaaactattcctaaccctaggagcatgggaagtgcatagtacaacatgtatttccaacgctgaatttgtccatctcagaacagagccccattagtaccctggagggtccccaagctgctggtccggggcgtggcagtcagagtggaggaggaggggacagactggagcacagctggatccacg

SEQ ID NO: 2821 - DNA, 1232 bp, Homo sapiens
  SIMILAR (873)..(1127): 351254mologous to Gallus gallus cytochrome b,accession number AJ401080,Smith-Waterman Score=81.
atgcctcgccctgcttcagcttgcgcagggtgcactgcacctactgtcctgcacccactgtctggcactccctacacacggcaaaacatcaggtccagagtaatcgaactgaatcagtgtagagagtgggagacaagagctggtactgaacttcacgacactgacaaccgtcatcgcctatccaaccagcgtctcattccagggaactgggactggccaagaataaccaccctggggagcctgccgtggtcacacacaagccctggaagttcttcagccctcttcacatttaacactggggtgaagcacagcaaagtaactttaccaggaaatccctgctctgttgaagcccaggacctgaaggcagggtgggcagctagaattttcccacgtcacatggaaacctctctccaacaaggaaattttgctcatcaaagttcagctaacatacacagcggacacatcaaaggcaaactggggtgctccgaggatgcagaggggaatggatcggaagggatgtggcacttggcaccaccctctggtggcactggcctcatatcccttgtggcaattgtcaccaccatgattgctcaaggacttaggaaacatgcacagcatcttcaattcatcttctgccttagggcaggactggcaaacaaacagtttcataaagaggctggagagagagggaacagagccccattcagtacctgagagggtccccaagctgctggtccggggcgtggcagtcagagtggaggaggaggggacagactggagcacagctggatccacgatgcaaacctttggccccacagaagggttaacatgcccagaggacacacagcaagggacagatgaggtgggagcgcaggaagcccttagagagcgggcctccaggaggaagccccagcctgccgactcagagctgagctgttcacagctctcacatggcagcaggccttttaaagggccacttgagatgaagggcgtgtttgtaaactgggaggcacagtacagtgtccaggattctcctgatagccaaggagctctgcagcagacccagccacagggccctgatggcaaaccccctgcagaggctctccagaaagctcaggccatgcccgcagccaaagctggagaaggagctggggtctcagacagaatgacctttcccacgagacagcgcaaagggaaagtcaagcaaaacacatcattgtgagataaacgtg

SEQ ID NO: 2822 - DNA, 358 bp, Homo sapiens
  SIMILAR (2)..(190): 281254mologous to Perna canaliculus cytochrome oxidase subunit I,accession number AF286187,Smith-Waterman Score=75.
gtaccctatatgccaggcactgtggcacacaatttctggcatgttcacatctactgaatttcacaacatcctcactaaaccaaggaaggcacgtgattatattactttcattttatggatgcagaaaacagctcagaaaggagacactctagaaactttcttccttgctggctttgaacaaagtagcaatgttgagaggtccacatggcaaggagctgaggacctccagccaaaagctagtaagaaggcaaggcccccagtcttgcaagtacaaggaaatgaattcccagatgagcctctagatgagaactcagtacttgccaaaactttgattatagccctgcagagtcccagctaa

SEQ ID NO: 2823 - DNA, 323 bp, Homo sapiens
  SIMILAR (127)..(159): 541254mologous to Diospyros kaki polygalacturonase,accession number AB038358,Smith-Waterman Score=34.
acatctactgaatttcacaacatcctcactaaaccaaggaaggcacgtgattatattactctcattttatggatgcagaaaacagctcagaaaggtaagctattcacctggatctcactaaggaaaacgtgtggaccctacagcagtgttttcataggatggtggaacacagggtgatcaggtaggagaaaaggacagaattagagtaaactgctagaattgtttataatccagaaaagcctatcttatctatgctgctgtcagatcaatgcaatctaacgatgacagtaaagggagtatcactcaagagagcttggcagaaa

SEQ ID NO: 2824 - DNA, 582 bp, Homo sapiens
  SIMILAR (400)..(209): 361254mologous to Homo sapiens Human ST-2 partial sequence,accession number W58701,Smith-Waterman Score=77.
atgaggagaaatgtctgtctgtgccgaacccccagtggagagcgtgtgggctcggaattaggggccacaacgctctacgctgtacgattgggaggcaggctggaggggctcggctgccctgccctctttactgggctctttagtgacttgctccacgtcagcacacccacccagaaatttgtgaagtcttcagaagaacatttcccagtggcctccctgtttgcacatctgcaggtgctggtgagtgtgaaccacctgtccctgcctgacacggaaccagatccttctcaggactcacctggggtcagtaggcatccagcgctggggcagctgcttcaggacatcgccgaggacaagtctcctccccattctggttccaccatctgtagcctgtggctttcatcctcaagggctccatgcgaccgctgcacatccaggcccagttccaaggtgcaaggctacttgtgccagcaagatagcagaagcaggacaagagctggctggaagacacctaccgtggtgggaagacatgtacccgtgaagatcgagaaagagtccatccggccagcaaacttcggctga

SEQ ID NO: 2825 - DNA, 543 bp, Homo sapiens
  SIMILAR (482)..(132): 301254mologous to Homo sapiens Human thrombopoietin C- terminal domain,accession number W53125,Smith-Waterman Score=82.
atggcagtggtgggctgggcatgtggacatgttcttcagccactgggcagctggtgtgatgtggctgatggcagtgggactgttggagcaacctaccggaacccatgcagtccatgctatgttggtggtgactgtgacaggttgggcaggccggtgcttatgggtttcagctgtggtgatattggcaggttgagtcagccagacctcagaccacagcaggagggatcaggtgccaatggtggtagacttagcttgggtatttttaggctcatgggttggatgctcgagtatttgggggatgggaccaagcttgataacttgtcctcaggccccttagtagtgcattcaggtgctgcctatgcctcagagataccacttcccacaggcctgacactgtactgccggagtcacactggagcaggatttggccctcaagttccatttattatgaagatactgaattcgttaagcaggcgaggcatgaataaacacttaagagacaccaagaatagagccaagtgtaggaaagactgcaggaggtga

SEQ ID NO: 2826 - DNA, 1538 bp, Homo sapiens
  SIMILAR (275)..(709): 451254mologous to Mus musculus NG28,accession number AF110520,Smith-Waterman Score=210.
atgctggtgggcaacagagtgacctgcgccacctgcgggctgtgcccactgacgaggcccgcgcttcgcagaaaagaacaacttgtccttcatcgagacctcagccttgattccactaacgtagaggaagcattcaagaacatcctcacaggtggccgggaccagatgggtacctgggcggcccccgcctgtgcccggtccccgccgccgggggcgcacgcagcccgagctcgccctactcggtggagacgccctacggcttccacctggacctggacttcctcaaccaggcgcctggacatccagcgagtccctggccagtgacgacggtggagaccgggcatactctcccagggcgcgccctcggggctcctgatgcagccgtgtcgccgcgcgcgcccgtgcgcaacccgcgcgtcgagcacacgctccggagaccagccggcggctggagctggcgcagacacacgagcgcgcgcccaccccggccgcggggtcccgcgcagcccacgcgggtccggccgcagcagcccgcccctaaccttgcccctgcttcgccccggccctgcccaactgcagcggtgcgcgagcagatggccgcggcgctgcggcgcctgcgcgagctcgagaccaggcgcgaacgctgcccgagctgcaggagcagggccagcccccggctgacagcccagacggcctggctgcagggcgcagcgagggcgcgctccggtcctcgacggggaggtcgggagtctcgatgggacgccccagacccggaggtggccgccgaggccgtgcccgagacccgagaagcgggtgcccaggcgtgccggagacccgggaggccggcgtggaggctgcccccgagaccgtggggcggacgcgtgggtgaccgaggcgctgctggggctgcctgcggccgccagcgcgagctagagctgctgcgcgccagtctggagcaccagcgcggggtagtgagcttctgcggggccggttgcgggagctggaggaagcccgcgaggcatcctcaaatccatcatgaagaagagagacggcacacctggtgccaacccagctccggacccaagagcctgcagtttgttggggtcctcaacgagatttcctcatcgttaaatgggaacggccacacccacatcgcagactccagaacgagcccacaggggaggtttagcagacacctcccaccctgccccaggtacgagagctcctccagcgaggacgccagcgacagcgatggcacagcgagaacggtggcgccgagcccccggcgcggggacatccgggaccctgagcccgaggcggaggcagagcctcagcagtggcacaggggagctcccccacacggcgccgcctggaccatcgccgatgttatcttggcccctgtcccttgcagggcgcagtcgcctcgtggcccaggagtggtttcgagtgtccagccagcggcgctctcggcggagcccgtggccaggatgctggaaggggtgaggcgcctgggacccaactgctggcgcacgtggtga

SEQ ID NO: 2827 - DNA, 754 bp, Homo sapiens
  SIMILAR (279)..(701): 731254mologous to Rattus norvegicus GTP-binding protein RAB11B,accession number AF286534,Smith-Waterman Score=489.
ggctgcggagtcgccgatcccgccggaagcgccaggacaatggggacccgggacgacgagtacgactacctattcaaagtggtgctcatcggggactcaggcgtgggcaagagcaacctgctgtcgcgcttcacccgcaacgagttcaacctggagagcaagagcaccatcggcgtggagttcgccacccgcagcatccaggtggacggcaagaccatcaaggcgcagatctgggacaccgctggccaggagcgctaccgcgccatcacctcccgccgtactaccgtggtgcagtgggcaccctgctggtgtacgacatcgccaagcaccctgaccctatgagaacgtggagcgctggctgaaggagctgcgggacccacgcagacagcaacatcgtcatcatgctggtgggcaacaagagtgacctgcgccacctgcgggctgtgcccactgacgaggcccgcgccttcgcagaaaagatcaacttgtccttcatcgaaacctcagccttggattccactaacgtagaggaaagcattcaagaacatcctcacagagatctaccgcatcgtgtcacaggtaacagatcgcagatccgcgctgcccacgacgagtccccggggaacaacgtggtggacatcagcgtgccgcccaccacggacggacagaagcccaacaagctgcagtgctgccagaacctgtgacccctgcgtcctccacccagcgtgcgtgcacgtccttcgcccgtccccgc

SEQ ID NO: 2828 - DNA, 407 bp, Homo sapiens; identical to SEQ ID NO: 484
  SIMILAR (397)..(47): 981254mologous to Homo sapiens PMS2L13,accession number AB017004,Smith-Waterman Score=583.

SEQ ID NO: 2829 - DNA, 394 bp, Homo sapiens; identical to SEQ ID NO: 486
  SIMILAR (131)..(394): 641254mologous to Homo sapiens hPMSR2,accession number U38964,Smith-Waterman Score=265.

SEQ ID NO: 2830 - DNA, 197 bp, Homo sapiens; identical to SEQ ID NO: 487
  SIMILAR (197)..(12): 601254mologous to Homo sapiens stromal antigen 3, (STAG3),accession number AJ007798,Smith-Waterman Score=187.

SEQ ID NO: 2831 - DNA, 712 bp, Homo sapiens; identical to SEQ ID NO: 488
  SIMILAR (614)..(381): 341254mologous to Pseudorabies virus glycoprotein gX,accession number U27488,Smith-Waterman Score=89.

SEQ ID NO: 2832 - DNA, 1104 bp, Homo sapiens; identical to SEQ ID NO: 489
  SIMILAR (478)..(909): 441254mologous to Xenopus laevis p33 ringo,accession number AJ249978,Smith-Waterman Score=260.

SEQ ID NO: 2833 - DNA, 329 bp, Homo sapiens; identical to SEQ ID NO: 491
  SIMILAR (1)..(225): 1001254mologous to Homo sapiens RPB11b1alpha protein,accession number AJ277739,Smith-Waterman Score=382.

SEQ ID NO: 2834 - DNA, 2172 bp, Homo sapiens; identical to SEQ ID NO: 492
  SIMILAR (268)..(687): 901254mologous to synthetic construct InsB peptide,accession number Z37515,Smith-Waterman Score=652.

SEQ ID NO: 2835 - DNA, 1338 bp, Homo sapiens; identical to SEQ ID NO: 493
  SIMILAR (1219)..(935): 361254mologous to Haliotis rufescens lustrin A,accession number AF023459,Smith-Waterman Score=89.

SEQ ID NO: 2836 - DNA, 410 bp, Homo sapiens; identical to SEQ ID NO: 495
  SIMILAR (258)..(88): 801254mologous to Homo sapiens stromal antigen 3, (STAG3),accession number AJ007798,Smith-Waterman Score=236.

SEQ ID NO: 2837 - DNA, 1137 bp, Homo sapiens
  SIMILAR (610)..(831): 911254mologous to Homo sapiens similar to yeast mismatch repair gene PMS1; similar to U38980 (PID:g1061426),accession number AC006014,Smith-Waterman Score=347.
atgttgcaagcttggtccatgcaagcagagccatgcatcagttcaggaatcacggctgccaaagcccagctggagcaggtgcagatgcagatcggcaactcatggctaatggactgctcccaatctcaccccagccagctggcactgagccctgaggcttcaacctcccagcaaagtggcaatgaccaacccagccccacgaccaaggatctgctgcaatacagtgacctatttcctcaagtcggcaaagaccatcgagccccctatggagaggacagccggacagcaggggcaccattttcagataaaaacatagacctgaatggcatcatccagtatccaaggaaaccatcatggtttcctgaatattttaagcacatgggtgagacctactgctcagaaaacaagattcctttcaaaatattactgctcagtgataaggcacctggtcacccacgagctctggctctccagccgctcaggtgccctctgccctggccccttgtttctttcagcctcatactgacgctgattgatatcttcgtgcagactcagttggagggcaactcttaccagggaggtcatcagtttcatagctttgatacagaacctgctaaggccatcaaacctatcgatcggaagtcagtccatcagatttgctctgggccggtggtactgagtctaagcactgcggtgaaggagttagtagaaaacagtctggatgctggtgccaccaatattgatctaaagcttaaggactatggagtggatctcattgaagtttcagacaatggatgtggggtagaagaagaaaactttgaaggcttaatctctttcagctctgaaacatcacacatcgatgtcaccatttctacctgccacgcatcggcgaaggttgggactcgactggtgtttgatcacgatgggaaaatcatccagaaaaccccctacccccaccccagagggaccacagtcagcgtgaagcagttattttctacactacctgtgcaccataaggaatttcaaaggaatattaagaagggattagggatggaggtcatgcttctgcttcgacttcatgctgagcagggcactgagtcccctaaagtgaaaggaatgaaactcctgggcttctga

SEQ ID NO: 2838 - DNA, 1322 bp, Homo sapiens; identical to SEQ ID NO: 496
  SIMILAR (546)..(977): 451254mologous to Xenopus laevis p33 ringo,accession number AJ249978,Smith-Waterman Score=251.

SEQ ID NO: 2839 - DNA, 460 bp, Homo sapiens
  SIMILAR (139)..(20): 921254mologous to Homo sapiens Human secreted protein encoded by gene 75,accession number Y76198,Smith-Waterman Score=187.
ttttttttttttttttttaatttatgaagaaaagaggtttaattgactcacagttctgcaggctgtacaggaagcgtggctggggaggcctcaggaaactgacaatcacggcagaaggcgaaggggaagcaggcacgtctggccatgttggagcaggagagacagagagagtgaagtgggagggctgcacgcttttaaacaaccagatcccacaagcgctcactcaatatcacgagaacagcaaggggggaagtcggcccccatgagccaatcacctcccaccagggtccctgccacaacactgggaattacaatttgacatgacattttgggttgtggatacagagctgaaccatgtcaagggtagttcaaccgctgagattgattgattgattgattgactgagatggagtcctgctctgttacctaggctggagtgcagtggcacaatctcggctca

SEQ ID NO: 2840 - DNA, 2212 bp, Homo sapiens
  SIMILAR (1329)..(1102): 1001254mologous to Homo sapiens PMS2L14,accession number AB017005,Smith-Waterman Score=385.
cttatcttgtccctctctgcaatctctacaaccacactggctcgccatcttggtgtttcctggcttggcttcactgctccttccaaatgccctccacttgactttgcatttgtgttttctgtctgggtgtcccgcacacatgtggttctgaagggaaggacccattccttgaagtcggttcaccccacagcctctgtgatgccttccctcgtcttccaacttctgcatgcccgtagctctccagttacagtcagttttgcaggctgtacaggaagcatggctggggagccctcaagaaactgacaatcacggcagaaggcgaaggggaagcaggcacgtttcttcttaatattcctttgaaattccttatggcgcacaggtagcgtagaaaataactgcttcacgctgactgtggtccctctggggtgggggtagggggttttcttgatgattttcccatcgtgatcaaacaccagtcgagtcccaaccttcgccgatacgtggcaggtagaaatggtgacatcactcagtgcacaaagtgagctcagagctttcccctgaaagccaaaagtttcaacccgagttaggtcggcaaactctcgaatcttagatgtgtgatgtttcagagctgaaagagataagccttcgaagttttcttcttctaccccacatccattgcctgaaacttcaatgagatccattccatagtccttaagctttagatcaatattagtggcaccagcatccagactgtttcctactatcttcttcaccgcagtgcttagactcagtaccaccggcccagagcaaatctgatggactgacttccgatcaataggtttgatggccttagcaggttctgtaagttttgcaggctgtacaggaagcatggctggggagccctcaagaaactgacaatcacggcagaaggcgaaggggaagcaggcacgtttcttcttaatattcctttgaaattccttatggcgcacaggtagcgtagaaaataactgcttcacgctgactgtgggtccctctggggtgggggtagggggttttctggatgattctcccatcgtgatcaaaaacaccagttgagtcccaacttaagccttcgaagttttcttcttctaccccacatccattgcctgaaacttcaatgagatccattccatagtccttaagctttagatcaatattagtggcaccagcatccagactgtttcctactatcttcttcaccgcagtgcttagactcagtaccaccggcccagagcaaatctgatggactgacttccgatcaataggtttgatggccttagcaggttctgtacggactgcgttttttttccgaacgcccgcagcagggtcagaagggaggtggtcgccctccgtcgtggtctggcgtgtattccgagccttggtgtctggcggtttccgagcgttggtgtctggcggtttccgagcgttggtgtcttggcggtttccgaccgttggtgtctggcggtttccgaccgttggtgtctggcacgcgccaccctctcttgctttggttgcgccatgccgatgtaccaggtaaagccctatcaccgggtctgcgcccctctccgtgtggagcccacctgcatgtactggctccccaacatgcacggcaggagcggcggcccagcacttggcactggccacttgcagacaagaagacaagaaaatgatttgaggacagcttcaatcgcggtgtgaagaagaaagcagcaaaacgaccactgaaaacaacgccggtggcaaaatatccaaagaaagggtcccaagcggtacatcgtcatagccggaaacagtcagagccaccagccaatgatattttcaatgctgcgaaagctgccaaaagtgacatgcagggatgtccttcctgagatccgtgctatctgcattgaggaaattgggtgttggatgcaaagctacagcacgtctttcctcaccgacagctatttaaaatatattgggtggactctgcatgataagcaccgagaagtccgcgtgaagtgcgtgaaggctctgaaagggctgtacggtaaccgggacctgaccgcacgcctggagctcttcactggccgcttcaaggactggatggtttccatgatcatggacagagagtacagtgtggcagtggaggccgtcagattactgatacttatccttaagaacatggaaggggtgc

SEQ ID NO: 2841 - DNA, 498 bp, Homo sapiens
  SIMILAR (322)..(492): 981254mologous to Homo sapiens Human secreted protein encoded by gene 75,accession number Y76198,Smith-Waterman Score=295.
ctccccagcctcagcccctagcctggcctctttgcatggggctgggggagatggggcgccgggagtgagtgcatggtgctttgtcccagctcctgcacccacaggccccctcagggctccttgcctttcccccccaccagcacaccccgtaccctgcctggaatcccagcaccagcccccctgcctctcctctgcctttctggtttctctccctctccaagcatctgtaagttgcactcaggagggtttaggggagggccatgggcaggctggtctcgtgatagtgagtgagtgctcatgggatctgggttgttaagaagcatgcagcacctcctgcttcactctctctgtctctcctgctccaccatggccagaaacgtgcctgcttccccttcgccttctgccgtgattgtcagtttcttgagggctccccagccatgcttcctgtacagcctgcaaaactgtgagtcaattaaacctcttttcttcataaaaaaa

SEQ ID NO: 2842 - DNA, 3420 bp, Homo sapiens; identical to SEQ ID NO: 500
  SIMILAR (1463)..(1603): 331254mologous to Homo sapiens PMS2L13,accession number AB017004,Smith-Waterman Score=55.

SEQ ID NO: 2843 - DNA, 1094 bp, Homo sapiens
  SIMILAR (959)..(1093): 681254mologous to Homo sapiens PRO1902,accession number AF118082,Smith-Waterman Score=156.
cccaatctgagcccctgcattgtgccttcaaatcctcctggactgcaagtcgttaagaaacaggacctccaggttccgccccagggaggttggaattcaccaatataaaaagggtggtggtgccgcaagaaagggtggaactggaaacgctcctggtttcttacttttctccaaggactcctagaaggaccccaccccccttcccccacccctgctcctaggaggacaacgtgatcactgtattcagctccatcaagaatggtccaggttcttctagatgatctgcacaaatgggttcctctccttctgcctggtgtctgccattagcattgggaataaagttcctgctgaaaatccacatctccccttgggttccggtgttcttggaagcgagagagacaatgtcacacttcaaggaggcagctctctagacaggaaagttattcacgtcccatgtcaagtctagagttcagagcaattgagaaatgcaattttatctgctgcctttcattctataccctgcttctgaaccatcgtgttcaactgtgaaactcacactttggtgaccatgactccaaaactcacttaatacacccaaggtcagcccccagtgatctgcttcatagcagggactttgggtgggtctgcccagggagtagggcaccctcagagaatgtggctttggactttatcacagctggggccttttgtgtcacttaagatctaaacttgtaaccatgctagatgtgttttctaatgtgacaacatcacgaaccacgagtccagaagcctaatccttaatcctacctcctcatgatgaagtctcatgctctgtgctcaacgtggttagctgcacaagatgtaaaccaaagcttcactgaaccctcgacccaaatcagtaactcaagtgcgtcaatcataatgaacctccccaaactcagtatttatgattatttttgaggcagggtctcactctgtcgcccagactggagtgcagtggcaggatcagggctccgtgcagccccaaccttccaggctccagcaatcctcccgcctcagcctcctgagtagttgggattacaggtgcccgccac

SEQ ID NO: 2844 - DNA, 4268 bp, Homo sapiens
  SIMILAR (1)..(798): 761254mologous to Homo sapiens hPMSR3,accession number U38979,Smith-Waterman Score=959.
atgtgtccttggcggcctagactaggccgtcgctgtatggtgagccccagggaggcggatctgggcccccagaaggacacccgcctggatttgccccgtagcccggcccgggcccctcgggagcagaacagccttggtgaggtggacaggaggggacctcgcgagcagacgcgcgcgccagcgacagcagccccgccccggcctctcgggagccggggggcagaggctgcggagccccaggagggtctatcagccacagtctctgcatgtttccaagagcaacaggaaatgaacacattgcaggggccagtgtcattcaaagatgtggctgtggatttcactttttgatttgtggtggcaactggaccctgatgagaagatagcgtacggggatgtgatgctggagaactacagccatctagtttctgtggggtatgattatcaccaagccaaacatcatcatggagtggaggtgaaggaagtggagcagggagaggagccgtggataatggaaggtgaatttgcatgtcaacatagtccagtacataacctgctatggccatcaaacctattgatcggaagtcagtccatcagatttgctctgggccagcggtactgagtctaagcactgcagtgaaggagttagtagaaaacagcctggatgctggtgccactaatattgatctaaagcttacggactatggagtggatctgattgaagtttcagacaatggatgtggggtagaagaagaaaactttgaaggcttaatctctttcagctctgaaacatcacacatgtaagattcaagagtttgccgacctaactgaagttgaaactttcggttttcagggggaagctctgagctcactgtgtgcactgagcgatgtcaccatttctacctgccacgcgtcggtgaaggttgggactcgactggtgtttgatcacgatgggaaaatcatccaggaaaccccctaccccccaccccagagggaccaccagtcagcgtaaaccaggtattttttaacgcctacttgtgcgccataaggaatttcaaaggaatattaagaagtgagtgagcgctcatgggatctggttgtttagaagcatgcagcacctcctgcttcactctctctgtctctcctgctccaccatggccagaaacgtgcctgcttccccttcgccttctgccgtgattgtcagcttcttgagggctccccagccatgcttcctgtacagcctgcaaaactgactcctagaagtacccccaccccacccctgctccttggaggacaacgtgatcactgtattcagctctgtcaagaatggtccaggttcttctagatgatctgcacaaatggctcctctcctccttcctgatgtctgccattagcactggaataaagttcctgctgaaaatccacatctcccctgggtccggtgttctcttccaactcctccagggaaacccaagccctgcagcgcatggaacaaaagaagtggaaccgatacttccggaacaaggctatctgagagcagttcttcctggccctcgggttcatgtaacggcataactggaaccaaagctcacggagcaagggtatatgagagcgggtctcctcgtacaggaagtagaagatgttttgtttgggggcctcatcgtcctcctccatgtcattggccagatagctcagcattggggtgactgtgctcatgtggaaattgcggggtggaggggtattcgaaggtcggatgcaaatccgagaagccggaggaagggttttcggtgatgctcccaggatggtgggctccgatgggatcttgtccgacaccctcagatctttgtcccaggccaggagtcttttaatgacaggatcctcaagcagcctgttgaaggcctcgtagtactcagggagcacgagcgacactcgccgtcgcttcgccttcatcttgaggccacacagcgtctccgccacccaggtctcctcaggctcaggggcgagctccttctctggctcatcatcagattcatccaaacattccctcttccttttccagccaagggacctacgtggggggctgggatctaccccaggggctgatggtcccgacacttcatcatccaccacctcctggagggggtaccctgaggtgctccgctgggggctctgctcttcctggggctgcggttgatggctcatcatgatctttcccaaaatctgtcccatctcaccaaacctagtctctgttctgtccttggtcttcttctggacactcagaccactgtccaaaagcatcttcagggtctccgcatccctctgttccctgtcccagcagaggctgtgtcctctccactcaaagcttgaagcgtgttggggtctcctcttctctgtacatgcccgtttcagagtccagtctgtccgtggtctggtcatgctgccatctctgcggttctctgcggagtcgtggtttctgtaccttgaagagaacttcccctctgccttttgctctgctatcgggcagatggcattgtctctgctttgcaactgatgaaataggaactctggcttctgggctaggctgagagggtgcttgctgctgccattccgggcccaggtgagacattcggtcatgagcatctgtagctcttgcctgagcctctgagccttcttaatattcctttgaaattccttatggcgcacaggtagcgtagaaaataactgcttcacgctgactgtggtccctctggggtgggggtagggggttttctggatgattttcccatcgtgatcaaacaccagtcgagtcccaaccttcgccgatacgtggcaggtagaaatggtgacatcactcagtgcacaaagtgagctcagagcttccccccgaaagccaaaagtttcaacccgagttaggtcggcaaactcttgaatcttagatgtgtgatgtttcagagttaagccttcgaagttttcttcttctaccccacatccattgcctgaaacttcaatgagatccattccatagtccttaagctttagatcaatattagtggcaccagcatccagactgtttcctactatcttcttcaccgcagtgcttagactcagtaccaccggcccagagcaaatctgatggactgacttccgatcaataggtttgatggccttagcaggttctgtacggactgcgttttttttccgaacgcccgcagcagggtcagaagggaggtggtcgccctccgtcgtggtctggcgtgtattccgagccttggtgtctggcggtttccgagcgttggtgtcttggcggtttccgaccgttggtgtctggcggattccgaccgttggtgtctggcacgcgccaccctctcttgctttggttgcgccatgccggtgtaccacacaagaagacaagaaaatgatttgaggacagcttcaatcggcggtgtgaagaagaaagcagcaaaactgaccactgaaaacaacgccggtggccaaatatccaaagaaagggtcccaagcggtacatcgtcatagccggaaacatgtcagagccaccagccaatgatcttttcaatgctgcgaaagctgccaaaagtgacatgcagcaccgagaagtccgcgtgaagtgcgtgaaggctctgaaagggctgtacggtaaccgggacctgaccgcacgcctggagctcttcactggctgcttcaaggactggatggtttccatgatcatggacagagagtacagtgtggcagtggaggccgtcagattactgatacttatccttaagaacatggaaggggtgctgatggacgtggactgtgagagcgtctaccccattgtacttttctaccctgagtgcgagataagaacgatgggtggaagagagcaacgccagagcccaggtgcccagaggactttcttccagcttctgctgtccttctttgtggagagcaagctccacgaccacgctgcttacttagtagacaacctgtgggactgtgcagggactcagctgaaggactgggagggtctgacaagcctgctgctggagaaggaccagagcacgtgccacatggagccagggccagggaccttccacctcctaggagaatctccaggaatttctgccattgtgcagggagcaattgaaaaatcaggcgagaggagctcgcccccacccaaacgtattggttcgatgaaggaagggcccatggttctgccactggccctggacacccagtgctggtttcccgtggaagtccccctggactga

SEQ ID NO: 2845 - DNA, 2379 bp, Homo sapiens
  SIMILAR (1057)..(1623): 481254mologous to Homo sapiens PMS2L13,accession number AB017004,Smith-Waterman Score=365.
  misc_feature (1)...(2379): n = a,t,c or g
gctaagtctcaaaaaaaaaaaaaaaggaacatgctctctcattcaaggttacccccttcctatcactcccaaggattcaccccataatcttatctttcttgatatgttacactcactaaaatgttcacatcaaatcaagtttgtagacacttgtccttaccaccttacaaaaaagtgagatggtatcaacaagaggtaagacactgctttacctgcatgtcacttttggcagctttggcagcattgaaaagatcattggctgggtggctctaactgtttccagctatgacgatgtaccacttgggaccctttctttggatgttttgccaccggcattgttttcagtggtcgttttgttgctttcttcttcacaccgcgattgaagctgtcctcaaatcattttcttgtcttcttgtctgcaagtggccagtgccgagtgctgggccgccgctcgtcccggtgcatgtggggcagccagtacatgcaggtgggctccacgcggagaggggcgcggtcgcctgagatagggcttttcatggtacctcgggctggcgcgtgccagacaccaacgagtcggaagccgccagacaccaacgctcggaatccacgccaggccacgacggagggcgactacctcccttctgaccctgctgctggcgttcggaaaaaacgcagtccggtgtgctctgattggtccaggctctttgacgtcacggactcgacctttgacagagccactaggcgaaaaggagagacgggaagtattttttccgccccgcccggaaagggtggagcacaacgtcgaaagcagccgttgggagcccaggaggcggggcgcctgtgggagccgtggagggaactttcccaggtccccgaggcgggatccggttgttgcatcctggaagcgagctgagagctcgagtccagaacctgttaagcccatcaaacttatggacggaagtccagtccttcagatttgttcggggccgggggtaccgagtctaaggccgaatgcggtgaaggagttagtagaaaacagtctggatgctggtgcccactaatgttgatctaaagcttaaggactatggagtggatctcattgaagtttcaggcaaatggatgtggggtagaagaagaaaacttcgaaggccttaatctctttcagctctgaaacatcacacatctaagattcgagagtttgccgacctaactcgggttgaaacttttggctttcaggggaaagctctgagcctcactttgtgcactgagtgatgttaccatttctacctgccacgtatcggcgaagggttgggactctgactggtgtttttgatcacgatgggaaaatcatcccagaaaacccccctaacccccaccccagagggaccacagtcagcgtgaagcagttattttctacgctacctgtgcgccataaggaatttcaaaggaatattaagaagaaacgtgccttgcttccccttcgccttctgccgtgattgtcagtttcctgaggcctccccagccatgcttcctgtacagccctgcaaaatttgnatttcctagaagtaccccaaccccacccctgctccttggaggacaagcgtgatccctgtattcagctcttgtcaagaatggtccaggttcttctagatgatctgcacaaatggttcctctcctccttcctgatgtctgccattagcattggaataaagttcctgctgaaaatccacatctcccctgggtccggtgttctggaagtgagagagacaatgtcacacctcaaggagacagctctctagacaggaaggttattcacgtcccatgtcaagtctagctagagttcagagcaattgagaagtgcgattttatctcctgcctttcattctataccctgcttctgaaccatcgtgttcaactgtgaaactcacgctttggtgaccctgactccaaaacttaatacacccaaggtcagccccagtgatctgcttcatagcaaggactttgggtgggtcttcccagggagtagggcacccttcagagaatgtggctttggacttcatcacagctggggccttttgtgtcacttcagatctaaacttgtaaccgtgctagatctgtttctaacgtgacaacatcacgaaccacgagtccagaagcctaatccataatcctccctcctcatgacaaagtctcatgctctgtgctcaacatggttagctgcacaagatgtaaaccaaagcttcactgaaccctcgacccagatcggtaactcaagtgcatcaatcataatgaacctccccgaactcagtatttatgattatttttgaggcagggtctcaatctgtcggccgggctgggagtgcagtggcaggatcaggg

SEQ ID NO: 2846 - DNA, 697 bp, Homo sapiens
  SIMILAR (108)..(158): 641254mologous to Homo sapiens Collagen assembly inhibitor peptide F5,accession number Y07305,Smith-Waterman Score=65.
ttaatacctaagatgtttaataagatgtttaacatcactagtcatgagggaaattaacatttaaagcattatgaatcaccactgccaggtgctgatgaaaatgcagcgcgcctggagtcgcgggcgttcctggcgggggtggaaatcgggggctgcccatttggaagacagttgagctgatgagttgaacgtacccttaacataggctccagcaatcccactctcaaaagaaatgaaactgcacgtccccaccaaacctgcacgcaaacgtctgaagtggcttcactcacaacagcccacatgcccatccacaggtgaacccgtgagcaactgtggtacctccacctgtcccacaacctacaactcagcagtaccaagggctggacgctggtgccaccacacgggtcccgcgaagcctgctgccaagtgaaggaagccagacaccaaagtctccaatctgcgggagtcactcacaggacaattctggaggacgcaaagctttcggagcgaggagagacaggtcgttgcttggggcccggaaggggcctgaatgcagaggggcaaaaatgtgggctgcctctgtcggggcagaagtgccccactctagacccttaccaagtcgtcggctgtacatcgaaaacgggtgagccttatgtgtgtacgtgataccgcaataaacctgacttgtaaaagcaaa

SEQ ID NO: 2847 - DNA, 318 bp, Homo sapiens
  SIMILAR (250)..(32): 361254mologous to Homo sapiens mitogaligin,accession number AF266280,Smith-Waterman Score=71.
atggacaagcagctgcctttgggctgctgtgccagcaacatcgtggccagtggtttggcaaagaaggcaacatcaaggcttggtcaaggcaacatcaaggcttggtcaatgcagccggggcaagagtccaagcagtgctaccccaacttgacaggagaggcagagaaactgaaggattccagctcatctgtctggacactccacagccaccaaagagccagcaccatctccctggatctgggcaccttccaaccttgagaagactcaggacggcagaatggtgtgccgtgaggaagttaggaggcagctagcctcgga

SEQ ID NO: 2848 - DNA, 834 bp, Homo sapiens
  SIMILAR (122)..(45): 401254mologous to Homo sapiens ankyrin Napoli {exon 16},accession number S82671,Smith-Waterman Score=53.
atggccacgtggcggaatctgacctccctcagctcgcttttctctttgcacctgattgttgtttggattcggcacaaagcacagagagcagcccagatccacgcagccttgctgctcagtgatggctgggagcctttactcctgcacagcatggaaacatcctccagcactgcctcgcaaagggccactcctaaggaaatgtttgccacccctcgctgtctcctgggccacatcattcaaagaccaggggggctgctgtcccttaaaaagcaaatgcatcaccaaatctgggaaatgatattccctggtatttcttcctatcaccagttcacaggagacaggtgtcaaaacagctttgctctgcagcagtgtggcaatgtctgccccaggacccctctgaagctgctgtgtagaatgtctgtagaatccactgggcactcacccatggacagcctggagataaatcttgaaaatgagaaacacattgctgaactgaagaattcattagaggctctcagcagtagaatgaccaggcagaggaaagaattgagagctgcttcattccttccaccaagggagaagacagctgtccatgaaccaggaagtgggccttcaccagacagcaatctgccagcaccttcttcttggacttccccacctccagaatggcaattgggggatgttattacgtccgctgaaagagagcctgttctgagggaccaggcgatctgcatgaagccccacgatggtgcctcagccagcggggttattctaggccagaagctcatggaagtggacacctgcaggtggggcccagaggacgaagggtggtag

SEQ ID NO: 2849 - DNA, 1226 bp, Homo sapiens
  SIMILAR (290)..(394): 411254mologous to Homo sapiens Human semaphorin III mutant protein fragment 55,accession number Y21322,Smith-Waterman Score= 74.
atgatctccttgggcccacacagcaccctgccagtttctgactttcaaagcaaaaatggctgcatctcagttgctgagaagccggggagtccttgtattcctgctgccaactcagaagggaaaacgaagtaaacagcagaagctcatggctgtctgtatcagtcacaagtttgcagcccaggcagctgagcagacagaaaaaactcgacatgaggcagtttcatctttgggtgctatattcatttggcaggacacgttccagcaatggttcagttttcaggatggcactgtgccatggcagcttaggccacaggggtggggctatcccagaggttccttctctggggcaatgcagctgtgtacatgtggacaactgtctacacaagatttgtggcctttgaagactggaggaccctctgtaggaattgctgccagtgtttgtggtggtgatggggaactgccaaggtctcctgcttaccatctccccataagaagtccccttggctccaggacaacatggcagggtagacagtattggagagatccacgcagccttgctgctcagtgatggctgggagcctttactcctgcacagcatggaaacatcctccagcactgcctcgcaaagggccactcctaaggaaatgtttgccacccctcgctgtctcctgggccacatcattcaaagaccaggggggctgctgtcccttaaaaaggcaaatgcatcaccaaatctgggaaatgaaattccctggtatttcttcctatcaccagttcacaggagacaggactcagagaagctgaaaaaagaagacctggtgggagctggcagacctgcagaagcagggcaattgggggatgttattacgtccgctgaaagagagcctgttctgagggaccaggcgatctgcaggaagccccaggatggtgcctcagccagcggggttattctaggccagaagctcatggaagtggacacctcaggtggggcccagaggacgaagggtggtagactagatgccctttatccccactgttctccagccctgggctccttgcctgcacttgctctttttgtgagacagcggtctagacgaatggagataacctttccagaccaatccccgcacctttcgccaggacatttgcatgcaattcttatgaaaggtcacccagaaactccgtggtcaaacagcatccttccaaacaacaaatgtgacagttaa

SEQ ID NO: 2850 - DNA, 835 bp, Homo sapiens
  SIMILAR (122)..(45): 401254mologous to Homo sapiens ankyrin Napoli {exon 16},accession number S82671,Smith-Waterman Score=53.
atggccacgtggcggaatctgacctccctcagctcgcttttctctttgcacctgattgttgtttggattcggcacaaagcacagagagcagcccagatccacgcagccttgctgctcagtgatggctgggagcctttactcctgcacagcatggaaacatcctccagcactgcctcgcaaagggccactcctaaggaaatgtttgccacccctcgctgtctcctgggccacatcattcaaagaccaggggggctgctgtcccttaaaaaggcaaatgcatcaccaaatctgggaaatgaaattccctggtatttcttcctatcaccagttcacaggagacaggtgtcaaaacagctttgctctgcagcagtgtggcaatgtctgccccaggacccctctgaagctgctgtgtagaatgtctgtagaatccactgggcactcacccatggacagcctggagataaatcttgaaaatgagaaacacattgctgaactgaagaattcattagaggctctcagcagtagaatgaccaggcagaggaaagaattgagagctgcttcattccttccaccaagggagaagacagctgtccatgaaccaggaagtgggccttcaccagacagcaatctgccagcaccttcttcttggacttccccacctccagaatggcaattgggggatgttattacgtccgctgaaagagagcctgttctgagggaccaggcgatctgcatgaagccccacgatggtgcctcagccagcggggttattctaggccagaagctcatggaagtggacacctgcaggtggggcccagaggacgaagggtggtag

SEQ ID NO: 2851 - DNA, 396 bp, Homo sapiens
  SIMILAR (52)..(306): 281254mologous to Rattus norvegicus syndecan,accession number X60651,Smith-Waterman Score=83.
atggtacctgacactggtgataacgaagatgaatcagtaacagtcactacccatgagcccttaaaaatagaagaggaaggccttagggtgaatcataaagatataacaatggaagaagaggcaggagagattccaagcatggaaggcactagacctgccactgccagctttgaagatggaggaagaggactagcctccctggtggcggatctgagaacagactccagagacaagactggcagcagagaccagttagaaggctactgcaaggaagagatgagcagaggggctggtggcagtggaggtgctaagatgtggcacacacgatactctgaaggtagagctcctgacattattggattggagtatgagaaaaaaatactcaaggatgactga

SEQ ID NO: 2852 - DNA, 411 bp, Homo sapiens
  SIMILAR (151)..(92): 501254mologous to Homo sapiens Human 5' EST related polypeptide SEQ ID NO:1393,accession number Y65232,Smith-Waterman Score=59.
attgactcggcaacatgttcttgccttttggagttgccctccaatttttccaggcttgattctgtaaatcatttcatcttgtaaaaatactgggctgtgagcacggatgatctcaaagatgaggaaacagaagctgggatatgtgagtaaacatttccaaggtcctgcagctaatcaatggttgacaacttctttcctctgcctatgttgccatccatgtcatggtttgtgtcaagactctaggagaagtctaccatcagcaccacagctactgtgcacaaatccagaatgccagactgaagtcagaaggaaagagatgatgcagctcattgctgatgctgagatccaacgtccagtgcctgagtacccctggattctgagcactaggggctggactgtggagaccatcag

SEQ ID NO: 2853 - DNA, 774 bp, Homo sapiens
  SIMILAR (388)..(305): 421254mologous to Abutilon mosaic virus 14.4 kDa,accession number X15983,Smith-Waterman Score=76.
  misc_feature (1)...(774): n = a,t,c or g
atgaaaacactattggcccgtgcatcaagattcctggctttgccacgaactagctttaatgcccttagtaagtcacacaacctcttgggtttcaaggacatccgcagtaacgtggaagccttggcccagaagacccagccctctgtgttccccaaggagtcagtccaagttacaccagtttgctatactaaaggagacagggaaagtgtgcagaagtgtccgcttatttttagaagccactcagccacagaacaggtgtccataagaagaggagtgattgttcgtgtggctaagtggcgaggagagagtcacatccatggagggcctgatgtgccaggccttgtcctagacacctcttatgaaacatcacctttaatccacacaccagccctgagagtgtattacattggagaagacattgcaatggaacaagtcactaacctagcatttcccctgctatattccaactcccatagggtttcagagcctggggaactgggcttctggggtccaggagagtcagtgatgccggcagatgctgtgtcagtgccttgcacgtgccatcctggatcttacggagtccagcccctagtgctcagaatccaggggtactcaggcactggacgttggatctcagcatcagcaatgagctgcatcatctctgacaggaatgggtgataagaacatttccctttccttctgacttcagtctggcattctggatttggaattccaccacacggagctagtgctactctatnnnnnnntttccca

SEQ ID NO: 2854 - DNA, 246 bp, Homo sapiens
  SIMILAR (25)..(222): 341254mologous to Homo sapiens EYA3 protein,accession number AJ007991,Smith-Waterman Score=67.
atggagaacacagaccatgataaactgggggatctcttagaagatgatagaaaagacttattaatagaaaatttatctttaaacctgcccaaactcgagaaaggctcatggctgtatggagaagcacagaaagctgcctctagttgtgaaagctttgaaaactgcatggacgtcatcacctgcaccatctcacttcacatgtttgtggcctgtgtcactttacttccatgcatcaagtctgcctga

SEQ ID NO: 2855 - DNA, 438 bp, Homo sapiens
  SIMILAR (96)..(182): 461254mologous to Homo sapiens Human 5' EST secreted protein SEQ ID NO: 499,accession number Y12186,Smith-Waterman Score=67.
ggcgcacaggaccacagagacccccaccccagcctagcagatgcaggctgtctgggcaatattgcagccttcacttccatgcccagctcttcggaggcatgtgggctccacctgtcactgcgatggggatgcaggctcattgcagcccagctgggccctctgtgacttctcacctggcccccttgataaggaaacaccaccctgtcatgcttggatggtgcaccaaggagttctggaagctaccatgctccctacagtgagatcatttctaagtacggccaggcaaggctgcttcccccttccaatggtgctctgatatacacagttttaatctggaacgattccttggccttcaggcctgtggaagaagaagagaatgcttaagggcagctccggccctcctctgtttctcatggggatgtggtcccaaggaaataa

SEQ ID NO: 2856 - DNA, 363 bp, Homo sapiens
  SIMILAR (345)..(235): 451254mologous to Homo sapiens Human secreted protein, SEQ ID NO: 6750,accession number G02669,Smith-Waterman Score=71.
atgaaagaaagcaaagctttctacttcagtttcagttacccgacaagtattttggagcgctatgtgtcaggccttattccaggttctgaagaagcaacagcaggaaaaaaaaccattcatggtcccatcatcacagagattatattacagtgctttagctccgcaccctacagctgtctgggtaaaggagagcatgtgagtggacccaaagaatggctaggtaaagccctgtccaagtctagaacagcaacagccatgctgcagcaatgtggaaacagacctgaagaaaaaactagcactgtgaggatggcagacggaagatggaaagagcttgggtccttgaggacactgtggaactgctga

SEQ ID NO: 2857 - DNA, 273 bp, Homo sapiens
  SIMILAR (133)..(23): 371254mologous to Acrocephalus arundinaceus MHC class I antigen,accession number AJ005516,Smith-Waterman Score=59.
atgcttgtgaatgctcatcagtgtctggacattgaagagttagatatttatcgtagtgttcacagtgtgggcctgtttgtacccatcctactgggaaagactttgcagggttgtgagttgccccagaccccagatgggtccagagatgctatccaggagcaggatttggatccagaaaccttagaaatctacctggtgctttatcctactgcggttaagctggcacccaaaccacaagacagtccttcccactcttccttcccctttccctag

SEQ ID NO: 2858 - DNA, 176 bp, Homo sapiens
  SIMILAR (6)..(95): 461254mologous to Arabidopsis thaliana contains similarity to phytochelatin synthetase~gene_id:K21P3.15,accession number AB016872,Smith-Waterman Score=73.
atgctcttaacctgttcactgtatcacctcctgcaaggacaaacattccaccttcttttcccctcttcaacccacagcctctgccagcgcctcttattggctgaacctaatgagaagccagggagcctgggaaatgtgatggctgtggcaagaatagaaattggaatctgtgagta

SEQ ID NO: 2859 - DNA, 882 bp, Homo sapiens
atgcctccaagtgaacaggtgacagatgtcaagcctcctggcacccggaagaaaggcactgcaacagactatgaggattcctgtgttaatcagttttctgtaaacttctgcaaatccaagagaatgaccaccacctccaccaacaatatcacaacaacaaataacctaccacccaagaaggactatgagacacttattttccattttgctgggctgctgaaggcctttacctccacctcccctcatttccatcttcactggtcaagacgaggcactgtatttgctgcgagaatgaaaaatcatgttggagagaaggaagaaggcaagatactcccctctcgccagcatcagtgtcaacatgaacagccaggacctgacgggagtggtggctggattcgctcaatggctatttgggggaaggaccctgtctacagcctcatggctgacaggtgccggtcctgtgaccagtggatgaaactggcccatgccacacccgccttctctcttgatgttgtctgggtctggaataagccatggcaggctgatactgacttgggagctggagaactattagagaaagcagcaggaatggggctgcataaacgatgctcctcactcttattgaaacagcccactttcaagcatgaagcttcgtttaggattcacggagacgttgggataagcactctattcagagtcaagaaaggtgtgcttctcacactcatctctattgctgtggacagtcacagcaattcttcccatgggactcttggtgccacacttgctggcatatcaagggtcagaaccacgctcacagatcctcatctgtggggcagcagctgtagaccatcagtgatgaccctggtccagttccccggatga

SEQ ID NO: 2860 - DNA, 246 bp, Homo sapiens
  SIMILAR (130)..(89): 501254mologous to Homo sapiens Human foetal kidney secreted protein nn84_3 (alternative),accession number Y31832,Smith-Waterman Score=46.
atggtgtgctacgtcctgcaccaaccattgccacttcatactgaccaggtggaaccaaacactcacattccagttggctccccatccctccccagggagaacagatccacaggtggtgcaccttgctgggattacaagcaagagtcaccccactcggccagtgtggcccttcttcaggtcatcacttgccagccgcaggcggtggctctgcccctcaccggacacgacgtcacagccgggatgtga

SEQ ID NO: 2861 - DNA, 639 bp, Homo sapiens
  SIMILAR (413)..(216): 311254mologous to Amsacta moorei entomopoxvirus AMV202,accession number AF250284,Smith-Waterman Score=63.
atggaaaatggaaaaacaccctcagcatttcagttacctgataaaaatgagagacagatgaaaaggaggcagatagaaggagaaggagaagagataatgtctatgacatggggagagaaacaaaggctagagagaggtgtaatgtttcaagatcttcatcatcgaaaaaaaatcaataaagctaccgatacttctcattatgagaagttgacaccaattccagtgaacagaggaaaattcagaaaaatggcagccagatttataaatatttccaatgaaacattaagatcagttgagagagacagtgatacaagcagaattctcaatattaaggctgaggatagtactaaagccaggcctgccagtaggcctgtagacaccaatggatcaaattatataactgactttatcactaaaactaatccaaataatgtcatttcaaacaaccagtttacttctgaaggagagaacaaactgatcctcagagaggcgaatttatccagtgatgcccaagataacaagaagagtttgccagactgcaaatctcctcttttcccagaatgcagagagttaaagaacctgaaggaatattttgttttacaagaaagaagtgaagcagaacaaggaagtcatgagtaa

SEQ ID NO: 2862 - DNA, 411 bp, Homo sapiens
  SIMILAR (205)..(23): 361254mologous to Arabidopsis thaliana Putative ribosomal protein,accession number AC007504,Smith-Waterman Score=76.
atgaggcacactacattatacgagaagcggaagtcgtgctacccgaacatactcgctcatcagccccggcagcggccgcgtcagctgtctcagtgtaatgggtggcggctggcacccagtccgggaatgcccaatggtggtgctagaaagctcgtcgtgatgggtcctccatcttcaagaaaggtagaatggactgaaggtcttttaaaaacacacctcaccaagctcagccaccaaaaaggactggacaatacttttatcactttcccttctcagaattcaggcctgtcctcggaatgctacaagatgcaggcaacagtgcaatggaatctggaagcacagacatgcagcacagaaggtgatgtgaatctgtcctgtctgcaagatccagattgtgtcactggtgtttga

SEQ ID NO: 2863 - DNA, 584 bp, Homo sapiens
  SIMILAR (26)..(568): 371254mologous to Murine leukemia virus pol polyprotein,accession number M14702,Smith-Waterman Score=254.
caacatgccctgagtcagataactaaaatacctcttagtctaggtagatactttcactggataggtagaggcctttcctacagggtctgagaaggccacggcagtcatttcttcccttctgtcagacacaattcctcagttaagccttcccacctcaatatagtctgataacagatgagcctttattagtcaaatcagccaaacagtttttcaagctcttagtattcagtgaaaccttcatatcccttacagtcctccatcttcaagaaaagtagaatggactgaagatcttttaaaaacacacctcaccaagctcagccaccaacttaaaaaggcctggacaatacttttaccactttcccttctcagaattcaggcctgtcctcggaatgctacagggtacagcccatttaagctcctgtatagatgctcctttttattaggccccagtctcattccagacaccagaccaacttagactgtgccccaaaaaacttgtcatccctactatcttctgtctagtcatactcctattcaccgttctcaactcggacgcgtgggtcgccccaagaattccgcgaaat

SEQ ID NO: 2864 - DNA, 826 bp, Homo sapiens
  SIMILAR (13)..(231): 291254mologous to Ustilago maydis virus P4 fungicidal protein,accession number A22746,Smith-Waterman Score=65.
ttatctgattcaatacgtgtggagctttgcatcaaccaagaacttgtttagggccactcttggtgtccggctgcttgcaaaagtcaaatcaattttactttctactcttgtcagtcatatctgcaaggctgacagttaccaggggctgtggccaggcatgagggagaatgtgtcattgctggctgcgttggtcatagcaacgtgtctgcctcagaacagatccagcatggatgagcaaacagaaaaatgtgtaagaaggcttgtgactgaaacagaccaaggaaatgatgaatgcatgggtcccataggtgaatgcattggtccacaggcagagagaatggagttccaagtcagtcaggccaaggttcaacacaaggaggtgggaacttcagactggaagctgaagcagtttctatggtcattagcggcagaggccagcccagaagaccagggagacttcactccatcttggaaatataggacaagcctcatccttgatttttgccaattgtctctgactcagccttccacccaccaggtggttgagaaatccaaggagggcctttcttattcttcctcactcttcacttgggatcatacaggaaacctggtccagaaatgctgggaagggcagcaggatttcgttccatactctcgggattttgttcttcattcaggggtactgctgatgatgtgtggttctgctcagggatctgtgctcaggccctcagactgcagcactagcgttcagactctccaggtgcatagcaggaagcacacactcaacttagatgaggacttaatacctctgctgtactctgtgtga

SEQ ID NO: 2865 - DNA, 382 bp, Homo sapiens
  SIMILAR (380)..(336): 1001254mologous to Homo sapiens Human epidermoid carcinoma clone HP10389-encoded protein,accession number W88497,Smith- Waterman Score=80.
ttagagtttattaagcaggggagtggaggggagatgtggcacaaatagaagtatgtaacattcaaacaacagaaaaaactttcggttacagttacacaaagggtcacttcctccccagcgacacatgggcctctcaaaggagaggagggagtaagtcccacggtagggccagtggttgctccctgggttttggaatcatttctgcggagctttcaaggccagaccctgggcttagggtcgagacttcatagcagtgacagccagacccagcaagatggctgcgaccgtgaaaccctgggcggcgatccgggtgcgcatcatgagctgagagcgctgctgttgccccggtggaaggagtagaggccgtaggtgagggcggccc

SEQ ID NO: 2866 - DNA, 958 bp, Homo sapiens
  SIMILAR (361)..(660): 681254mologous to Homo sapiens Human epidermoid carcinoma clone HP10389-encoded protein,accession number W88497,Smith- Waterman Score=285.
  misc_feature (1)...(958): n = a,t,c or g
gacactgtaaccaaacttctgcctccgggttgttgcccttggccttgggcatcgcgctgaccaccgcaccagcagctcaaacacgctgcctctgtctctcagacctcgtgtaaacaaactccttccggaaaggcgtgcacaaaggctttgcgggcatttggggaaatgtagtcctttttggttaactacccgtgctgagcactacgactccccaggatgcaacgagcatttgcgcctgcgtacaaggctcaatttattcgtttccccgcccctttcatgaccttcaccgggaggctgaggtcggagtcccgattttctcctgctgctgtggcccggacatggcgactcccggccctgtgaattccggaggtcccctttgaaccatcgaagcctccagtcattgaggggctgagccccactgtttacaggaatccagagagtttcaaggaaaagttcgttcgcaagacccgcgagaacccggtggtacccataggttgcctgggccacggcggccgcccttcaccttacggcctcttactcctttccaccgggggcaacagccaggcgcttttcagcttcattgattgcggcacccggattcgccgcccaggggttttcacggttcgcagccatttttgctggggtctggctgtcactgcttattgaagtctcgaccctaaagcccagggttttgggncttgaaaagctccgcagaaatggatttccaaaaacccaggggagcaaccacttggcccttaccgtggggaattactccctcctctcctttgagaggcccatgtgtcgctggggagggaagtgaccctttgtgtanactgtaaccgaaagttttttcaaaaatcctagatgctgttgtttgaatgttacatacttctatttgtgccacatctcccctccactcccctgcttaataaactctaaaaatccacttgtatttaaa

SEQ ID NO: 2867 - DNA, 915 bp, Homo sapiens
  SIMILAR (1)..(111): 701254mologous to Homo sapiens PRO1546,accession number AF116638,Smith-Waterman Score=141.
atggaatactatgtagccatgaaaaagaatgagttcacgtcctttgcagggacatggatgcagctggaaaccatcattctgagcaaactatcagaaggacagaaaaccaaacaccgcatgttctcactcataggaaagggcttcgtagctatcctcacatctggtggactctcaatagaacttgttggatggcttaatgtctacagtcctgcccacagcaatgttaggctaacaacaacaacaacaaatggaaacccggatggaatgggaaacctgaggatcacagaaaaaggtctaaagctagaaggagactctgaattcttacaacctctctacgccaaagaaatccagtcccgaccaagctcccagaggaaggagcagacagccgtccttgctgttctgcagactccactggtgacacctccaggtgcaggaaaagacccaggagtggccccccagcaaactgcagcagctgtacagaagaggggcctgactgttaaaagtgaacagaaagcaacaacaacatcaacaaaaaaatacccacaaaaccctatccaaaggtcagcagcctcaaataacaaagcaataaccacatccttaggttctgctgtgctgccttgcaacacgctggctcagaataaagaattgtctagagtatcacagcaaatcaggggtaactgcagagcaattccaaatcagaagagccaggcaccccttcatagtcttttgagatcagaacctgcagactatgtaatctatcctggttccctgtacccgtcttcggcctgggggttgggaacccctgatctagcaaatgggaaccacgggtgcccagcttatcacatgcgatttggaaatggaagtatggatatgtctgcgggaagcccaatactggggacattcaaagaatgttga

SEQ ID NO: 2868 - DNA, 798 bp, Homo sapiens
  SIMILAR (562)..(762): 281254mologous to Salvelinus alpinus immunoglobulin heavy chain,accession number AJ000366,Smith-Waterman Score=72.
atgatggaagtggcatttgacctgggccttataggatttgatgcactatggggaacaaaaggaaaggaaaagtactttctggctgagaacactgtaagcaaaggcaaggacatgggaaaacccagccccactcagcagtcagtgaaagcaataaccacatccttaggttctgctgtgctgccttgcaacacgctggctcagaataaagaattgtctagagtatcacagcaaatcaggggtaactgcagagcaattccaaatcagaagagccaggcaccccttcatagtcttttgagatcagaacctgcagactatgtaatctatgtatgtgaattcaggacattagaaggcaaaagccagcattttggtgaatggattgccaaagccattcactttgcgaagaataggactaatagaataagagctcctgttcagcatctgagagatcaacacccagaaattcggctaagtgttgacatgaggtttccatatgatgatggcattaatgcacctgtaggctatatttatgtggcaatgaaggaggctcaagaaattcataaaactggaagctatgtaatagaaaacagtttaaaattcagattcagatggaatttacaacccgttagtaagaagctggagtgcttggtgatgtatctgtggaccaagggatctgagtgtaaatcaatggtcataaagttagctcttactggctgcaccagcaggccccaggctcacacaggcagcaatgtctgcagtgagaatggcatgagggtcacagaattcaatgagataaaataa

SEQ ID NO: 2869 - DNA, 707 bp, Homo sapiens
  SIMILAR (45)..(497): 981254mologous to Homo sapiens Novel protein (Clone BM46_10),accession number W85727,Smith-Waterman Score=767.
tttcaaaggacacaaagagagatgtggactcaaagtcaccggggatgcctttatttgaagcagaggaaggagttctatcacgaacccagatatttcctaccactattaaagtcattgatccagaatttctggaggagccacctgcacttgcatttttatataaggatctgtatgaagaagcagttggagagaaaaagaaggaagaggagacagcttctgaaggtgacagtgtgaattctgaggcatcatttcccagcagaaattctgacactgatgatggaacaggaatatattttgagaagtacatactcaaagatgacattctccatgacacatctctaactcaaaaggaccagggccaaggtctggaagaaaaacgagttggtaaggatgattcataccaaccgatagctgcagaaggggaaatttggggaaagtttggaactatttgcagggagaagagtctggaagaaccgaaaggtgtttatggggaagggagaatcagtagaccatgtggagaccgttggtaacgtagcgatgcagaagaaagctcccatcacagaggacgtcagagtggctacccagaaaataagttatgcggtttccttttgaagacaccccatcatgttctggagcgggcagatgaagcaggcagtcacgggaatgaagtcggaaatgcaagtccagaggtcaaactggatggcccg

SEQ ID NO: 2870 - DNA, 1103 bp, Homo sapiens
  SIMILAR (307)..(366): 851254mologous to Homo sapiens Novel protein (Clone BM46_10),accession number W85727,Smith-Waterman Score=90.
atgaaggcaagggaaagcctgcagaaggaaaccggtcacagccctctaacgggtgtcagcctccctgcccatcagaatcgccagggaagctttaaacatgcaatcccaagcccaccccaaacaatggagtcagaatcctgggagtgggacccagcatcagtacttaacgctcctggggtgcgtctaggatgcagtcaagtgcgcaccgggttagtggcccacatcgcagggagaatggagaaatctgggggaaaacgccccgcccgtaccgtggtccccgaatcacgaatttctggaggagccaccgcacttgcatttttatataaggatctgtatgaagaagcagttggagagaaaagaaggaagaggagacagcttctgaagcgatgcagagaaagctcccatcacagaggacgtcagagtggctacccaaaaaataaggcatttggttccatttgaagacacccatcatgctctggagcgtgcatatgaagcaggcagtcacggtaatgaagtcggaaatgcaagtccagaggtcaatctgaatgtcccagtacaagtgtccttcccggaggaagaatttgcatctggagcaactcatgttcaagaaacatcactagaagaacctaaaatcctggtcccacctgagccaatatttcccttgtgttcactttagcctgtgggccaccagcatcaacatgcagggtcacaaatgtgatttgccaaatcagacctgcagctgtaaggcaacagcactgacttctggattttacggtaaagaggacagactgttatcagagactctgataagactaaaagtggtgagggggcgtatgggagggaaatgaagtcccctcacaagtttccagaaggaaaaatccacaacgacaaagaacatgataggatcgtccaagaatttctggcagagactggaccaaaagtcacaaggtttaatgagcagtgtcgtttcaggccacgaatttgtgagcgcctgtttctgctcacagcttgcccacttctctctctctaccataaagctttttggtcaaactccacttagcttagcagctgccactatttccaggatctggcaacgagaataa

SEQ ID NO: 2871 - DNA, 434 bp, Homo sapiens
  SIMILAR (187)..(255): 861254mologous to Homo sapiens Fragment of human secreted protein encoded by gene 19,accession number W67951,Smith-Waterman Score=98.
  misc_feature (1)...(434): n = a,t,c or g
gcacgggggagcgaggcctgctggnttggcaacagagggactcggcctcggaggcgacccagaccacacagacactgggtcaaggagtaagcagaggataaacaactggaaggagagcaagcacaaagtcatcatggcttcancgtctgctcgtggaaaccaagataaagatgcccattttccaccaccaagcaagcaganctgttgttttgtccaaaatcaaaactgcacatccacagagcagagatctcaaagattatgcgagaatgtcaggaagaaagtttctggaagagagcatgcttgtcacccagggactagtctaccaaggttatttggcagctaattctagatttggatcattgcccaaagttgcacttgctgggtctcttggggatttggccttggaaaggtatcatacataggagtatgccaga

SEQ ID NO: 2872 - DNA, 487 bp, Homo sapiens
  SIMILAR (183)..(100): 961254mologous to Homo sapiens Extended human secreted protein sequence, SEQ ID NO. 166,accession number Y35917,Smith- Waterman Score=150.
ttccattagaagtattttattttaaagtacacttgaaattttaaatgtgtacaaattcagaggtttaaaaaacttcgaaagtcacagacacagaatttaggaagctgaaggctgagagtctcccttctcacttaatccatgctttattttgcattcctcacaggtaaggaggcagtgcctagaagagaagcaaaaatagacagcggtttgtactttgacactggaagccctagtctttacataacatattattcttattattttaacataatctttttaatagagatgtggggggagtctatctatgttgcccaggctggtctcgagggctcaagggatcctcccacccaaccctcttgagtagctgagactacaggcatgaaccactgcacctggctttaacacaatattagaaatatagtctatgctaaagttcactagccttgttttttcagaaataataggagtattctcccattctgtaggt

SEQ ID NO: 2873 - DNA, 806 bp, Homo sapiens
  SIMILAR (27)..(281): 341254mologous to Homo sapiens Fragment of human secreted protein encoded by gene 19,accession number W67951,Smith-Waterman Score=100.
gccggggagacaggtggggtactcgggaagctggagcgagccggcggtgcagtcacgggggagcgaggcctgctgggacttgggcaacgagggactcggcctcggaggcgacccagaccacacagacactgggtcaaggagtaagcagaggataaacaactggaaggagagcaagcacaaagtcatcatggcttcagcgtctgctcgtggaaaccaagataaagaatgcccattttccaccaccaaggcaagcagagcctgttgttttgtccaaaatcaaaactgcacatccacagagccagagatctcaaagattatgcgagaatgtcaggaagaaagtttctggaagagagctctgcctttttctcttgtaagcatgcttgtctaccccagggacttagtcctacccaaggttatttggcagcctaattcctagatttgggatcattgcccccaaagttgccacttgcctggtcctcttgggatttggcccttggaaaaggtatcataccatagggagttttgccagagttaaattccattttttttgaagttccagcttccgtggggctggttttggtccacaggcatatacaggcactgcctccttaacctgttgaaggaattgcaaaattaaagcatgggattaaagttgagaagggagactcctcagccttcagcttcccaaattccggtgtccgtgactttcgaagttttttaaaactcttgaatttgtacacatttaaaatttcaagtgtactttaaaaataaaatacttctaatggaccaaaaaaaaaaaaaaaaaa

SEQ ID NO: 2874 - DNA, 440 bp, Homo sapiens
  SIMILAR (195)..(73): 371254mologous to Rattus norvegicus nitric oxide synthase,accession number L36063,Smith-Waterman Score=60.
  misc_feature (1)...(440): n = a,t,c or g
ncatataatagatgtccagcattcagacattgtttctctattatttaaatccatggcttcttcctgtttgatttgatgaaggcggctgatggaaccatgaaagggaggaggtggcaacaaccaagtccattgatcaaaggggcactgttgactcttctcagaatgttgccgtctgcggtagtggaactcggcagcgacttgaaacctagtttcattttctcctgtgccatgtccgggtcgaggaataagttctcaaggctttccggctcccgtccacacaaggacaagtctccaagtctataatgtaactggggaatttaatctgtcaccgccgcgaatccttctccatctctctcagccctggcaactcatggtaagcctttccggccaaaacaaaaactacaatccccggctcgagccggggaattccaccacacgga

SEQ ID NO: 2875 - DNA, 574 bp, Homo sapiens
  SIMILAR (1)..(105): 341254mologous to Streptomyces coelicolor A3(2) putative membrane protein,accession number AL136058,Smith-Waterman Score=59.
tacatgtcagctgcaccacctgtgaataaaaccaagtccattgatcaaggggcactgttgactcttctcagaatgttgccgtctgcggtagtggaactcggcagcgacttgaaacctagtttcattttctcctgtgccatgtccgggtcgaggaataagttctcaaggctttccggctcccgtccacacaaggacaagtctacttagtgggcaggtgatgtaaggagagaggcaaaggggaaaaagagaagagaggagaaagctcttaggcgagtaggggtgcccacctttgcagccctagcagccctaacatcagtgaacacaaagttaggcagaactggctccgaaccgcctatctcccatgatcggggcctctaacgatgagaagatcccccacctccaagtctataatgtaactggggaatttaatctgtcaccgccgagaatccttctccatctctctcagccctggcaactcatcgtaagcctttccggccaaaacaaaaactacaatatgaaacatttgacaatcagttgggtcccgcccctcagagcctgcgataagctatcagcg

SEQ ID NO: 2876 - DNA, 715 bp, Homo sapiens
  SIMILAR (142)..(77): 501254mologous to Escherichia coli D-xylose uptake protein (aa 1-61),accession number X04387,Smith-Waterman Score=48.
ccatttaaaaagattttttttaatgcagtactcttggcattatgcataattacttacagtcatcccttggtatatgtggggaattggttccagcacccccccactgcaataccaaaatccacacatcctcaagtccacagtgggccttctggaacccgaggatacaaaaagtcacccatacgtataggaggggtttcacatcacacgccattcaaatccatgttgttcaagtttggaggttcctgtttgatttgatgaaggcggctgatggaaccatgaaagggaggaggtggcaacaacagagagcgtcgattcctaaatgttgttctgtttgtcctaattcttaacatgtcagcttgcaacacctgtgaattaaaaccaagtccattgatcaaaggggcactgttgactcttctcagaatgttgccgtctgcggtagtggaactcggcagcgacttgaaacctagtttcattttctcctgtgccatgtccgggtcgaggaataagttctcaaggctttccggctcccgtccacacaaggacaagtctccaagtctataatgtaactggggaatttaatctgtcaccgccgcgaatccttctccatctctctcagccctggcaactcatggtaagcctttccggccaaaacaaaaactacaatctgccgcctttgacaatcagttgggtcccgcccctcagagcctgcgataag

SEQ ID NO: 2877 - DNA, 1029 bp, Homo sapiens
  SIMILAR (79)..(807): 781254mologous to Mus musculus ICAp69,accession number U26461,Smith-Waterman Score=953.
atgccaaatgttaatgaggatgtggagcaaatagaacttgtattcattgctgtggagaaccgtccagctcatggtatggtacaaacacaagtgcgccttgcaaaaaaaaactttgacaaattgaagatggatgtttgtcaaaaagtggatcttcttggagcgagcagatgcaatctcttgtctcacatgctagcaacataccagaccactctgcttcatttttgggagaaaacttctcacactatggcagccatccatgagagtttcaaaggttatcaaccatatgaatttactactttaaagagcttacaagaccctatgaaaaaattagttgagaaagaagagaagaagaaaatcaaccagcaggaaagtacagatgcagccgtgcaggagccgagccaattaatttcattagaggaagaaaaccagcgcaaggaatcctctagttttaagagacccatagatgaactattagacatgaaatctgaggaaggtgcttgcctgggaccagtggcagggaccccggaacctgaaggtgctgacaaagatgacctgctgctgttgagtgagatcttcaatgcttcctccttggaagagggcgagttcagcaaagagtgggccgctgtgtttggagacggccaagtgaaggagccagtgcccactatggccctgggagagccagaccccaaggcccagacaggctcaggtttccttccttcgcagcttttagaccaaaatatgaaagacttacaggcctcgctacaaggtaggcaaagtgagagaagttcatctcagtgcccacagtggggctgccagactatgcctgagagctgtgacaagggcagcggccatggggaattgcacttcagccttgccccatatacacgggaaaggcaccaaaccacactgaggtctaaggagggaggtgttctgggagggagagagaaacacaagctcatgctacggaaagagaaacaggaactgcaaagggaggccatttgttactcaggccaacaacatctcatttga

SEQ ID NO: 2878 - DNA, 1415 bp, Homo sapiens
  SIMILAR (170)..(874): 1001254mologous to Homo sapiens diabetes mellitus type I autoantigen,accession number U26591,Smith-Waterman Score=1236.
attaacccaggagatgggggtcgaggagagaccccggggagtagagagagagaaactcactccccgagtccccgaccctccccaagcaaggttataatataacttatcctctcatgcttttttcctgccccttctccccaaatcatcaacaatagaagaagaagaaaacatgtcaggacacaaatgcagttatccctgggacttacaggatcgatatgctcaagataagtcagttgtaaataagatgcaacagaaatattgggagacgaagcaggcctttattaaagccacagggaagaaggaagatgaacatgttgttgcctctgacgcggacctggatgccaagctagagctgtttcattcaattcagagaacctgtctggacttatcgaaagcaattgtactctatcaaaagaggatatgtttcttgtctcaagaagaaaacgaactgggaaaatttcttcgatcccaaggtttccaagataaaaccagagcaggaaagatgatgcaagcgacaggaaaggccctctgcttttcttcccagcaaaggttggccttacgaaatcctttgtgtcgatttcaccaagaagtggagacttttcggcatcgggccatctcagatacttggctgacggtgaaccgcatggaacagtgcaggacggaatatagaggagcactattatggatgaaggacgtgtctcaggagcttgatccagacctctacaagcaaatggagaagttcaggaaggtacaaacacaagtgcgccttgcaaaaaaaaactttgacaaattgaagatggatgtttgtcaaaaagtggatcttcttggagcgagcagatgcaatctcttgtctcacatgctagcaacataccagcttgcctgggaccagtggcagggaccccggaacctgaaggtgctgacaaagatgacctgctgctgttgagtgagatcttcaatgcttcctccttggaagagggcgagttcagcaaagagtgggccgctgtgtttggagacggccaagtgaaggagccagtgcccactatggccctgggagagccagaccccaaggcccagacaggctcaggtttccttccttcgcagcttttagaccaaaatatgaaagacttacaggcctcgctacaagaacctgctaaggctgcctcagacctgactgcctggttcagcctcttcgctgacctcgacccactctcaaatcctgatgctgttgggaaaaccgataaagaacacgaattgctcaatgcatgaatctgtacccttcgggagggcactcacatgccgcccccagcagctcccctgggggctagcagaagtataaagtgatcagtatgctgttttaataattatgtgccattttaataaaatgaaagggtcaacggccctgtttatattggtat

SEQ ID NO: 2879 - DNA, 806 bp, Homo sapiens
  SIMILAR (267)..(584): 851254mologous to Homo sapiens 69 kD autoantigen,accession number L01100,Smith-Waterman Score=467.
gagctgatcacttcaagcttggcacgaggctagagtctgatgcccagaaactgaacttgctttggaggacaggggacaagggaacatgggattcgaaatttaattctataaactcttaagagaggctataataataggatgaacttatattttgatgacatttttcttaaatctagccatcaaccagtctcccccttcgcagcccccacagcattgattcctgagggcttgagccctccgtggtgacgttttgttctctgttacttcaatcagcttgcctgggaccagtggcagggaccccggaacctgaaggtgctgacaaagatgacctgctgctgttgagtgagatcttcaatgcttcctccttggaagagggcgagttcagcaacgagtgggccgctgtgtttggagacggccaagtgaaggagccagtgcccactatggccctgggagagccagaccccaaggcccagacaggctcaggtttccttccttcgcagcttttagaccaaaatatgaaagacttacaggcctcgctacaaggtaggcaaagtgagagaagttcatctcagtgcccacagtggggctgccagactatgcctgagagctgtgacaagggcagcggccatggggaattgcacttcagccttgccccatatacacgggaaaggcaccaaaccacactgaggtctaaggagggaggtgttctgggagggagagagaaacacaagctcatgctacggaaagagaaacaggaactgcaaagggaggccatttgttactcaggccaacaacatctcatttga

SEQ ID NO: 2880 - DNA, 2035 bp, Homo sapiens
  SIMILAR (693)..(1883): 1001254mologous to Homo sapiens autoantigen p69,accession number L21181,Smith-Waterman Score=2054.
  misc_feature (1)...(2035): n = a,t,c or g
cggccgccgcaggaagggccggttcctgcgctccccccgcccctttccctcgccttcggctgacgctnacgtcggatgagtgatccggagggacgctccgaccgcggccgggaggctcctgggggccggggctccgaggttataatataacttatcctctcatgcttttttcctgccccttctccccaaatcatgcaacaatagaagaagaagaaaacatgtcaggacacaaatgcagttatccctgggacttacaggatcgatatgctcaagataaggcatgtgtaaataagatgcaacagaaatattgggagacgaagcaggcctttattaaagccacagggaagaaggaagatgaacatgtcgctgcctctgacgcggacctggatgccaagctagagctgtttcattcaattcagagaacctgactggacttatcgaaagcaatttgtactctattcaaaagaggatatgttcattttaggaggccaaggcaggaggatcacttggagccaggagtttgagaccagcctgggcaacaaagtgagacccccatctctacaaaaaataaaaacacttaaaaattatccgggtaccgtgcatgtgcagtcccagctactcaggaggctgaggcaggaggatcacagtgacctataatgagccgttgtgctccagcctgggcgacagaagtcttgtctcaagaagaaaacgaactgggaaaatttcttcgatcccaaggtttccaagataaaaccagagcaggaaagatgatgcaagcgacaggaaaggccctctgcttttcttcccagcaaaggttggccttacgaaatcctttgtgtcgatttcaccaagaagtggagacttttcggcatcgggccatctcagatacttggctgacggtgaaccgcatggaacagtgcaggacggaatatagaggagcactattatggatgaaggacgtgtctcaggagcttgatccagacctctacaagcaaatggagaagttcaggaaggtacaaacacaagtgcgccttgcaaaaaaaaactttgacaaattgaagatggatgtttgtcaaaaagtggatcttcttggagcgagcagatgcaatctcttgtctcacatgctagcaacataccagaccactctgcttcatttttgggagaaaacttctcacactatggcagccatccatgagagtttcaaaggttatcaaccatatgaatttactactttaaagagcttacaagaccctatgaaaaaattagttgagaaagaagagaagaagaaaatcaaccagcaggaaagtacagatgcagccgtgcaggagccgagccaattaatttcattagaggaagaaaaccagcgcaaggaatcctctagttttaagactgaagatggaaaaagtattttatctgccttagacaaaggctctacacatactgcatgctcaggacccatagatgaactattagacatgaaatctgaggaaggtgcttgcctgggaccagtggcagggaccccggaacctgaaggtgctgacaaagatgacctgctgctgttgagtgagatcttcaatgcttcctccttggaagagggcgagttcagcaaagagtgggccgctgtgtttggagacggccaagtgaaggagccagtgcccactatggccctgggagagccagaccccaaggcccagacaggctcaggtttccttccttcgcagcttttagaccaaaatatgaaagacttacaggcctcgctacaagaacctgctaaggctgcctcagacctgactgcctggttcagcctcttcgctgacctcgacccactctcaaatcctgatgctgttgggaaaaccgataaagaacacgaattgctcaatgcatgaatctgtacccttcgggagggcactcacatgccgcccccagcagctcccctgggggctagcagaagtataaagtgatcagtatgctgttttaataattatgtgccattttaataaaatgaaagggtcaacggccctgtttatattggtat

SEQ ID NO: 2881 - DNA, 633 bp, Homo sapiens
  SIMILAR (374)..(285): 1001254mologous to Homo sapiens diabetes mellitus type I autoantigen,accession number AC006042,Smith-Waterman Score=156.
gagagcggtggcctggaaaccgcttctagacaatcctgtattatttagatccacatagagatacacgaaaaccctttataccaaataagagtaaataattataccaatataaacagggccgttgaccctttcattttattaaaatggcacataattattaaaacagcatactgatcactttatacttctgctaagcccccaggggagctgctgggggcggcatgtgagtgcccttcccggaagggtaccagattcatgcattgagcaattcgtgttctttatcgggttttcccaacagcatcaggatttgagagtgggtcgaggtcagcgaagaggctgaaccaggcagtcaggtctgaggcagccttagcaggttctggggagagaagaggaaacatgagcaaacgcaccttccaaatgtccacctctgccatgcgggatgcaggcaggtccaggtcatcttcaaatgcagattgttcaatcagtcaaatccctgtgcactctctatgacaatagttagggaattccaactcccgtggctggttggccagttaacatttccaaaccagggcctgaagctccgagaataacaagctcttgtgttaacaaactcccacctgcaccccaacccca

SEQ ID NO: 2882 - DNA, 3491 bp, Homo sapiens
  SIMILAR (1862)..(2740): 581254mologous to Homo sapiens autoantigen p69,accession number L21181,Smith-Waterman Score=687.
atggccacgtggaacacctgccggagagcaggggcggggtcactctgggcggcggatccgagcgggggatacccaggagatgggggtcgaggagagaccccggggagtagagagagagaaactcactccccgagtccccgaccctccccaagcaaggcgagtcgcctcctcgggtcccggatcccggtgcggaaccgcatcagccccttcccctcccctcctccctccggcctgggaaggtctggaggatgcgcgcgccgtgagagcgtgcgtcagccccgggggagcggtagggaagcgttccgcgctccggccccagcgctgggagcaccggcacccatgccagcccaccccacccacccaccgcgcgcctcgccttcccggcggctccggccccaggaccccgagctccctggtgggcagggacttgcgtccagggttgacttgttgacaagttcacctgccgcggcgcctggccagttgcttaagataactgaacttaaacttcttcgtgaaatgaatataaatcattatgtcaacttggccgtattgcgaggatactccgtgatgtgggtgaagcatacaccccagtgtctgagaagtggcagttcctcaattagtggtaactccttgtcccagtgtaaacctactgagtggccttggacaagtctgatcatctgtgattcaggaggattagatgcactaattagtgtaagcacaggactgattctaaatattcgttgcatggttgtggaggtggtggagggaccacagaaagaagaatttgagagtgcagatggaaagaggagtttagttttagatgtgctgaatttgaagtgcctgtggaacaatccaggtgaagattaccatctggaggtggaaatgtggatctggtgccctggagaggttgttatatcaaaattagaaacttgctttccattgatctattcatccttgggcctctgcttctttgagcagatcttaattattggtgcaactgctttgtcttctttgaggaaacagtttaactgtgaaacacaaacattcatgcgatcaagttgtgctgactgtgacaatatcttggcgctcacagtccatcagcatcttgttacttgcccttctttgcttatctcccaagccttgcattccagggatgaagccgacttgattgtggtggataagctttttgatgtgctgctggattccgtttgccagtattttattgaggattttcacactgatgtttatcagggatatagcagttatccctgggacttacaggatcgatatgctcaagataagtcagttgtaaataagatgcaacagaaatattgggagacgaagcaggcctttattaaagccacagggaagaaggaagatgaacatgttgttgcctctgacgcggacctggatgccaagctagagggggaaagcacatccgaggaagctaagtgtcactctggtgcctgtggcttggctgctggtgtgtgttcaggacccccactgtaccattatgtggtcttgtctcaagaagaaaacgaactgggaaaatttcttcgatcccaaggtttccaagataaaaccagagcaggaaagatgatgcaagcgacaggaaaggccctctgcttttcttcccagcaaaggttggccttacgaaatcctttgtgtcgatttcaccaagaagtggagacttttcggcatcgggccatctcagatacttggctgacggtgaaccgcatggaacagtgcaggacggaatatagaggagcactattatggatgaaggacgtgtctcaggagcttgatccagacctctacaagcaaatggagaagttcaggaaggtacaaacacaagtgcgccttgcaaaaaaaaactttgacaaaattgaagatggatgtgtgtcaaaaagtggatcttcttggagcgagcagatgcaatctcttgtctcacatgctagcaacataccagaccactctgcttcatttttgggagaaaacttctcacactatggcagccatccatgagagtttcaaaggttatcaaccatatgaatttactactttaaagagcttacaagaccctatgaaaaaattagttgagaaagaagagaagaagaaaatcaaccagcaggaaagtacagatgcagccgtgcaggagccgagccaattaatttcattagaggaagaaaaccagcgcaaggaatcctctagttttaagactgaagatggaaaaagtatttttttctgcctttagacaaaggctctacacatactgcatgctcaggacccatagatgaactattagacatgaaatctgaggaaggtgcttgcctgggacccagtggcaggacccccggaaccctgaaggtgctgacaaagatgacctgctgctgttgagtgagatcttcaatgcttcctccttggaagaggggcgagtttcagcaaagagtgggccgctgtgttttggagacgggccaagttgaagggagccagtgcccacctatggccctggggagaagccagacccccaaggcccagacaggctcaggtttcctttccttcgcagctttttagaccaaattttgaaagatttacaggcctcgctaaaagaacctgctaaaggctgccctcaagaccctgactgccctgggttcagccctcttcggctgacctcggacccactctcaaaatcctgatgctgttgggaaaactcgataaagaacacgaattgctcaatgcatgaatctgtacccttcgggagggcactcacatgccgcccccagcagctcccctgggggctagcagaagtataaagtgatcactatgctgttttaataattatgtgccattttaataaaatgaaagggtcaacggccctgtttatattggtataattatttactcttatttggtataaagggttttcgtgtatctctatgtggatctaaataatacaggattgtgctagaagcggtttccaggccaccgttctcctgcctacatcccattcatggctgcttgcggtgtcactgggctaccgtgagatccaagttgaaattcagaagcctactttgatggtaggtttgaaattacgtgtcctacagcctcagaggcagacaggaggctagcaaagctttaaatgccttccttctctgcccccagccttctgtcccccttggaggagggctgtaggaagattccctcttcctgccaagccaccttccagtgagctctggatgaagctctggccaaccaaagacactgtccccacagcaggtgcctggtgggccacgtgttctcacactggtggaggagctgggcttctgtccaaggcacaaaccttaatattgggaagcagccatatttgcagataccactgtctccttttgtcctcttcgtggctggaattcaaaagcatgtatttctgaagcctcttgtgacattgtttttttttttttttttaattaaacagaaaagatatttgacatgca

SEQ ID NO: 2883 - DNA, 321 bp, Homo sapiens
  SIMILAR (106)..(297): 931254mologous to Homo sapiens unnamed protein product,accession number AK026180,Smith-Waterman Score=309.
atggcctcgactgtgcttgggaagtctctgcagaggctctcaccattgcccctggtgtgcttctccttccccggcttcctctttgctgtctgcactgggggcgagaatgaacctaaacgcctgaaaaaacaccttccccaaatcctgaaactcctgaaaccagatgaccggattctgattgtggggaccacacggcgtcccttcgatgctgaactccaatctttctgcaaagtttaccagaaaattattttggtgcccagaccagactatgcttccagatacggcaagtacccccagccccttcccatgcatgatagctga

SEQ ID NO: 2884 - DNA, 552 bp, Homo sapiens
  SIMILAR (1)..(201): 301254mologous to Borrelia burgdorferi conserved hypothetical protein,accession number AE001584,Smith-Waterman Score=82.
atggagcttgcaggactggaggatgctcagtctattcaatcactcagccagcacttattgatcaccaagctatttgatcaaccagtactattgatcaccaagctattgatcagccaatacttatggatcaccaacctattgatcagccagcacttactgatcaccaagctatttgatcagccagcacttattgatcaccaagctattgatcagccaggacttattgatcaccaagctattgatcacccagcacttactgatcaccagacaggcactgaactaggagatacagtggaaggactatggtctctggttacacttattagtggtgataatggtgacatgtacttgttggcgtacgttaagaaaacttctgcagtatacagatggccaataattactaccctaactcaaattctatgcgacctctgttttggtgctcatcaccacctggcagcttccctacgtctatacgttgaaaatcctgagacgactctacgtctcaaaaactattatctctgtctgagtgaagctcatcacaccaaaccataa

SEQ ID NO: 2885 - DNA, 603 bp, Homo sapiens
  SIMILAR (54)..(1): 501254mologous to Homo sapiens Human secreted protein, SEQ ID NO: 7293,accession number G03212,Smith-Waterman Score=64.
atggatccaaaccaagaagaaatctctgaattgccagaaaaagaaatcagaacattgattattaagctaatcaaggaggcaccagagaaagaagaaatttctaagcagcaaagcattcaagagaagacgacagatgactttgatcacgacaccaacacttacctgggtaagaacccagaggatttacagggcccatcaaccagaagcagcattttcagattcaaggcagaaagtatggtcatgggtaacaatttagtgaaaagcctgcactataaaccaagaagttcgaatgtcatgtcctctgtatcagtccattctcacactgctataaagatactacatgagaccagaaattatggttatctgctttcctgcatggaacgtaaatccttaaaagtagggcagaagtggattcatgcttggattctcagggcctggtttactcagtggtcccaaaagcaaacatctatagggtggtcacaaagaaggaagccaggggtaaaggatgttcttgcaaatcgttccttgattgtaatggatgaaaagaaaaaagaaatgggagaggcccactgcatcaccaactgcaacggaaattccctttga

SEQ ID NO: 2886 - DNA, 406 bp, Homo sapiens
  SIMILAR (93)..(167): 401254mologous to Homo sapiens ErbB-3,accession number U88356,Smith-Waterman Score=41.
cctgttggctagctgctgctcgaagtccccacaatgccgcaaaagctctccacaggtggctattatcctaatggagttctgaaaagccgtccaatcttcctggaagagggagttgggaggaatgtggtccagtttgcacttctttcgtatggactggagagtgctggtgaaatcagacacataccagaggcacagcactcatctggatgaggaggttgctctcttccatgtcgccatacttcagctggtagggtttgtatggatcatacacagcatccaccagctccgtgacttttaccagattgtgttcattggtatcctcacatccttctggtcccctccttcagctagttttattattactatttacagcctcatcctccttccctcttcctctagcacgaaa

SEQ ID NO: 2887 - DNA, 831 bp, Homo sapiens
ttaagccgagtcagcgctgctcgaggtgcagccagcaggttgtggttgcttgaacccctttttcccttaaagggtaataaagtaatttcccattaaaactggccatattcagccagggttaatctttcctggaggtaaattatattcttgcccatgggttcttggacagagttccttcttgtctgtaaaaaatgctctccctaaaaccgacccaggctcccgggggctgcaggaatcagatagatacttccccagctgtggaacaaaatcctgttggcctagctgctgctcgaagtccccccacaatgcccgcaaaagctctccacaggtggctattatcctaatggagttctgaaaagccgtccaatcttccctggaagagggagttgggaggaatgtggtcccagtttgcacttctttcgtatggactggagagtgctggtgaaatcagacacatacttggcaaagagggatttcagggctgacaacaggccgcaggtcccccaggccattggtgaatctggacgcatctgtcaacggctgcagacgccagaccaaacagcttgttcacggagtggcttcactactgcacacagtcaatcacttccccatgctccagaggcacagcactcatctggatgatgaggttgctctcttccatgtcgccatacttcagctggtagggtttggattggatcatacacagcatccaccagctccgtgacttctaccagattgtgttcatgtaggtgggggagcaaagccatctccaagcccttgacgaagtgggcggtggcgtcgcgcgcgcgtgtttcgacacgggaagtgaga

SEQ ID NO: 2888 - DNA, 942 bp, Homo sapiens
  SIMILAR (364)..(483): 371254mologous to Simian virus 40 viral coat protein VP1,accession number X53239,Smith-Waterman Score=68.
atgcatgttaaattccatggcggtcatggaaagactagaagtgaagtgcataactttaaactactacagaaaaagatgagtaaaaccagccaatcagcccaaaagaagaaagaggagagaaaggaatgtggaaatggtaacacaagtagaaatcacaacgaactggagtatgagagcagcgctggactcagtcagctgctcagttccagcaggggcagactccacccattcgaacctgctgcgttccaccccttgctgggggggatcatgcagtctttcctcttacaacttaaaaaccctggacgtaatgcaacaaacataggaaaattgaaagatggaaagaaggagaggcttctagggacatcaggactcgaggaacaacacagaggaataatgtcagccaggcccatcagagaactaaacttccactatcacacaacagcagggaggccaagtgagacagtgcaagggactcttatcaacatttcccttcccctctgtgctcatgccaactggtgctctgcaatacaactctcgcacaaaccagcagagttcatgcagatcctgaaagttaaagggatctcaacaagaccgctgtcacttcagatgccagctgcacctcaggggtccccagttttattacgcaggataaaaatcaggaccagccaagtggagagacacataggtgaatcctggggggtcctaagtgcagagttcccatgccttcaacccatgaaatcagagtgggtcaaatcaatgtgtttaccaggcagcgcagtgtatgctaaaggctctggaaggaaaacagaggtcaatggagacaagtatggcaatcctagtactgggaaagatgtaggaagcaaacctctgttgcccatagactttggatttgaggttgatgttgaaagtggagagttgctttccaggcagagtttgggatga

SEQ ID NO: 2889 - DNA, 753 bp, Homo sapiens
  SIMILAR (641)..(462): 351254mologous to Homo sapiens Secreted protein encoded by gene 153 clone HNHFQ63,accession number W88686,Smith-Waterman Score =74.
atggcttattgctgtttattggtgtttggggactgcagagaagactcattggccggagttgaatccacagcaaagggttggcatcatctggaggtgacttcactcacatgtctgcagaggacatggggcttggcttcaggacctataggagacctcccagttaccctgggattccaggtagcagagcactctcaggacattcagagctttgacttggtgatcaagggcaccatagaatctcgctgtctccttccaaccacctgtggtcggcatccccgcgttgtcactgcgacgcagaggcgagcgaggtcgcagcttcatggcctgatgccttcaggaagtattttgaagtcatcgtggctgtggattgggggatttcttgtttccactgaccttagcagtgggcatttccagacggtgcagcttgtggctaaagtgacaggaagatgtaggagctttcagtcttggatgaggattcgaactgaagggcttaggcccagctgtcttggagcaaaacatctgttgtggggtgagaagggaaaggagggatgtggcggcagaggagggcaaggccgaaggagcagacagcaccgcttcttggggagttgtgaaggcatcatgcggagggccgagcttagcagccaagtggaggacagcaccctccatgcctggattcgttactcgctcgttctcgatgttgagctgctggcatattgcagcacaactagagatgtacggatgcccccatcttga

SEQ ID NO: 2890 - DNA, 871 bp, Homo sapiens
  SIMILAR (398)..(436): 611254mologous to Human herpesvirus 4 nuclear antigen (EBNA 1),accession number M13180,Smith-Waterman Score=45.
gggtaccgcgtccggaattgccgggtcgacgatttcgtctccaggtgaaggatgcccggaggcctcggcaggaccgcgcggaaacgggccttctgcccaaaagatgctgcttctctccttattctttcccctcagaatctcgctgtctccttccaaccacctgtggtcggcatccccgcgttgtcactgcaccgcagaggcgaccgaggtggcggtaagcaaccgcggggcggggagggaccctgcgagcgcggactccacaccaagcctctgctcagcgtcaccccgcttgctgtgtcctcgcaggtcgcagcttcatggcctgatgccttcaggaagtattttgaagtcatcgtggctgtggattgggggatttcttgtttccactgacctgtgaggccgcgcacgtggagggaggcaccccgggtcctccggcactgtccggcctcgcctgtgtccctagtagcagtgggcatttccagacggtgcagcttgtggctaaagtgacagcaagatgtaggagctttcagtcttggatgaggattcgaactgaagggcttaggcccagctgtcttggagcaaaacatctgttgtggggtgagaagggaaaggagggatgtggcggcagaggagggcaaggccgaaggagcagacagcaccgcttcttggggagttgtgaaggcatcatgcggagggccgagcttagcagccaagtggaggacagcaccctccatgcctggattcgttactcgctcgttctcgatgttgagctgctggcatattgcagcacaactagagatgtacggatgcccccatcttgatcttacagaatcagaggtgcatccgcaagaaagagtcaagaacagacact

SEQ ID NO: 2891 - DNA, 723 bp, Homo sapiens; identical to SEQ ID NO: 865
  SIMILAR (407)..(303): 401254mologous to Human herpesvirus 4 epitope Cl3 (57 AA),accession number X07816,Smith-Waterman Score=50.

SEQ ID NO: 2892 - DNA, 639 bp, Homo sapiens
  SIMILAR (284)..(427): 341254mologous to Homo sapiens Human secreted protein, SEQ ID NO: 7640,accession number G03559,Smith-Waterman Score=68.
atgactaaggttatatggtgtcccctggggacccgtcaggaccaggtggaggcgttgggcactgtgactgtgactgtgactctccacttgctctcagaccggccatgtgggggcgctgctatagatcttgattgctgggcccaggatatcatttacaaggtaaaaactgttttcaataatgagtttgacgctgcatataaacaaaaagagtttgaaattgcacgcgtgaaggaaagaaatgttcgaattcgagaaattattttagatctggaattggaagaagcagtctggcaaccagaatttgaagactgtgagaagccagagagaacgcttgttgtgcaagatgaggaggcactacctaccttccccaatcccaaatgcagtcattctaatgttgggtgggaagctgcctctggagccacctggaatgtcaggtctctgtctcagtattcctctctgattctggctctttcccaggatgccagtacaagactccgagctctgatggacatgatgggaggagttctggaagtcaagaaggaagatattttgagaatggtgattcctcaacctgctttcatggcaaaacctgatgctgtgtggactgaagaagaaaagaaaacaattcaaagattatga

SEQ ID NO: 2893 - DNA, 1850 bp, Homo sapiens
  SIMILAR (354)..(1445): 281254mologous to Saccharomyces cerevisiae ATH1,accession number X84156,Smith-Waterman Score=324.
atggtttataagtggacagaaaaacactcactcacgtattcagccacgtatggtctggagtgctctgtagaacagcccgaagtgtacaccatgtctctgcacttgaagctcatggaatgtgttggaggagactcaagctccatgtgggaacagtgtggcccaagagccagcatggaggagggctgtcatgtacctggacttcctttgggtgccggcttttctgctggactaagattcatggaaagaaccccagggcaaggtgaggagaagcagctggtacagactgatgacgaaggagaggaccagaaaagctgcttgggtgtggtggaagtttcagtgtaagccaggccctgcgtggctccctctactacctgctcagtgccctgccccagcccaaggccccaggatacatctgccatggcctcagtcctgggggcctctccaatgggagccgtgaggaatgctactggggccacgtcttctgggaccaggacctctggatgttcccgagtatcctgatgttccacccagaagccgccagggccatcctggagtaccgcatccgcacgctggacggggccctggagaacgcccagaacctgggctaccagggagccaagtttgcctgggagagtgcagactccggcctagaggtttgccctgaggacatttacggagtccaggaggtccacgtcaacggggccgtggtgttggccttcgagctgtactaccataccacccaggacctgcagctatttcgagaggctggtggctgggacgtggtcagggctgtggccgagttttggtgcagtcgtgttgagtggagccccagggaggaaaagtaccacctgaggggagtcatgtcccccgacgagtaccattcaggggtcaacaactctgtgtacaccaacgtcctggtccagaacagcctgcgctttgctgctgccctggcccaggacctgggtcttcccatccccagccagtggctggcggtggctgacaagatcaaggtaccctttgacgtggagcagaacttccacccggagttcgatgggtatgagcctgaccctcgagtctgtcctggaacaccttccagtcagcggcacctccctgtaggagaggtggtgaagcaggcagacgtcgtgctcctgggatacccagtccccttctccctgagtcctgatgttcgcaggaaaaatctggagatttacgaggctgtgacgtccccccagggccccgccatgacctggagcatgtttgctgtgggctggatggagctgaaggacgcagtgcgggcccggggcctcctggacaggagctttgccaacatggctgaacccttcaaggtgtggacggagaatgcagacgggtcaggcgctgtgaacttcctgacaggcatggggggcttcctgcaggcggtggtcttcgggtgcacggggttcagggtcacccgagcgggtgtgacctttgaccctgtgtgtctgtcggggatctccagagtgagcgtctccggcatcttctaccaggggaacaagctcaacttctctttttccgaggactccgtgaccgtggaggtcacagctcgagcagggccctgggctcctcacctggaggctgagctgtggccatcccagtcccggctctccctgttgccaggacacaaggtctcctttccccgctcggctggccggatacaaatgtcacccccgaagctgcctggaagttccagctccgagttccctgggaggactttttcagatgttagggacccgctccagagccccctctgggtcaccctgggttcctccagccccaccgagtcactcactgtggaccctgcctctgaataa

SEQ ID NO: 2894 - DNA, 1967 bp, Homo sapiens
tgcagtgtgctggaattcgaaactttaactgtctatagggttgcttgtcatagttgaacattatttaattaacttattgactatatatgggtatacttttctctatagccattcacttttttaaagttttaattatttaattgacaaattagctattcattttccttcaaatcctgtttttatcacaatgtccattttacagctagacacaaaatttagtgggtccaaattgttcaatcacttctatgttatttgttcagaatagtggatctttgcttaattcacttctgttttaatcccatcatattcctttaggccaagaaaaggaaagctgatttggattatatttatgcttaatatcaacatggtttataagtggacagaaaaacactcactcacgtattcagccacgtatggtctggagtgctgcatgtagaacagcccgaagtgtacaccatgtctctgcacttgaagctcatggaatgtgttggaggagactcaagctccatgtgggaacagtgtggcccaagagccagcatggaggagggctgtgtgagcagactgctatagaatgctaaagttataatcctagctggtgtctcgttctgtttaaaaaaatcaaatttctgtatgtaattgacgtattggtccttatagtcagtaccatcaggtcttagattgttaagtcattttgctgccaccagaccagtgagagtcactcacttatttgtaatgattcttggggaagtttagtcaagagaatatccttgaataaagaagtacatgttttaagtattttcatcgtagtctagatgggctgtaaaacccatttccacacgagtataaatttaaaacagaaacatcaaggtgtcagcaatcatgattttgttttgcttgttcacaagtttgaaaaggtgcatgaggcaccaatcagtgacactggaatgctttaaggatggtttgtgactttaccccattgtgccttatcatttgtcagcaaacttactgggccaaacacaaatggctgagacactcctggcccatttcttgtcatcgctgccatccccaaagacagactctgggaaacaacttgggaactgcttcaagtccatgccaggtcatggcttcgtccgcctcccagcatgtacctggacttcctttgggtgccggcttttctgctggactaagagattcatggaaagaaccccagggcaaggtgaggagaagcagctggtacagactgattgacgaaggagaggaccagaaaagctgcttgggtgtggtggaagtttcagtgtaatgtgattcctagtaggcacatctgtgactcccttaaataaaaagggccagagatgaggggacgcctggtgaaaatggtgtttgctgtaacatcttggtatcattgtgggtaagtagaacaaatatttacatctgttatgaaaagctacctttagccgtagataaacattaaaaggaagactcagccccagagtatatttgatctattggttaactcatctgtcagcaaatggttaagtaagtaaaattaatttttccatttggtgtgtatttcacagggtaacaatgaagtgctccaatctgcttgtgagaccagttagattagtagttgcagttgagaccattcctcctgtatgtctgtacaagcaaattgaaacgacatgctcttctttgtactatacagaaggacacacctcagatcctctttttaaagcaggtaataaagtagctttttccttttgaaacatcattgtaaaacagtgctttttaaactatccatggtaaaggatgagttttaaaaattctaatcctttgcaggttggtagttttataaatacgataaaaatatagcaccaagattagattgttataaaagtttctaaacactttcagtttctgtacttaatcttgcagtgtggtaataaagacttctacactttagtagcact

SEQ ID NO: 2895 - DNA, 518 bp, Homo sapiens
  SIMILAR (35)..(259): 291254mologous to tomato leaf curl geminivirus C4,accession number Z48182,Smith-Waterman Score=71.
attccagtgtggcggaattcgctcacccctcctatggtttcagtcacagactacacttaggctacttctaaatatcttcccagctcacccttggctccttagctctaggcctttatatccaaccatgaactctttcagagtacttaaattcactaagaccaaaattgattccttatctcccccatgatcccttccttctccagccttccctgtgacagagagaagcatcttcatccactcaggccccaagctcaagcctttctctcctatgaccctgcctacaaccaacagtcctgttggctccccttcctcaaaagcttgaatttgctcacttccctccactttcatggccacctcccttgtcctagtcactgctacaattggcaggtcacaaatgcctcctattgggcttcccagtctctacttcctcaacccattttccgtgctgaagccaatctagtgaggtttctatgggtcctcgttggctcagcataaatccaagcttctagggtggcatg

SEQ ID NO: 2896 - DNA, 393 bp, Homo sapiens
  SIMILAR (314)..(48): 351254mologous to Homo sapiens Human secreted protein HUSXE77, SEQ ID NO:180,accession number Y86265,Smith-Waterman Score =99.
atggcgcggctcgggagcgcgccgcggccaatcaggagcggcgggagcggcgccgggagccggcgggcgcagagcgagctcgagtctggagccggcgtcggcgctgcggccgggagggatcgtggcgagagcagtgcggccgggtgggtatcccgcggccagagaagccggctttgccgcggcgacctttcggcggacgccggggaccctgcggaccgcggcgcaggtcattttggagagccagcagtttttccccctcgtgcagctgtggcctcggtactgccttcacttgatctattctatggtgaactaccacagttccctccagctcaggtttccaggaaacctggcctgaaatttcaaaaggtgcagcaaacaaaactgtggatgtaa

SEQ ID NO: 2897 - DNA, 972 bp, Homo sapiens
  SIMILAR (802)..(563): 341254mologous to Homo sapiens Human secreted protein encoded by gene 22 clone HMSJW18,accession number Y02671,Smith-Waterman Score=68.
atggccacacaaccaacacggcttgctggtgtcacagtgtccctgttacatggacctggcagtgcaccaggtgacatggaggccacacactacagggtagtgattaagaatggactcccaagcccctaccctttccccgacctctaccaggcagccctgctgacatctgattcctggggcaggattgagagatgtcccttgggagatcaagttggccagaggggaggtccgaagggagttggcggcctgcagagcaacaagggcctgcctggaattaatggggtcatcgccctgctccccatcgcccaaaggaggaggagccacagccagaagacacagatgtctgaagaaatgagattgcagctcttggcaactaccattttactttctgtctttatgaatttgactactccagaaaaggggaaagagggcctctcccagggggagatcagtgtacaactggaggagtgtcaagaagtgcggccaagcaagagaagatgcccagagcaactgcacagggcctccatcatcctgcagagcccaccgccatggctcatcagcccttcaatggcccccggtgatgacccagtagagcggctaagaaaacccatatgcttctgcaaagcaggttggccccagaccactaaatacacaccacctgaagatacagcaaaacccagaagtggtgaccacagcaacatgagtacacacactgcagactgtcagcagcaggagggtcatgtgattgcagagggcagcctgacaagcccatgtgattccctccacattaagtggaaaacactgtctccactgagaaagagagatgtttctagagtcaattccagctgccaccgggcctgttgtccatttcctggcacgtgctcagtcaatacaaataaagacgatgagccgacactgcgcgtggtcgtgaccatgttcccctggattgccctggacttggtcttcctttag

SEQ ID NO: 2898 - DNA, 2074 bp, Homo sapiens
  SIMILAR (57)..(1490): 1001254mologous to Homo sapiens synapsin IIb,accession number U40215,Smith-Waterman Score=2514.
ctccctccgcgccaccagaccccgtagccccgcgcgcccccagccctttaagccagatgatgaacttcctgcggcgccggctgtcggacagcagcttcatcgccaacctgcccaacggctacatgaccgacctgcagcggcccgagccccagcagccgccgccgccgccgccccccggtccgggcgccgcctcggcctcggcggcgcccccgaccgcctcgccgggcccggagcggaggccgccgcccgcctcggcgcccgccgcgcagcccgcgccgacgccgtcggtgggcagcagcttcttcagctcgctgtcccaagccgtgaagcagacggccgcctcggctggcctggtggacgcgcccgctcccgcgcccgcagccgccaggaaggccaaggtgctgctggtggtcgacgagccgcacgccgactgggccaagtgctttcggggcaaaaaagtccttggagattatgatatcaaggtggaacaggcagaattttcagagctcaacctggtggcccatgcagatggcacctatgctgtggatatgcaggttctccggaatggcacaaaggttgtccggtccttccggccagacttcgtgctcatccggcagcatgcatttggcatggcggagaatgaggacttccgccacctgatcattggtatgcagtatgcaggcctccccagcatcaactcactggaatccatatacaacttctgtgacaagccatgggtgtttgcccagctggtcgctatctataagacactgggaggagaaaagttccctctcattgaacagacatactaccccaaccacaaagagatgctgacactgcccacgttccctgtggtggtgaagattggccacgctcactcaggcatgggcaaggtcaaagtggaaaaccactacgacttccaggacattgccagcgtggtggctctcacccagacctatgccactgcagagcctttcattgactccaagtatgacatccgggtccagaagattggcaacaactacaaggcttatatgaggacatcgatctcagggaactggaagacgaacactggctctgcgatgctggagcagattgccatgtcagacaggtacaaactgtgggtggacacctgctctgagatgtttggcggcctggacatctgtgctgtcaaagctgtacatggcaaagatgggaaagactacatttttgaggtcatggactgtagcatgccactgattggggaacatcaggtggaggacaggcaactcatcaccgaactagtcatcagcaagatgaaccagctgctgtccaggactcctgccctgtctcctcagagacccctaacaacccagcagccacagagcggaacacttaaggatccggactcaagcaagaccccacctcagcggccaccccctcaaggttgtttacagtatattctcgactgtaatggcattgcagtagggccaaaacaagtccaagcttcttaaaatgattggtggttaatttttcaaagcagaaattttaagccaaaaacaaacgaaaggaaagcggggaggggaaaacagaccctcccactggtgccgttgctgcgttctttcaatgctgactggactgtgtttttcctatgacgtgtcagctcctctgtctggttgtttacctgttcctgttcgtgcttgtaatgctcacttatgttttctctgtataacttgtgattccagggctgtttgtcaacagtatacaaaagaattgtgcctctcccaagtccagtgtgactttatcttctgggtggtttgatagtgtttttaaaagtaatatataatgtggggtgaaatgggagtagggggtggacaggggagaaacgaaaaccacaaaaagaaacccaactcctctcctccccaagctcagttaaatcccccaccttcccaacctttccctccaccagtgtgcttgggatcttcaatgaactgtgctttcgcttcttctgcatgactattataactagatagaacattaagagatttcaagatcaactccatagcttctaccactgaattgaggcatcaccttt

SEQ ID NO: 2899 - DNA, 483 bp, Homo sapiens
  SIMILAR (2)..(91): 1001254mologous to Homo sapiens synapsin IIb,accession number U40215,Smith-Waterman Score=168.
cccacctcagcggccaccccctcaaggttgtttacagtatattctcgactgtaatggcattgcagtagggccaaaacaagtccaagcttcttaaaatgattggtggttaatttttcaaagcagaaattttaagccaaaaacaaacgaaaggaaagcggggaggggaaaacagaccctcccactggtgccgttgctgcgttctttcaatgctgactggactgtgtttttcctatgcagtgtcagctcctctgtctggttgtttacctgttcctgttcgtgcttgtaatgctcacttatgttttctctgtataacttgtgattccagggctgtttgtcaacagtatacaaaaggaatttgtggcctctcccaagtccagtgtgactttatcttctgggtggtttgatagtgtttttaaaagtaatatataatgtggggtgaaatgggagtaggggggtggacaggggagaaacgaaaaccacaaa

SEQ ID NO: 2900 - DNA, 1647 bp, Homo sapiens
  SIMILAR (1258)..(1422): 941254mologous to Homo sapiens synapsin IIb,accession number AF077737,Smith-Waterman Score=284.
  misc_feature (1)...(1647): n = a,t,c or g
cactgtggtggaattccaggccaacagctcacaagtgttgagtcactcaatgtctttccttcctcagctttccatcctgctgggacttcaggagctcctttctccagcttgtctgccgaaagccacaggatggcattttaaagttacctttgacaaaaacccacaaaccctcatccatgggcttggtttctgtcacaggccagtgatttcctttccaatcatctcaagagctaatatttaccatttctgcaaggaccttgctggaactaagcaatatacagaaggcatggtataacccagaccagaattccctgcacatgaaactgctatgcatcaggtgacaggaaaccacacaacaatatcttctccactgatgcacgaaattctaacattagacctcccttcctttggattgatatttattttttaaatagtagtaggatgctcacttacattgcctaacactttacagtttacaaagcacactctttagtttaagcctaacaatccttatttaagatgtcttgggctggcaaatgtatctttgtttcacatatcagcaaagagaaggcaactgcnnnnnnnnnnnnnnnnnnnnngctaagcaggagagctggatcttctgggccccaattcaaggagttctccacaatactgtgcaccatgcccttttggtgctcccacatcagcagaggcgaagctaggcacaagcactgcacttcacattcttacctgtttgaatcaatccaacttcctgaggaaagctctgcctctcagtctggccatgagttcctgctgtgggctggctccaggccagcctttggcagtgacgccagagtggccagacttctgtggaattcggcatcccaggatgctctgggtgactggaaacagatcccatgggccaagtgctttcggggcaaaaaagtccttggagattatgatatcaaggtggaacaggcagaattttcagagctcaacctggtggcccatgcagatggcacctatgctgtggatatgcaggttctccggaatggcacaaaggttgtcctttattggtctttctggcctcaggatcattgtgactgtctccagagttactacctctggcccaaagaggtggtttctaagaactggattggtgacaggaaaggccagactggaggtgtctgggacctaacaacaggaaatacgagcttgtccattctgaagatcaagaaagaagacagaaaaagagatgtccatccgggtggggagtccttccggccagacttcgtgctcatccggcagcatgcatttggcatggcggagaatgaggacttccgccacctgatcattggtatgcagtatgcaggcctccccagcatcaactcactggaatccatatacaacttctgtgacaagccatgggtggtgagtgaggcccccttcccccaagtaaaaggaatgattaaacttttggaaaggcctgagcccagtgacaaccaagggaatagtccaactcaggtagtgacagagtcctaccaagtggttcagcaacctgaaaatgaaatttatcctcatgcatgtgaatcaaatacttatgagctagaagtgtcttggagatcatcaaagcctaaccctaattctgaccttaacctttcatga

SEQ ID NO: 2901 - DNA, 1305 bp, Homo sapiens
  SIMILAR (561)..(442): 391254mologous to Sturnus vulgaris ATPase subunit 8,accession number AF168451,Smith-Waterman Score=70.
atggtgtttgttaagaggcggctgcttggtgcccgttccccagccctggccgggagatggcaagatgaggcactgaagctgaggcctggtttaatgaactgcctcagcatctgctcaggtgctgcttgtcagagggaagagaacaaactgccctggaatcacaagttatacagagaaaacataagtgagcattacaagcacgaacaggaacaggtaaacaaccagacagaggagctgacactgcataggaaaaacacagtccagtcagcattgaaagaacgcagcaacggcaccagtgggaggggcctcatgcccagtaccactgaagggtcccaatgcatcatctcaaatgttggccaagagcagcttacgatgttctcctcccagagaattggtattcccagagagggttacagaagactatgtggcataagagcagaaccagggccagggctccgggcctattccctgtggggcttggctaccatgggatctgtttccagtcacccagagcatcctgggatgccgaattccacagaagtctggccactctggcgtcactgccaaaggctggcctggagccagcccacagcaggaactcatggccagactgagaggcagagctttcctcaggaagttggattgattcaaacagagttccagaccagcctggaccagctacagagtcttaaactcagcaagacccctagggttattggacctgtgcagagatgtcttgcaggtataggctttcaggagcttggcaaggagagtgtgccgcttccatcaaagctaattgggctggtatcctgctacgctgaatctactgggcttagtgatcagagaagccagggaggaaggagagagctggtgaagctcaagactcctccagacaagctggagaaaggagctcctgaagtcccagcaggatggaaagctgaggaaggaaagacattgagtgactcaacacttagctcatctcctggagtggggccctcccataacctagaacccaagaaatatcccatgggggcagtccctgagtcttctgggggcactgaggggcaggtcactcaaggtcccatggctgcacacagtctggatctcagcatgtcaggcttggaaggagattttataagttacctgctccaacagccccagtccccagccctcccctttcaccatgtgccttacaagctgctcatcctgctcctgcttgaacatcagcaacaatgtggcagccgcatgccgtttctgagtgttagagagtttactccctacactgggtcaaaacctgtctgctaa

SEQ ID NO: 2902 - DNA, 639 bp, Homo sapiens
  SIMILAR (462)..(271): 351254mologous to Homo sapiens Secreted protein encoded by gene 40 clone HROAE16,accession number Y01422,Smith-Waterman Score= 72.
atgagacctgatatttaccaagttccaacaagacatgaagataatgatgtggaaatggatgaactgggcacacagtggtgtgattcaggcaagttgcttagcatctccaatctctatgtctttaccggtaacactgggatcatgatgccctactcaggaccagagagctctgtggtgacaactgaaggagacccttatggcagagtggctgagtggacagatttgcacacaagcattgcacctggacaaacaggactcaaacttgtctgctccaagggcaatattgctccacaggatcattttactggctgcatcctcagccatccaacagagaaattccttctcaactcagtgtctgtaaaccccaagaatgcctcttgcctccagaactgtgagagaaaaaatttctctcgttttgagccatccagtttgtggcaatttgttatggcatccgtaggaaacaaacaggaaaaaatggaaaatgagagtgcattaccaaaactcagaaagattataagcactgttgagaacttagttgaggttggtgatcatgaatttatgttggcaataaatgtacagcagcccaggattaactgtgaaaggatctatgcctcgtgtcagggaatcatccagatttga

SEQ ID NO: 2903 - DNA, 1108 bp, Homo sapiens
  SIMILAR (416)..(697): 701254mologous to Homo sapiens Human membrane channel protein -2 (MECHP-2),accession number Y70452,Smith-Waterman Score=355.
acactctcgttttggggatatcttagagactgggaaccagagagcacaaacagaggagatggattcccacatcttcaccatcataggcctcgaggaggagagattgccgatatcgaagagaaattactctgctctgtggatctcattggcacaggttcctgctgagtctgaggggaaaaggggattctggaaggcggggaaatggatggatcctgtggagaggccagacagcttccgagcagctgagaaagaaggaagtcagccaagatcccctgcatctccactgaacaaccaaggcacccctactccggcacaactcacaaaatccaatgcgcatgtccacactgatgtgggcagccacatgtacaccagcagcctggccaccctcaccaaataccctgtatccagaatcagaagactttgtgatgacctcagagaaaggatcacgctaagtggtgacaaatccttggtagaagaagtgtttccagagatcggcgatgtgatgtgcaactttatcagtgcaggctggaatcacgactccacgcacatcgtcaggtttccactaagtggctactgtcacctcaactcagtccaggtcctcgagaggttgcagcaaagaggatttgaaatcgtgggctcctcagccactgcgctggtccaggacaacctcacctcctgcttgacggccacagagcttctgctccactcctgttcctctgtagggtgcagccctggaggtggaggaaatgggtggaatatccatgaagattcctggaaaaaggtggagatttcttggaactgtggtgccacccatttgtacaccaaatatggggattctcagaaccgtcataacaccgattggcatttagtacctgtggatttttcaggtgcacagtgcaagctgtcgatggagctaccattctggtgtctggatagtggtggcccacttcttacagctccagtaggcagtgccccagtggagactctgtgtggggactctgaccccacatttcccctccccattgtcctggtcaaggttcttcatgagggcttcacccctgcagcagacttctgcctggacatccatgcatttccatacatcctctga

SEQ ID NO: 2904 - DNA, 1313 bp, Homo sapiens
  SIMILAR (304)..(1062): 991254mologous to Homo sapiens Human membrane channel protein -2 (MECHP-2),accession number Y70452,Smith-Waterman Score=1317.
ttccttacatcctccccaaagacagccaggtcgggcccgacgtgaaatccgaggctgcgcccaagcgcgccctgtacgagtctgtgttcgggtcgggggaaatctgcggccccacttcccccaaaagactttgtatccgcccctcggagcctgtggatgcggtggtggtggtttccgtgaaacacgaccccctgcctcttcttccagaagccaatgggcacagaagcaccaattctcccacaatagtttcacctgctattgtttcccccacccaggacagtcggcccaatatgtcaagactctctgatcactagatcccctgcatctccactgaacaaccaaggcatccctactccagcacaactcacaaaatccaatgcgcctgtccacattgatgtgggcggccacatgtacaccagcagcctggccaccctcaccaaataccctgaatccagaatcggaagactttttgatggtacagagcccattgttttggacagtctcaaacagcactatttcattgacagagatggacagatgttcagatatatcttgaattttctacgaacatccaaactcctcattcctgatgatttcaaggactacactttgttatatgaagaggcaaaatattttcagcttcagcccatgttgttggagatggaaagatggaagcaggacagagaaactggtcgattttcaaggccctgtgagtgcctcgtcgtgcgtgtggccccagacctcggagaaaggatcacgctaagcggtgacaaatccttgatagaagaagtatttccagagatcggcgacgtgatgtgtaactctgtcaatgcaggctggaatcacgactcgacgcacgtcatcaggtttccactaaatggctactgtcacctcaactcagtccaggtcctcgagaggttgcagcaaagaggatttgaaatcgtgggctcctgtgggggaggagtagactcgtcccagttcagcgaatacgtccttcggcgggaactgaggcggacgccccgtgtaccctccgtcatccggataaagcaagagcttttggaactaaatggaaatatttcttatgcaaaaaggaaaacacacacaaccaataactcaaacaaaaaagggacatttatgtgcagttgggacagcaaaccaagtcctggacgtaaaatcgaataaaagacacatttatatccaatagagaccacacctgtattcatatgggaacaattggaatagtgatatcctcaaggtgtaaaaaatatataaatatatatatatatgtcaaaaggtaggaaatgcaaaaaaaa

SEQ ID NO: 2905 - DNA, 708 bp, Homo sapiens
  SIMILAR (2)..(79): 651254mologous to Homo sapiens Peptide sequence derived from a human secreted protein,accession number Y40039,Smith-Waterman Score=87.
atggatgcagctggaggccattatcttaagcaaattaatgcagaaacagaaaatcacctactacatgttctcacttctcctcaacgtcacatggatctggaaagcagggagactggactacggagccagccctccagggttggaactgagtttgaatctcagcttgactacttactaggatctaaggcacatcatatgtctgagcagttcagcatcctcactcacaagtccaaggctctcagcaatgtggaagaagatgtgattcctaaaattaccacccttacacacagtgacacactcaccagaaactttattcacatttgttctataacatttcagcacagttcagaccttccgctgagccagtgtgaggtcagggtgttgaggaagcgagtccctgcagtcagactccagctggctgtcgtcctgcttctgcttattccacagaatgagtctgagggattcctcctgaccagtcattacaaaaattcttggagcatgagcaagactgagtctgtgtttggattggaggaagggactcatcaaacagacatggctaaatctgaattcaacaccccaaaacctgtcctacctgcatcatctatcttggtaaagggctccacccagatacctaaggacagcattcaagaattcactctcttcttcctacctgcatattccatcaacagtcctactaattcagcctaa

SEQ ID NO: 2906 - DNA, 452 bp, Homo sapiens
  SIMILAR (289)..(330): 641254mologous to bacteriophage lambda Rz1 protein precursor,accession number U37314,Smith-Waterman Score=44.
  misc_feature (1)...(452): n = a,t,c or g
tggaattcctgaagcagccacgggatttctgttgtgtctgcgtggaagccaaagagggtcacctgtctgtcatggcagcccagtctgtgtatgatacatccatgccaagacccagcagaaaaatggttcgcggggagatcctgcccagtgcctggatcttgcagcccatcactgtggaagggaaggaagtcaccagagtcatctacttggcccaggtggaacttggtgctccaggcttcccacctcagctcctgagctctttcatcaaacggcagccactggttatagccagactggcttccttccttggtaggtagcatctcaccgtcaagatggtgctgctgagatgcaggcccaggctgctcaagagagacactgtggcagctccttgttactttccataccacagtgcaggaaaagctgatgctacctgctgtggccgattggggcan

SEQ ID NO: 2907 - DNA, 957 bp, Homo sapiens
  SIMILAR (137)..(394): 371254mologous to Homo sapiens Vpr binding protein B29-1 amino acid sequence,accession number W68196,Smith-Waterman Score= 79.
atgggcaacagggatttggccaagcatgtcgtggacacttctatggctgatgtaatggctgcttgttcggataatttgcacaacctcttcagctgccaggcaactgctggctggaactatcagggtgaggagcaggcggtgcagctttactacaaggtgttttctcccactcggcatggcttcctgggggcaggtgtggtgtcccagccgctgtctcgtgtgtgggcggctgtcagtgaccccactgtgtggcccctgtattacaagcccatccagacagcaaggctgcatcagcgagtgaccaacagcatcagcctggtgtacttggtgtgcaacaccaccctgtgcgcactgaagcagccacgggatttctgttgtgtctgcgtggaagccaaagaggtgcctgccttggtggtaaagatgttgtgggaagaacttgggctgaagtgtcgtgagaaacaatctatgtgggcctcaggtcctctaggggaaggagggcaaattggggctggagccaggggtcacctgtctgtcatggcagcccagtctgtgtatgatacatccatgccaagacccagcagaaaaatggttcgcggggagatcctgcccagtgcctggatcttgcagcccatcactgtggaagggaaggaagtcaccagagtcatctacttggcccaggtggaacttggtgctccaggcttcccacctcagctcctgagctctttcatcaaacggcagccactggttatagccagactggcttccttccttggatgggccctaccccaagttactggtttggtagccccggagaaggaccagagaatttgtgttaacaagaagtcccaggggaccctgaagtttgctggtctggggaccacattttataaacagctggctttggaacatggcattcagaacaaattggatttaaaggataaagataaaggcctttga

SEQ ID NO: 2908 - DNA, 414 bp, Homo sapiens
  SIMILAR (147)..(233): 371254mologous to Torpedo marmorata acetylcholinesterase (65 AA),accession number X13173,Smith-Waterman Score=58.
  misc_feature (1)...(414): n = a,t,c or g
gaggacttcatcaaaggcttgctgtatgacttacagtgtggacattaatttttaagaatgatttgttatatagttagaacggaagagtttttctacctaaagaaatgagaatctagaatttgtgaaagggctgaatgttcctatcttgctgcttctgggacaaacttttccctgacatgtaaaacgcctgcaactgccatgaacaggaaagaaatggaaatggtactgattcactcatcaactccaggcaacnnnnnnnnnnnnnnnnnnnnnnnnnnnnnnnnnnnnnnnnnnnnnnnnnnnngaaataactttattcgcagcctaacactttgcactgcattcagcatgacttagaatttacttttggtgttgtccagctgctgccaaaaattgggtagaatcagattggtt

SEQ ID NO: 2909 - DNA, 692 bp, Homo sapiens
  SIMILAR (500)..(577): 411254mologous to Homo sapiens keratin associated protein KAP2.2,accession number AJ302536,Smith-Waterman Score=62.
  misc_feature (1)...(692): n = a,t,c or g
gtgctatgtcatcacaggcttgttgtatgacttacagtgtggacattaatttttaagaatgatgggttagaaagttagaacggaagagtttttctacctaaagaaatgagaatctagaatttgtgaaagggctgaatgttcctatcttgctgcttctgggacaaacttttccctgacatgtaaaacgcctgcaactgccatgaacaggaaagaaatggaaatggtactgattcactcatcaactccaggcaacnnnnnnnnnnnnnnnnnnnnnnnnnnnnnnnnnnnnnnnnnnnnnnnnnnnngaaataactttattcgcagcctaacactttgcactgcattcagcatgacttagaatttacttttggtgttgcccagctgctgccaaaaattgggtagaaacagattggtattctttgttggtgcctgtgaattgtacgccagtggtacaaaggtgatgttgttccttgctgagcacttcgtggaagaaggcaaaactttgatcatctgcccttgcacttgggcagtgttgaaggtgattggagtacaagtgccaatttgcaggaacaattgtaaacaccttttgatacaaatggccatcatcccatttttactgattaggaaaaactttgctattaataggtgcacagtccatttcagggataattggtaaagaactgagtgcaccg

SEQ ID NO: 2910 - DNA, 1044 bp, Homo sapiens
  SIMILAR (787)..(1041): 301254mologous to Mus musculus ARL-6 interacting protein- 5,accession number AF133912,Smith-Waterman Score=82.
cttcttatgtattcttagaccagatgaagtggatttttcccttacaaaggaattcggaatgtatactaaggaaaccattcccttctgggatccaatctagtccttgtttgggaaacaaaatgtgaaacatatccaggtggctgaaagagaagagacatcctgacaatactcttcagaaggctccctggatcctcccttcctccacgtcattttaccagcccttgaaaatgtacttttctcccaaataaggatacttatattcgcattctgtaagcagtcctagtcttagtgagagaaggcatgcgcataccatcccaagcatgcgctgcagaacaagagatcagcgtgcttcccctcaaaggcctattcccacgggcctttcccgtgtcccctcttgtcaccactactcatatctctatatttcacaccaaagccagtggaagccaatgaaagttccacagtctgcctagattccggtgcttggtcagaacaatcggaggacctgggctctggcaacgtcatggaactgccatcctagtcccagactgcacatcactggatgtcctgcccaatatgaaacctggaatcttttgcaaagtccgtgatactttgaaacacgaaaggctggaagtgtcattagctgggaaggatgaatgcagcagctattggaaggataaacagaaggtccagagagaagaggacctggaaaagactagcattttggagactgggaatggtgactgggaggccacaagagggctgcctgaagaatgtgctggaatgagggaaagagattgtgcagaagcacaggcagctggacttccagaggaacacatcagtgggggaacacacaggcagctgaacatccagaggaatgcaccaataggcaccagcacgccagtaggccaccgatcggcagaagcagaaggacatggagtttggctggggcagttggaggagagcctgggccaccaagagcccgactctaggggaaaaccatctcccttctggctcccccatctgctgagagctacttccacttaa

SEQ ID NO: 2911 - DNA, 486 bp, Homo sapiens
  SIMILAR (448)..(332): 391254mologous to Homo sapiens Human secreted protein, SEQ ID NO: 6996,accession number G02915,Smith-Waterman Score=65.
atggcaccagaagatttggcgtctggtgagggctcatctcctgcatccaagatgatacctttttgctgtgtcctcacatggcagaagggcaaaaagagcaaagcaggctccctcaagcccttttataagggcactatccccattcatggagcattaggattacaggcattagccatggaacctggcctgtcccacacgttcaagggcttggacagtggtgcccttgcttatacgatgacttttcagcttgtttcaacacattcagtgtacacatgctcagattcaatggatttacaggctaccttatctattttaaccaaacaaaccctcaccaaatggactaaaccctgcaaagacattgagatgaaccacattagcaattgtgccaacggcaaacaaaaggacaacggcagagttgagagctgacgttttctcctttcctacattctgaggtgaaaacaatcagatattgcaggagaatccatt

SEQ ID NO: 2912 - DNA, 403 bp, Homo sapiens
  SIMILAR (320)..(216): 481254mologous to Canis familiaris D4 dopamine receptor,accession number AB030235,Smith-Waterman Score=78.
atgctgactctcctggatgggctgccatcagggatcataggtctcatgagcagactgtcaccggatgtccacctaacccataaatatcagccctctgtgcaccaggagcttcctccttggaatgcagccggactttataaaaagcaaaatgttcttattccacatgtgaagtgcctgccacgaaaccaagtaccaatcgaatgtagccactgtcaggggggaggtggcagtggggacagtgtgcaagaggacgatgcgggcaatccagcagggcttctcggaggaggagtggcttggggcgagcctgctggacctgctggtctggaagtgtttatcatgctgtcccttctgactcgcgttgtatgcccctgtcctccttaggcttgctgagcctccaagtact

SEQ ID NO: 2913 - DNA, 301 bp, Homo sapiens
  SIMILAR (4)..(117): 731254mologous to Homo sapiens Human secreted protein, SEQ ID NO: 7795,accession number G03714,Smith-Waterman Score=165.
gagatgagatcttggctatgttgcccaggctggtcttgaactcctgggctcaagtggtcctcctgcttcagccttccaaagtgctgggattaccgacataagccaccgtgcctggccttaatgtttcttttctagacacgtgagatgactgagttcttgaatgccctccagaaattaaaccaagaccttttggaacattcttgggaggaaggtaacaagcagattcccgaaggtgacaatggagggagtagaagccttcagcccaggtccagaggcacggatctgggaagggagctcatcc

SEQ ID NO: 2914 - DNA, 1644 bp, Homo sapiens
  SIMILAR (866)..(678): 341254mologous to Homo sapiens Hepatocyte nuclear factor 4 alpha polypeptide (exon 8 product),accession number W71571,Smith- Waterman Score=77.
atgagcagagaccacaggctgctgtgcctcctgggcctctgttgtgtggcagatgcttccaaacagcccttcaggaaatctggaattcccagaggttatacattgcacctgaggccatctggctacaatccaaactctgggtgcggctggcgccaaagctactacaccatgctgccttctaagctgcatttcatctggaaccgctgtggctggcaggccgagcctctgaacactgcaattcaggttaatcatgcagacctgctggagcacgcggggccgaggggaggcccacactaccgctttccccactctggggacggggagaacctgatttgtcttcggtccacagctagtgtgtgcaagggcccaattcaggtccagatcggcgtgctgacaaggactgtgtttggggctgctcccctgcagacagagccccatgggcaggccctgatgggcggtcagaggacacaagacaagagccagacacgtgagatgactgagttcttgaatgccctccagaaattaaaccaagaccttctggaacattcttgggaggaaggtaacaagcagattcccgaaggtgacaatggagggagtagaagccttcagcccagatgctattctgacatgaaacctttcactcaaatatttctctacaatggagtctctccacagtcgggccatggctccactgtggaagatgtggagtttgcagcacggcatggtgtcaaacagccacatgcacagcagtcctgcaggcactaccttgcagctgccaccatgatcgtggacagaacgctcctcttggccccaggctgttttcgatgcgggatccatgacacgcttctctctccaacagatccccgcaacctagccaggtcagatgccgtccgaggaggcaagaaaattctgatcgatctctttgtccccgaacggcaaaactggcagagatcccacccaaagtccccagacaaccaggatgcctctacactccaaggagcaaaccctgtggagatcttattacatttactttacagagaaagccaaggatttgaggttaagcagtattcccatgatcacgctgcccagggacacacagatggaatctctctcccgagaaacctgaagcgggcaagacaaacacaacgaaccttgctgcaaaagctaaaacgacagattccggagacatttcggaatggtggaattgaaagaaacatcagggcaaacacagttggtcactgggtcgaggatgaaaaaagcaccgaacggaggccgccccaaccaaccaggcgccggaaaaagctctctcaatttcatttcatgggaccgtgcgattcttacgcaaccgtgccaattcgtgagacaaaacagacatcgccaggcccgactgtgtcctggcacgggcctgaggctctgctgatccagcgccttatctatatttggtacgtgagtccccacagccctgaccaggacctgcattgggctctcaggatgtcccactgggtactcaactctcgttcagaacatcagctccacgaggccaggactatgacctgcctccccggcacctgggaccgtgcccagcataatgagaacactcgatacacaaggcatttccatgagtccttgtgcaactgtaaataa

SEQ ID NO: 2915 - DNA, 906 bp, Homo sapiens
  SIMILAR (784)..(900): 611254mologous to Homo sapiens Human immune system molecule, ISMO-3,accession number Y44722,Smith-Waterman Score=121.
atgccaccactatcagagaatggggaaagagtggtgttggtgattgaagactgtttttcctacctcttcagtacctctttcagttatgtgaagttaaagccagatactgggtcactccccacactgctgccaaggcagctagaggcagcaaagctggacactgctgggtcaggctggttcaggctctctagggcaggtacaggtgctgaccttggtgaagttctggggcagctctcaggccactgggacaaccgtccagggaagggcagaggcatctctccagagccacagagccagctcagaggaagaggggtggcctggggttttcagcgcagtagggagctgtggggcctgctcagctcccacaccctgatctggtgggtcttcctcctctcagtgtctggctctggcaacaggcccaaccagttaggctacttccaagtcatctatgcccagatcactgagccattccaggcattccagagtataaaattccctgtggcagaaagccctggattccgtgaacccgactgcgaaatgatgtctcttttccccagaaccaggaagtcaggccagcacctgacagatgcctgtggcgccagcagctcgctgagcctccacacgattgtaattcgcttgtttctccggcctccaagcttccagggaattagaaagtggaggcggcttatgggatcagatgagtacattcgcagatgggggaaaaaagtgtacctgtcagcttggaagccagagggagacaaagggataaaagcaaaccctgtccagaagaaaaaagaaaaaaaaatagggcaaatgaaaaaggaagacaatgtccagatcaaagagttaaatatggacacaagaaatgcaagcagctgtaaagtgaaagatcaagaaccactctga

SEQ ID NO: 2916 - DNA, 514 bp, Homo sapiens
  SIMILAR (300)..(4): 301254mologous to Nicotiana tabacum extensin,accession number X71602,Smith-Waterman Score=96.
aggatagctctttccctgtggcggaattcgtggggaggaggcaggacaggccctgtgagggcagggcaaagtgggagtcagcgttggccaaagcgagagagccccaggcagtggagcctttgatgtcaggcctgaaggcagtggggactgtcttataattttatgctgagatgaaaatgtatgactgaaaaattggtctggtggcaggaggtgatcagagtgggtggccgcaagaggcttcctggggaatgggcttcctcagtatccgggtgcagcaggtgggccagaggcgacccatggcagcccccagtgtcaacgtgagcaagtgcaggactgtggacaagactgtgatgccatgcccggggcagagaagatgatggaaaaggagaagttgccccagatccagtggctcacagaagcactcttcctgaggaagagcttgttcttgaagtttgcacccacagcttctcctaggcgatgggcttggagagctgtggtcagcatcaagagctag

SEQ ID NO: 2917 - DNA, 993 bp, Homo sapiens
  SIMILAR (785)..(880): 501254mologous to synthetic construct anti-human C3a receptor single-chain variable fragment antibody heavy chain,accession number AY008751,Smith-Waterman Score=78.
  misc_feature (1)...(993): n = a,t,c or g
ggatggtgagtttccagctgacccacaatgacgtatttaactcacagtgaaactcagctctgcgggtttaatagtttccttttatttctaagagcaagggagcctatgtttctaataattggacatgtctggaactgtccctaacatttgacagttttttcctccttgccagtgttaaggagattctttcttcctcacttcagagacagcttaatgtgttgtatttggatgtagggatgtgtcagttacctattgctacatgacaaccgaattctaatttaatggctgaaaacaacagtcatttattggttcacagctctgtatgtttgcaaattggtcagggctcaccctgtgagtgcttctgctggtttctcctttcttgtgcagttacaattcattggcaacttgatggagttttgtggcctaatagtgtctccctcagatgcctcgtggttggtttcagctgtcagcttggcctttctctacatgtggtctcttatccccaaggaggctagcctgggcttcttgtctcagagttccaagaggaagtttaaaggtagtttttacgggagatacagattggactatgaagtacttaagcaagaggtccctttttccacacccttgtacgggaaggttttggaaccgccggagagtaaggggaaggtgtcccattttgatacgaatatgccggctccaagccccagagtgttgattttagcagtagtgggcacaggccacgcggggttcacattagccggggccgccatacaacgcgttccgttgtacccacacttcctcctccgtgacgagncacagtgtgagctcagtgaatttgaaaccagtagggacaggtctgtggtggttggggttgccatggctgttgttaagaatgaagacacaaacaagcttgtatatgggcacggctgctgctgctgctgctcccccctgatggccgttgttgattttcagagaaagaaaagtggattctga

SEQ ID NO: 2918 - DNA, 379 bp, Homo sapiens
  SIMILAR (246)..(10): 511254mologous to Homo sapiens putative p150,accession number U93569,Smith-Waterman Score=221.
  misc_feature (1)...(379): n = a,t,c or g
cggcacgagaactgttgttgctttaaagtctttttgtctgatataggaatagctactcctgtgtccatttgcatggaatatctattcccacccctttaccttaagtttatgtgagtccttatgtgttgggtgagtctcttgaagacagcagatacttggttggtgaatttttattcattctgctattctgtatcttttaagtggcacatttaggccatttacattcaatgtgggtattgagatgtgaggtactatgctattcatcannnnnnnnnnnnnnnnnnnnnnnnnnnnnnnnnnnnnnnnnnnnnnnnnnnnnnnnnnnnnnnnnnnnnnnnnnnnnnnnnnnnnnagtggtagaattatctgttgttttctt

SEQ ID NO: 2919 - DNA, 480 bp, Homo sapiens
  SIMILAR (221)..(325): 561254mologous to Homo sapiens Human secreted protein, SEQ ID NO: 4615,accession number G00534,Smith-Waterman Score=97.
tgctgagcaaattcaccattaccaagccaccactacaagaacggctaaaaggagctccaaatcttagaaccaaaacttggaagcacatcaaaacagaacctctttaaagcataaatcacacaggacctataaaacaaaaatacaagttaaaaagctaaaacagaaaacaaaaaacctaagtactcagacaacaaagaatatgatgaatgtaaccatacctcacatttcaatactaacactgaatgtaaatggcctaaatgctccacttaaaagatacaaaactgcagaatggataaaaaaatccaccaaccaagtatctgctgtcttcaagagactcacgtaacacataaggactcacataaacttaaggcaaagggttggaaaaagacacttcgtctaaatggacacatcaaaagcgagcaggagtagctgttcttatatcaaacaaaacggactttaagacaacagcagttttaaaaa

SEQ ID NO: 2920 - DNA, 600 bp, Homo sapiens
  SIMILAR (82)..(420): 281254mologous to Homo sapiens HSPC275,accession number AF161393,Smith-Waterman Score=88.
atggccccactccctgaacttgtgctggccatggcctccttgttggagacccagtggcctctgggaaggcgatgcactgggcgccatggagaagctgtgccggcagctgacataccacctcagcccccactcccagtggaggcggcaccgggggctggtgaaaaggaagccacaggcctgacatgcgacaccaaagccatttctattcgcctcgccctgctggaccttttctggagagatgggaattcttggaacagggtccggggctcatggaagcccaacaaggaaaccctgatgcctccgctggtgccctcggtgcccctgactggctcttctggctctcctcaaagcgtggtcctcaacctgaccagcagcatctgcatccctggaaactcctgggaaatgcacatgccctgccctgctgaatcagacactctggtgctcagcagtctgcgcctttacaagccctccaggggattccgatgcatgctcaagtttgagcaccacctaaaccagtggtgcattgtacccgtccctggattccttcttgcttcatcacctttccagacaatatttcacaggttctcttcttatgtttaa

SEQ ID NO: 2921 - DNA, 719 bp, Homo sapiens
  SIMILAR (282)..(256): 771254mologous to Homo sapiens brain and nasopharyngeal carcinoma susceptibility protein NSG-x,accession number AF095687,Smith-Waterman Score=44.
gcaccacaccacctagtgcccagaacatcggcattgaatggcgccataacaaaagactctccccagggtctaatcataagatgatcaaacactttcattcaaaatgcaggactgaaactgtgatgactgaagaggaggaatggaagcccatggacccatccaagatgagatgcagcttcttccagaatggcaaggagtctgagaaagagaaggtccccacaaggtctcttctggctcaagtgattattccgctagtaaattacaggggcgatggctcagatgccaccctccagaatgcagaccccttcgtgggaaaggcggggctgggatttgtggatgacagtcctctgaaggaggtcaggtgtcagagaggtctgatggacaatgtgcacaagtctgtgtgtgagaagaccaagaaaggcgaggctgtccccgccctctgcattctcatcctggataacccaagctcatgttatcagcctttcctggcatacccccggtacgttaaaccgtcgtctgaaatacccagcattctgccgtggaaagaaaacattgagctcggaaaacaggccactaacaactcgttcacagagtatatgctgaattgcgctggtctagatccttgccactcaatgtgtggttcaaggaccaagatcatcatcattacctgtgaacttgcaagaaatgcagaatctcaggctccacctcacacctattga

SEQ ID NO: 2922 - DNA, 879 bp, Homo sapiens
  SIMILAR (717)..(655): 711254mologous to Homo sapiens BCNT,accession number AB009271,Smith-Waterman Score=74.
atggttgcctatgaccacattctggccttaaatcacctgtacatgtgcattgctgggtgccagcagatgattcatgaaactcaacagacagatgccctggtgggcacaggaaaccgaaggattgagagacatggtggaatcagatgtaagaatcagagggcctgggctgttgactctgggagcaattatgaccagggccatgaggttcaacagattcctcgccttggagaaataaaggcgtggttctggcacatcgacatcactttttcaaaatccagattctcggactccctccagacctactggatcagaccctctaagggtggagctcaaccgtctgtgcttcaaggagcactgcagcggccatccctgtgtgtggctagtggggaatttgtgggaaggggtctccacaactggggcttgttgagggactcccacccaatgacaatttggcacagctctgagctggagctcccgtgcatcttcagccaggaagaggaagagggaggcaccacaccacctagtgcccagaacatcggcattgaatggcgccataacaaaagactctccccagggtctaatcataagatgatcaaacactttcattcaaaatgcaggactgtgattttgccgcttaaaatagtccccgaatgtagtgctgaaggtctgtctagtgatcctgagtgcaagaaggccatggtgtgccttatggagaaaatagctgtgttggataagccttgttcagtaatcttcccagtgtcccccagtgcttcaatgcgctggctccactgtggctccttgagcaacgaggtgccagcagcagcagcagacaatgatgaccacaaagacaacaacacttgcacagcccctgccttctga

SEQ ID NO: 2923 - DNA, 552 bp, Homo sapiens
  SIMILAR (1)..(552): 961254mologous to Homo sapiens bA541N10.1 (novel protein),accession number AL133355,Smith-Waterman Score=915.
atcctcacatacagagaagagcgagagattcatgcggccgcttactataaagtggacgacccagtgtggaacattcaaattgcaaggatgcttgagctgcccactatctacaggaaagtttatgaccagccttttcacagctcagccctagagaaagaagaggcactaagcaatccaggcgccctggacctccccagtctcacgagtttgctgagtgaaaaagccaaagaattcctcatggagaacagagtgcagagcttttaccagcaggagctggaaatggtggagtctttgctgtcccttgccaatcagcctgtgattcacagtgcctgctccgaccaagtgaattttaagaaggacaccacttccaaggcaattcatagtatatttaagaatgctatacaactgctgcaggaaaaaggacttgttttccagaaagatgatggttttgataacctatactatgtaaccagagaagacaaagacctgcacagaaagatccaccggatcattcagcaggactgccagaaaccaaatcacatgggagaaggg

SEQ ID NO: 2924 - DNA, 2024 bp, Homo sapiens
  SIMILAR (490)..(966): 841254mologous to Homo sapiens bA541N10.1 (novel protein),accession number AL133355,Smith-Waterman Score=657.
ctcagccaactgctcctgcgccaggcggagtcgtcgccgcctgcggatcccagcgccggaaaggccaagtcgcagggctcctggagctgcatgcggcgggaggggctactaatgcttgactcagtgatgcagaacctttcagagttagctggaagccacagccctgcctcttgatgcagcctggatccagccggtgcgaagaggagaccccttccctcttgtggggtttggatcctgtgtttctagcctttgcaaaactctacatcagggatatcctggacatgaacgagtcccgccacgcgccaggcgtatttttgtacaatggacatccaataaaacaggtagatgtcttgtgaacagtcattgtagtgagagaaagagatgctttctacagttatggagaggatgacagcactggagttataaactgcatctgctggaaaaagttgaatactgagtctgtatcagctgctccaagtgcagcaagaagagctcagcttaaccgtcacaacttaagaagctaacaagaggaccattgagcagaaaacaaagatagagatcggggacacgatccgagtcaaaggcagtatccgcacatacagagaagagcgagagattcatgccaccgcttactataaagtggacgacccagcgtggaacattcaaattgcaaggatgcttgagctgcccactatctacaggaaagtttatgaccagccttttcacagctcagccctagagaaagaagaggcactaagcaatccacgcgccctggacctccccagtctcacgagtttgctgagtgaaaaagccaaagaattcctcatggagaacagagtgcagagcttttaccagcaggagctggaaatggtggagtctttgctgtcccttgccaatcagcctgtgattcacagtgcctgctccgaccaagccggtacataccaggatctttttgactcagcagttaaaaggcctgttggacaaattcatgaaccagttggtctaggagttgttctcaggtgccgtaaggtgaattttaggagggacacccacttccagggcaattcatagtatatttaagaatgctatacaactgctgcaggaaaaaggacttgttttccagaaagatgatggttttgataacctatactatgtaaccgagagaagacaaagacctgcacagaaagatccaccggatcattcagcaggactgccagaaaccaaatcacatggagaagggctgtcacttcctgcacatcttggcctgtgctcgcctgagcatcccgccccggcctgagcgaggctgtgctgcagcaagttctggagctcctggaggaccgagagtgacattgtcagcgacgaatggagcactactacacagcgttctgagcaagagacaccgcagaccagctgaggaggacaaagataaggtggcattcacccccaggctctgactttcagcatcatgcaggggcttatctgtctggaggcagttacctcataataaactataaaatatagtcatcttgggaatgggatttggcataaatgttgttggctcccttctgtccactatgtccttggtgtacaatgactttgatctcagccatgacacaacaagaaaaccctccctgttgagctcctggctggactgtgcgttgttcgcagagcagaaatggggaggaaacagtgttggcagctttaactgatgtgtgtggttggagtcctccttccatggcaaagggacaccacagggtagtgaacatttcgggaactgaggggcatatggcctgatcacacaggtctaagcttttcaaaacttcaggttatcagagaccttcctgtgggcctctcttgctggctaagaaccggtttaggggagtagttctccctggatgagtgtcacttgcttacagtttctgtggctcagttaccagcagtggggttgagacctgggtcgatgctctttacaggcctgcccagagatgggaataaacaggagatccacagcgtgacaaaaaaaa

SEQ ID NO: 2925 - DNA, 414 bp, Homo sapiens
  SIMILAR (89)..(319): 321254mologous to Seriola dumerilii gonadotropin-releasing hormone receptor,accession number AJ130876,Smith-Waterman Score=84.
atgagtgagtcatggatcacatttggaaggggcaaccttcagattatggtggtgacactactaggaagacaggaagtggaggttgggttgcctgcttgtgtacctggtgatggtattgtacttcagaaaacagctcgagttctatactcgctgtacaggatacgaactcgagctggatacccagacttatgtgactgccagttatcttgcaaaaagcatttcacctttaccacttggcaggcaggaggaagaagaaagggagcagggatgtccattagaccactacgtggcccatcatgtgaccagccgtcattctttctgaatcatctggaaatggtctttattgttcgtcatgtttttgttaccatgaaggctagttgcctcactcaggttgaggagatgatacagcaatag

SEQ ID NO: 2926 - DNA, 597 bp, Homo sapiens
  SIMILAR (446)..(183): 421254mologous to Rattus norvegicus ribosomal protein L36a,accession number M19635,Smith-Waterman Score=142.
  misc_feature (1)...(597): n = a,t,c or g
atcgatacgacttttttttttttttttttttttgtgtaagaatatttctgtatcttatttcccctcgggtaactttttctatggcttcaccattttctcttcaaatttgaaagaaaaatatcccaaagtttaggaaactggaatcacttggccctttctcttcttatctcctcccaagttcaaaaatgctggaatctcttaatggccaagcatccttcttggatctgcagtttaggctcaaacacattcccagccttaaccccattcttctttgtggtcttagccttccttccggaaaattggctttgtctgcccaccatagccactctgctttccgatcatagcgcctccttcccgtgggcatacaaaggaatcctttgcccttctttatactgtgtcactttgtgaggctgatgcttgccactacttcttacaaaaggttctttcgggttttaggtacgttgaccaatctttggcagcangggctgttctgtcggactacccggttgaaagaggaacagtaacgcccctgagaggagccacagagccaagctgccgagggagcctcagcaatggatccaaaccaagccaaaatct

SEQ ID NO: 2927 - DNA, 351 bp, Homo sapiens
  SIMILAR (182)..(114): 301254mologous to Medicago truncatula MtN28,accession number Y15275,Smith-Waterman Score=36.
atgaggacggccagggcccagcatagtgaggaggtgagacgccggaacaccagcatcacagcactgggcaggaacagcacggccagggcaggaggacaacaacctccagggaaggggcaaggaagcctggacagggcaagagcgtgtcaagaagctgccgacaatgtcaaccaggcagataaggccgaggagtccctcgtggcatttcacaacaagggttgttatgctacacactgggacccaaaaactgaagcaacacagcccctgcccttgaggcgtgcagtccagtttgagagacaaatgcgcaaacagaccatgacagtgacgcacaataagcagaagatggagtga

SEQ ID NO: 2928 - DNA, 394 bp, Homo sapiens
  SIMILAR (286)..(260): 771254mologous to Homo sapiens Human prostate cancer- associated protein 23,accession number Y48237,Smith-Waterman Score= 45.
atgcccagtgtcattggcttttctacaggacctgccaaagagctgtgtgaaggagataccttagaccgagcatacttcctggccctgggcacagatccttggtcctcagacgcgcacttgaagtccggcctcagctgcccacatgggatgaggaatgtgtcccgtcagaaaggtctagatctctgggggctactgccatttatcccttttattctgggagaaggtccatgtcagccaccacgaagtaagcgtaatgtctgggcctgggaaaatggcaagcagctccaccttacactgtccttacagcttatgatcttagacgaagtgaagccccctgtttcccagtttccttatatcaagcctcagagaagtctttgattggttctactgggct

SEQ ID NO: 2929 - DNA, 490 bp, Homo sapiens
  SIMILAR (432)..(277): 261254mologous to Euhadra herklotsi NADH dehydrogenase subunit 3,accession number Z71698,Smith-Waterman Score=64.
tgtaagtgcacagtatgatgtttgcacaacgatggaatcacctcatgatgaatttttcagactatatccttgttaagtaatgcatgaccttaatcaggaatgagtcacagcaatactgtaatcttgatgaagatgttgatgtagataatactcccatttacaatgcacttgccaaatacaaggcattgcactgaaagctttacagactttattttaaaaaattttacaaccttttaggtaagtaccattaaccacttttacagatcagaaaacagggtctatgaggtgaaataatttgtcatacagtggtgatgtaaatatgcatataatgaaacagaataggcaagtcagaagtgatttttgtatttcttttaatagattaagggtacttactatcagcaaaagagtgaaagtctgacagaaaagaaaaagatggaaagaaatgtggggatgtgcaattccttatgttggttggttcagcagagctttg

SEQ ID NO: 2930 - DNA, 510 bp, Homo sapiens
  SIMILAR (237)..(503): 291254mologous to Homo sapiens Human secreted protein, SEQ ID NO: 5561,accession number G01480,Smith-Waterman Score=68.
atgaccttaatcaggaatgagtcagagcagtattgtaatcttgatgaagatgttgatgtagataatactcccatttccaatgcactggccaaattacaaggcattgcactgaaagctttacatactttatttaaaaacattttacaaccttttaggcaacgtgttggaccttccggagcttctcagaagacagagggttttcttttgagggaagtggctatcagaacattaaaggaagtgatgttggcacattttattggcaagaggattcaccacgaggaagaaaaggccagaaggcgactcccggtaaggagcaaggcccacaaatcctcggcaccaggcctggctgtacatccctgccaaggtgcaactaagaccttcacctgcagctcaggggtgccccagacaggagcacaagaggaggctcatccccacccacaacccaggccggagcgaatctggctgcccaggctctgtgtctggcttatgccccaggacctgagcccgtga

SEQ ID NO: 2931 - DNA, 459 bp, Homo sapiens
  SIMILAR (358)..(242): 481254mologous to Homo sapiens KH type splicing regulatory protein; KSRP,accession number AF093748,Smith-Waterman Score=90.
caaagttttaacaaaacgtgaacactatattgtgatatgtaggacagcgagcagaaaatgtaaacattcaagcaaagtcttggttgagctgtgtagaattccagagtccagagggatggttttcaggagttttcaaaaggcagaaagcaacttggagtcttttaactgtgtctctcaattccaggcatgtgcacaggtccgtggcatgaattatttcagccaaattgaagtctggagatgtgccccgaggcccagctggtgggggtgttggggtgcgcgcggacccggcacccacggcggcggcggcagcagcagcaggaggaggagaaagacgaggaggaggaggaggactagctgagcggcgcctccttcccagcccgcagcgcgcactggctccttggggcacccccgggagagcaccaagaccggagactaggcggcgacacaggcaaccacgac

SEQ ID NO: 2932 - DNA, 438 bp, Homo sapiens
  SIMILAR (212)..(268): 471254mologous to Homo sapiens Human fibroblast growth factor 2 24 kD isoform N-terminus,accession number W99375,Smith-Waterman Score=40.
tggtaagagaaaggggcaaggggtataattgacaaggcactgaaagtattgaagtcagagccttgggaaggatctaccgaactctcggcggtccacgcggggacagacctcagcccgtgagccttgagctccacgcggggacagacctcagcccgtgagccttgagctccacgcggggacagacctcagcccgtgagccttgagctccacgcggggacagacctcagcccgtgagccttgagctccacgcggggacagacctcagcccgtgagccttgagcccagaaggagtggcagcctcaggacgtttgccaggtggcctggaatgtgagggaagcctcagccccgccaggaacagagctggcgctgagttcccggctcggcccgggtcagaagcgaggaaagtttgccggcgagtgtcctttgtgctgcgtggag

SEQ ID NO: 2933 - DNA, 1225 bp, Homo sapiens
  SIMILAR (121)..(903): 281254mologous to Streptomyces coelicolor A3(2) putative translation initiation factor IF-2(fragment),accession number AL355913,Smith-Waterman Score=135.
atggctggggaggcctcaagaaactttcaatcatggcagaaggtgaaggggaagcaggcacgtcttacatggccagagaaggaggaagaaagagacgcgggaggtgcacgccggctgcggggagcacaaagcggggcgcaccgcgggcgccggcaacgagccggtgaacgaggcgaggcccgtgcgcccgcggctgcaagcgcccgcctggcggggagaggggccggcggcgtcagcccgggcggcggcatccctaggcgcctggggcgccttcctccggacctggccgctcgctgccccgccctctgcaccccacttctccgaccctccttcccagtcctgcctccccctgccctggcctctgagagccgactgagcccagccccgtgcagcagcggttgcctgtgtcgccgcctagtctccggtcttggtgctctgccgggggtgccccaaggagccagtgcgcgctgcgggctgggaaggaggcgccgctcagctagtcctcctcctcctcctcgtctttctcctcctcctgctgctgctgccgccgccgccgccgtgggtgccgggtccgcgcgcaccccaacacccccaccagctgggcctcggggaacagagctggcgctgagttcccggctcggcccgggtcagaagcgaggaaagtttgccggcgagtgtcctttgtgctgcgtggagaggggtgtgggcggccgccgactcggcgcttccccgccgcccgcccagggagtccctgcctggcaagctggggctcggggaaaagtccagcagcgagagggccgcgtgtcccgggacggttccaggggagcccgcgcggaaacgcggaccaggcgcttcggcccggatgctggatccaggagaaggggacctcgcttgccgtgtccaccgccgcggccccggcgccaagaacagagcctggccgtgagtgaacgactggccggggtacaaatggttttgaagcacttgaagctcacaggcaaaggctaagagtctaaatcccatcccgccgcacatctccagacttcaatttggctgaaataattcatgccacggacctgtgcacatgcctggaattgagagacacagttaaaagactccaagttgctttctgccttttgaaaactcctgaaaaccatccctttggactctggaattctacacagctcaaccaagactttgcttgaatgtttacattttctgctcgctg

SEQ ID NO: 2934 - DNA, 473 bp, Homo sapiens
  SIMILAR (298)..(390): 511254mologous to Mus musculus beta-1 adrenergic receptor,accession number L10084,Smith-Waterman Score=79.
  misc_feature (1)...(473): n = a,t,c or g
aagggtcaatgaatcccctgaaactgagttatgatacaggcatacctcagaccacnnnnnnnnnnnnnnnnnnnnnnnnnnnnnnnnnnnnnnnnnnnnnnnnnnnnnnnnnnnnnnnnnnnnnnnnnnnnnnnnnnnnnnnnnnnnnnnnnnnnnnnnnnnnnnnnnnnnnnnnnnnnnnnnnnnnnnnnnnnnnnnnnnnnnnnnnnnnnnnnnnnnnnnnnnnnnnngccgggcgcagtcattcatgtccagttttcctgccgtcagaggagtcctcaggaggcaggaagtggctgtgcatctcgagacctttgccggcgtagggctgtccggggggaacgacccgccttttccggtatcggttgtcatggcggcgcccagcccagcctggttttttccggatagccaattgaactaacaaccccgttccctttaggactaatctgtcacggcggcgccacgaaatcgtn

SEQ ID NO: 2935 - DNA, 1008 bp, Homo sapiens
  SIMILAR (694)..(539): 381254mologous to Homo sapiens a6(IV) collagen,accession number D63562,Smith-Waterman Score=62.
  misc_feature (1)...(1008): n = a,t,c or g
ggcgtacgagccgggccggaagaagaggtagggcgccgccgtgacagattagtcctaaagggaacggggttgttagttcaattggctaccggaaaaaaccaggctgggctgggcgccgccatgacaaccgataccggaaaaggcgggtcgttccccccggacagccctacgccggcaaaggtctcgagatgcaggcggccctagaggtcaccgctcgctactgtggccgggagctggagcagtatggccaagtgtgttgggcaccaagccagaatcctgggcagcgggactgtcactaccttaagatgagcattgcccagtgcaaaatcctcccagtgagtgcggcccaatcatccagccagatccgcccaggcctgtgctcaagcctttggaggccttcggaggaagggtctttcggacagaaacggaggcaagcttgtggggcaaacttgtgccaggagcatattgcgctcgctttccctgcaggtgcgctggaggcaagtgcagccgccacgcttcacctgcaactgtggaggcacagccacttcctgcctcctgaggactcctctgacggcaggaaaactggacatgaatgactgtcccccccgcccctcccctgcagagtngcccagatggagtcctgagccctggaacatgggcccggctttcctggatatccaggaattcccaataaataaagactctgtatactgggctttgattcctgccatccgtacctgagagggtcctaggagagctggctgggcagagtcatctgttccccagcttcaccgggtgtgccaaggaagtgcctgggaagaacaggactctgcagctgtgccccagggttgagactaccctgcctcccttgtgaactctgccacacagccatttcctgacttctgctgcatgtgcctggggctggagtgctgtgcctggacttggctcactgaaccttcggatttccgggatcggcgattcttctggctaggcctctgagaactgggg

SEQ ID NO: 2936 - DNA, 273 bp, Homo sapiens
  SIMILAR (109)..(258): 401254mologous to Homo sapiens fibroblast growth factor receptor 2,accession number L49237,Smith-Waterman Score=66.
atgacctactccaactacttcatttttgaagatgaggaaatggaggtccagataagggaagggtgtcaccatcagcttgtgtcacagctaagggcttcccaccacaaacctgcgtgctttggcgtcttagtaggaggggctgctgaaattcataccggatatgcctttggctgtgtttatcagccccagcccaggctcccttggctgaaggtggctgaagcagagggctttgactattcaggtggccccagcctgcctgcaccctatccctga

SEQ ID NO: 2937 - DNA, 768 bp, Homo sapiens
  SIMILAR (215)..(355): 591254mologous to Homo sapiens Human secreted protein, SEQ ID NO: 6812,accession number G02731,Smith-Waterman Score=164.
atggtttcgtgggcagcctcagaacttggggccctgagtcccagctgctccagctcctggctaaaaggggtcaaggtacagcttgggctgttgcttcagagggtgcaagccccaaaccttggtagcttccacgtggtagctgggcctgcaggtgcacagaagtcaagaattgaggtttgggaacctctgtctagatttcagaggatgtacggaaatgcctggatgtccaggccaaagtctgctgcagtggaagagacctcatggagaacctctgctagggcactgcagaaaggaaacgtgggattggacaccgcccaccccccagaatccccactggggcactgcctagtggagctgaagggtccagagaattaccatccagctacccttcctccactggtccctcgatgttctcccggcacctcccgtcctctctccgggcccatctgccgagtaagggccagagagccccctcctccgcttaagcccgaccccaccaacttttcaaccaatacgatacactctttcttctcaggacatagtctcagacttcatcccggccagctccctccgtcccactcctggagactcaccaagcgggcgaggccactcctctccggcggcaactcggacaccccaacaccggacctggcgctgcaccctagtcgcgcctgcgcgcgccgagcccgcgcgcctgctcacttcccgttcgccgcggacacagacacacccctgcagctggagccaatcacggtgctgggggtttaa

SEQ ID NO: 2938 - DNA, 800 bp, Homo sapiens
  SIMILAR (93)..(725): 1001254mologous to Homo sapiens SNAP-23,accession number U55936,Smith-Waterman Score=1091.
ctcgaggccacgaaggccgccaggtccggtgttggggtgtccgagttgccgccggagaggagtggcctcgcccgcttgagttttgattcatcatggataatctgtcatcagaagaaattcaacagagagctcaccagattactgatgagtctctggaaagtacgaggagaatcctgggtttagccattgagtctcaggatgcaggaatcaagaccatcactatgctggatgaacaaaaggaacaactaaaccgcatagaagaaggcttggaccaaataaataaggacatgagagagacagagaagactttaacagaactcaacaaatgctgtggcctttgtgtctgcccatgtaatagaacaaagaactttgagtctggcaaggcttataagacaacatggggagatggtggagaaaactcaccttgcaatgtagtatctaaacagccaggcccggtgacaaatggtcagcttcagcaaccaacaacaggagcagtcagtggtggatacattaaacgcataactaatgatgccagagaagatgaaatggaagagaacctgactcaagtgggcagtatcctgggaaatctaaaagacatggccctgaacataggcaatgagattgatgctcaaaatccacaaataaaacgaatcacagacaaggctgacaccaacagagatcgtattgatattgccaatgccagagcaaagaaactcattgacagctaaagctactgctgttcttctttatcatttattcacttccgtagctcctccttgaaagttattaccttttcagag

SEQ ID NO: 2939 - DNA, 451 bp, Homo sapiens
  SIMILAR (348)..(425): 531254mologous to Homo sapiens Human secreted protein encoded by gene 19 clone H2MBY03,accession number B12319,Smith-Waterman Score=63.
  misc_feature (1)...(451): n = a,t,c or g
gcggtggaattccagcnnnncgccatggacgcagagctggcagaggtgcgcgccttgcaagctgagatcgttgccctgcggcgagcgtgtgaggacccaccggcgccctgggaagagaagtcccgagtccagtattagaaaagttctacagagacacagattatcaggaaattgccacatggttacatttcaacttgaatttcagattctggaaattcagaataaggagagattatcttctgctgttactgacctcaacataataatggagcccacagaatgctcagaattaagtgaatttgtgtctagagcagaagagagaaaagatctgttcatgtttttccgaagcctgcatttttttgtggagtgggttgaatatcgtaagcgcacgtttaaacatctcaaggaaaagtacccagatgccgtgtacctctcggaggggccctcctcc

SEQ ID NO: 2940 - DNA, 414 bp, Homo sapiens
  SIMILAR (16)..(384): 301254mologous to Pseudomonas aeruginosa probable ClpA/B protease ATP binding subunit,accession number AE004483,Smith- Waterman Score=88.
atggacgcagagctggcagaggtgcgcgccttgcaagctgagatcgcggccctgcggcgagcgtgtgaggacccaccggcgccctgggaagagaagtcccgagtccaaaaatcttttcaagccatacaccaattcaatttggaaggatggaagtcttcaaaagatctgaaaaatcagcttggacatttagaatcagaactttcatttctaagtacgcttactggcatcaatataagaaatcactccaagcagacagaagacctaacaagcactgagatgacagaaaagattcaatacgaggtacaagatcatccagccccaaggagcattcaaatggctgtggtcccagatgaccacaacctcatgagaggccctgagcaaggacacccaactgagtggctccaaaattcctga

SEQ ID NO: 2941 - DNA, 555 bp, Homo sapiens
  SIMILAR (429)..(455): 551254mologous to Drosophila melanogaster Mst84Dc,accession number X67703,Smith-Waterman Score=37.
atggacgcagagctggcagaggtgcgcgccttgcaagctgagatcgcggccctgcggcgagcgtgtgaggacccaccggcgccctgggaagagaagtcccgagtccaaaaatcttttcaagccatacaccaattcaatttggaaggatggaagtcttcaaaagatctgaaaaatcagcttggacatttagaatcagaactttcatttctaagtacgcttactggcatcaatataagaaatcactccaagcagacagaagacctaacaagcactgagatgacagaaaagagtattagaaaagttctacagagacacagattatcaggaaattgccacatggttacatttcaacttgaatttcagattctggaaattcagccgccccagggcagcacagacaggacagaagccagacagtggatgtcctgccacttaggtcctgcaacccctgctgctgtggccacactctgcctcctaacagacagtgttggcactgacccagacctcaacagtattttaagccaatattctcatcctcatgtcatgaaagcatga

SEQ ID NO: 2942 - DNA, 3457 bp, Homo sapiens
  SIMILAR (2195)..(2374): 951254mologous to Homo sapiens Human GEF containing NEK-like kinase substrate sGNK,accession number Y95293,Smith-Waterman Score= 273.
cacatatggctgggagacacagcagctacgcaggtctcaggtccacatacagggcaacgaccctccacaccgctgtctgcccatgcatggcctgaactcacagtcacccagcctgaaaactgggccacggcacagaactgtcagcatgcgaggttccaacggagctgaggctggcgccagagagcgtccaacctcaccaggatttggcccacagcagcgaggtggaactcctgagccttcaggttcctccagtatgacccacgcatcagatggggagcagagaagggccctgaatgcaggaagcctccgcgactcgatagctgtcccctccttaagccccaagctgagacctggggaagccaagatcaatggcatgcatgctaccgctgtcccctcccaagctgaaggcaggcatcaacaatcaatcatgggaaatcgactggtttcctcgctgcagcctgaaggtgcagtacttgggccagtggccacatctcagatcaaccagaatgtggagatccagcgtggccgcctgcgggatgacatcaaggagtacaaattccgggaagctcgtctgctgcaggactactcggaactggaggaggagaacatcagcctgcagaagcaagtgtctgtgctcagacagaaccagctcctgccgaggagaggaaatactgatcagcacgtccctgctctgacgctgctcaccatggccttggcgctcactgctgccctgccccagaatcctgtttgtagaaaaaacaaatccctgactaagctgctgggtgtcgtttctgctgagcagctggtcgtaaggaaccgggccttcagctttccccgcatgctggctttccaatttgacatcactgaccaggcactaagagattcccaggtgctagacgaggaaaagtacccagatgccgtgtacctctcggaggggccctcctcctgctccatggggatccgcagcgccagccggccaggatttcaaaaagcacataacgacatgttttactgctttttcaggtttgaattagtcattgtttggaggatacaaatagatgaagatgggaaggtttttccaaagctggatcttctcaccaaagtcccacagcgagctagtcgggaggagtgcggggtcttggtgaggtccatgccagcagaaaacaaaagaccaaaagctgccaccttgaagtttcttacccggtttaatgttttctttatagccctggagctggacaagaacagagccatagaaactgctcctctcagcttccgaaccctgaaccgtgacctcatcagtcgcccatttagcattgttaagatctgtgaacgcgtgttgtctcaaaccagtcagggccgtcatgactacgcagcagcagcagtttccaagacgggccagaaacgcatccacagcagtggcacccgcggctcaggggctcctcacagcccgggctgccattggcaagatgggcatcggcaccagcaggcctgcctcacaggagaactgacccagggagtgcatgcccaggagggagtctgggtgctgtgtagcacagcaggtcttgagctcaggtctcggcctaaagtgtccctgtccacaaccatatccactcaaacaaataatgagaaaggaaaacagaaagacatgccctatcagttcctgatgtatctgttgaacactcctgttcagtttgctgagtttgtaatgtcctctctaagggagaagaaaagacattacaaactcaacgggaatgttcagcaggtgcagcagtaccgcgtcgccatgactgccaaggactgctccatcatgattgcactgtctccctgtctgcaggatgccagaacatttagtgttgctataaaggaatacctgaagctagaagaaagcctgccctatgtcaccctagccagtccatccaacagacacaggcaacagccaccccatgagcgttctaacagctccaagctgaaaacaaccccagggtcggtctacctgacagtggctcccagccactaccgccttcctgaccacaaaggctctggccaggaccggactctgggctgccccaggagagtaatgtgcaggatgcacagcaaagctctgaaggccggggagcgtggaggcaggccaagatacaattttcatgtagacaagactttgatgttgcttttcccacctaccttcgagctcttccaggtggagtttgagggcctcaagcatgagatcaagcgtctggaggaggagaccgagtacctcaacagccagctggaggatgccatccgcctcaaggagatctcagagcggcagctggaggaggcgctggagaccctgaagacggagcgcgaacagaagaacagccggaatggtgagctgatttacggctgcaaagatgcccggagccccgtggctgactggagcgagcttgcacaccacctgaagccgttcttcttcccttccaacggcctggccagtgggccccactgcacaagggctgtgatcagggagctggtgcacgtgatcacacgggtgctgctgagtggctcggacaagggccgggcaggcaccctgagtccggggctcgggcctcagggcccgcgagtctgcgaagccagccctttcagtaggagccttcgctgccaagtgccagtccagggtgcagtccttgcctgtggtgatgcccgtatggcggagcccaggatgagccctgcggtctgcgccggcctgtgtctccctccacgttctttgataatcaacatgctctcgttttcccctgatgttctcggaaaaaacaccccagagcgctcggggttaccgaagggctgtcttctgtacaaaaccctccaggtgcagatgttggacctgctggacatcgaaggcctctaccctctgtacaaccgggttgagcgatacctggaagagtttcccgaggagagaaaaaccttacaaatagatgggccttatgatgaagcattttaccagaagctgcttgacctttccactgaggatgacgggacagtggccttcgcgctaacgaaggactcagaagatggcacagaatgggtgacagtgggttgcatctcgagagagcaggtttttgccagtcgcttgatatatgctccagagagaaagccccaaagacacaaagatgtgggaatcatggatgagtgtggcctcggggttactaatgggtgcacctgggtttggggatcagggaagacagtggacatggactcgtaccaatacctggactcttcacacaccaaatcctgggggccaggcactgttgtaggtgccagatatttaattcacatcacagatgtgccatgcctcatttcctacaagtcctgcgctgcacagaaggctctctctcatcccatgtttgcatactgcaggaagaacatcactgtgctccttctagtgctgacagccaatgaccatgcagatctccttacctag

SEQ ID NO: 2943 - DNA, 1488 bp, Homo sapiens
  SIMILAR (147)..(209): 471254mologous to Chlamydia trachomatis glycogen phosphorylase,accession number AF087293,Smith-Waterman Score=50.
actgtggcggaattcgtgacagctgcgctgccggcccggctgcggtcagcaacgcgccatggacgcagagctggcagaggtgcgcgccttgcaagctgagatcgcggccctgcggcgagcgtgtgaggacccaccggcgccctgggaagagaagtcccgagtccaaaaatcttttcaagccatacaccaattcaatttggaaggatggaagtcttcaaaagatctgaaaaatcagcttggacatttagaatcagaactttcatttctaagtacgcttactggcatcaatataagaaatcactccaagcagacagaagacctaacaagcactgagatgacagaaaagagtattagaaaagttctacagagacacagattatcaggaaattgccacatggttacatttcaacttgaatttcagattctggaaattcagaataaggagagattatcttctgctgttactgacctcaacataataatggagcccacagaatgctcagaattaagtgaatttgtgtctagagcagaagagagaaaagatctgttcatgtttttccgaagcctgcatttttttgtggagtggtttgaatatcgtaagcgcacgtttaaaccatctcaaggaaaagtacccagatgccgtgtacctctcggaggggccctcctcctgctccatggggatccgcagccccagccggccagggtttgaattagtcattgtttggaggatacaaatagatgaagatgggaaggtttttccaaagctggatcttctcaccaaagtcccacagcgagccctggagctggacaagaacagagccatagaaactgctcctctcagcttccgaaccctggtagggtctgcttggaatggaacctgctctggacagctcgaatagagtcgctttgtgcagaggagaaccactaggttccaaaacagtgaacgtggaggatgaagatgctgcgtggaggtacatgcaattttattcaatatagacatttgctattttctgcttagaacccaccccctgaatacgtgctgtctatgcagttatggcccattatatggaaactctcatgccatgaagaatagagtaccgctagttaagtattaattgccaaatgaaagtgacacgtacaatgtggtttataaaaataagcttaacatctgagaaaatgtaccaagtggttgtgtgtatgtatataagtgtatgcgtatatgcaaatgacattctagaagaagcatacgccttcgcaggaaggaataggaggaaaaaaaaccttaaggtttttcaccagcttgcacacaaacgtttagcataccagacacatcattatttgggaccagcttgtgcacttgtctgttcataaaactgaggtggaaccatgaatgagtagagggagtttatttcttgttgaagagttccttattaaaaacggggagctggatcagaaacgctccgtggacatgcacaggatagtatttgg

SEQ ID NO: 2944 - DNA, 670 bp, Homo sapiens
  SIMILAR (416)..(634): 321254mologous to Homo sapiens calcium channel alpha2-delta3 subunit,accession number AJ272213,Smith-Waterman Score=108.
atggtcatcatttacctgtcagctggcattacatcaaaggactcttcggaagaagataaaaaagcgactctccaagtcatcaatgaagaaaatagctttctaaacaactctgtaatgattctcacctatgccctcatgaacgatttcttggagccttcaggggagcccagaacaggagtaggtaccctggatggtgtggatggtcataaaagaccagatggggtgactggtttgaaagagctggcttttctgagggatctagctgaaacaaaatccagggaaagtacggtgtgccaaaacgggacggccttgcctgtgattaagggcagcatgatggtgctgaatcaagttgagcaacctggagacccacagtgggcaggttcctacacaaaccttccccaaccggatgattgatgaagccgtcttcagcctgcccttctctgatgagatgggagatggtttgataatgactgtgagtaaaccctgttattttggaaacctacttctgggaattgtaggtgtggacgtgaatctggcttacattcttgaagacgtgacgtattaccaagactctttggcttcctatacttttctcatagacgacaaaggatatacacttatgcacccatctcttacccaggccatatttattgtcagagcccccacttca

SEQ ID NO: 2945 - DNA, 354 bp, Homo sapiens
  SIMILAR (1)..(333): 291254mologous to Bacteriophage A511 putative,accession number X91069,Smith-Waterman Score=82.
atgaaaaatttcctggaagagattaagagcagatcagaggccgcagaagaagagaccagtgaatttagagataacttaaaaaatggaaacacagagggaaacaaaagacttcaaaaagctaaaaagctgctcagagacatgtggaacaacataaaagaatctaataaaatgtccagttatggtcatgtggccagatctgatgaatcagatgtggcagaaaggatgcgaagaagctctgagcaggtgccctccctctacatgttcccaccatcctgcgtccttgtgctgcgccggaccaggcatgcaagaacaacacaccaaggatggcggagcaacaagatagaagaggcctga

SEQ ID NO: 2946 - DNA, 477 bp, Homo sapiens
  SIMILAR (189)..(317): 371254mologous to Drosophila melanogaster CG6489 gene product,accession number AE003696,Smith-Waterman Score=60.
atggctgctgcccagacgccctcaaaagccaaggtcttggcagcctttttatttgccaccaaagcgaaaaacaaacccagggagggacggaggcctgagtcaggggttccgccagggaaaaaggcagaccttgaaactgccctcttagggcgatcctcagagttggttataaaatatttaagggcgagaaaaggatcgcaggagccaggccctgagatgagcttggagtccctgtttcagcacatcatcttcaccgagcatcaggcggaggagagtcgccgtttgatgcgagaagccagttatggtcatgtggccagatctgatgaatcagatgtggcagaaaggatgcgaagaagctctgagcaggtgccctccctctacatgttcccaccatcctgcgtccttgtgctgcgccggaccaggcatgcaagaacaacacaccaaggatggcggagcaacaagatagaagaggcctga

SEQ ID NO: 2947 - DNA, 938 bp, Homo sapiens
  SIMILAR (689)..(784): 421254mologous to Homo sapiens Human secreted protein, SEQ ID NO: 6812,accession number G02731,Smith-Waterman Score=73.
atgggtaagggagattctggacttcagaatggttcagatccaccaatagcttgcactgtgctcatggaaaagctgcagacacttaatgccagccatgaaagtagcaggagtggggctgtaccctacaaagccacagggatggagctgtccaaggccatggtagcccacctcttgcatcagcatgacctggatagtggggcgctgctgaaaagataccaaaaaatgttaaatcaattttggaactggataacaggcagaggttggaacagtttggagggctcagaagaagacaggaaaatggacttgctgaatggctttgacaaaaatgctgatagtgataagaacaataaggtccaggtctggggtagtctcagatggagatgaggaacttgctggggactggagcaaagcctggggacttagtgcccaggtcccagatgcttcagtcccagctgtggctaaaaggggacatgataaagctcgggccattgcctcagagggtccaagccccaagccttggcagcttactaatggtgttgggcgtgaaagtgcacagaaatcaagaagtgaggtttgggaacctctaaccaagatttcagaagatgtacagaaatgcctgaatgtccaggcagaagtttgctacaggggcagagccctcatggagaacctctgctaggggactgcagaagggaaatgtggggtggaaactgccacagagagtccccactggggcactgcctagtggagctgtgaggagagggccattgtcttccagaccccagaagggtagatccactgaaagcttgtaccgtgtgtctggaaaatccacagatactcaatgccagcctgtgaaaacagccaggaggtggggctgtaccctgcaaagccatgggggtggagcttcccaagaccacaggaacccacttgcatcagtatga

SEQ ID NO: 2948 - DNA, 452 bp, Homo sapiens
  SIMILAR (411)..(376): 501254mologous to Drosophila melanogaster PQBP-1 homologue,accession number AJ278495,Smith-Waterman Score=39.
agaaagcctgggggtgaacacgccctgaggagtcagggaagccagagccagcggctgaagggcccttgcgtgcggctgcagcacaactgcaggttctcagagaaaaatctccagctcagacccggttctgcacaaagctcagaatggagcggccagcagggcatgtggctagaggaaggacatggccacccacccctccctcctggtgtgccaggtgggcttgctaggggcacaggtgcccagtgtcagggcagggatgccacagagccgcaggcagactgaaggggcccagggcatggtcaggaacgaagaaggagggagcctgaggctctcccaccaccaggcctgcaaagccactcacactcagcagtggacacttgaggtcacggcccaggtgggctgagggaccccaataccacctgccttgaatctcagcctgcagaagtcgttcc

SEQ ID NO: 2949 - DNA, 1104 bp, Homo sapiens
  SIMILAR (219)..(437): 361254mologous to Homo sapiens high mobility group protein- R,accession number AF176039,Smith-Waterman Score=74.
cattttaaaataaaatatgtaagagaaacatatgaaagacggccacatttagtcccttatcagatccacacttccccctgtgacctgggaaatcggggtgcgtctccagtctgtggggggcagggtctcgtccagacaggaggctgcatggtgctgcttgtagcaagtgactcgtttgtggttggcacgcccagtgcagctgaggatgaccccgtggcttggccccaggacaggacccaggccccacagaaaggcctggaaacagcagcaaaccttagagaaggaaacacccaccaccggggacccacgatcccctgctctccccggagaaggaaacacccaccgccggggacccacgatcccctgctctccctggagggcacccaggaagcagccgcagctggcaggctatgtggcaaccccgagaccagcggagatggcagtggcccaggtgacagagcaagaccctgtctcaaaaaacaacaaaaaaagtaccagccgcatggagactatctgctgcttgcatcttctctaaataattacggggatgaggagtccagtgatgttcctggtctctccccagaagtacagacaggttgggccacgttaacactggacttgatcatgattccaggagttttattctcaggacaggtgagaaagcctgggggtgaacacgccctgaggagtcagggaagccagagccagcggctgaagggcccttgcgtgcggctgcagcacaactgcaggttctcagagaaaaatctccagctcagacccggttctgcacaaagctcagaatggagcggccagcagggcatgtggctagaggaaggacatggccacccacccctccctcctcgtgtgccagagtatggtgtttgcgaaaacttgcggaagctggagatcacaggcgtgtcttgtcgggacgtctatgcgaagcgtataaaccctcgcgtgaagtcgggacgttttgtgaaaattctccctgattatgagcacatggcgtacagagacgtttacacctgccgtatgtacctcctgcgagctttggcttctgcggcagccagcacggccaagaactgcatggggagggccctctga

SEQ ID NO: 2950 - DNA, 1100 bp, Homo sapiens
  SIMILAR (36)..(287): 351254mologous to Streptomyces coelicolor putative dehydrogenase (fragment),accession number AL392146,Smith-Waterman Score=93.
tcaagaccttttaaaaatggaactgtcggctgcggctggaaggcgcaggcaggcgccctggagagaattcacagggaggcacaggacagaacgctcccaggaacgaggaagcacccccagaaaggagcgctctatgggctccaggcagccgaggaaacgcgaacgtgagccccgtgactgcactcccacgtgcaccaacgctgccagtgtgagcagaagcggagcccgcagagcgccaggctgcgccgggagatgcatcacgatgaaaaactgcgccagagcatggcgggaactttccgagagggcgtgttgtttccaggcggttccaccttctaatatgaaacagtcttggttgattttccttgatactactttatgctcggcctggttgttggcaagtagctgcccgcgtctgtacgcgcccttgattagtttccactgcatgtgttttaacacagtcctcctttttccacgtttatttgggccaaccctgtctgcaaagatccagtttaataacagatttgagtctaacgtgctatagccctggaaatgtactaaagacactacaacatattggctggaaagaatagaaatctttaattcctgaatgcaaagcggacacacacacacacatacacacacactgtgcggtcctccttaaggggacgaagggagtgctcatactgagcttccctcttggagaacgcacacagcacaacctccgatgggttttcctctcctgggggcagcgcactgccctgcgttgttggagatgctgtcacagttggttctggatgtgccactgaaatgccaccataccaagggctgaaactgtcaccagcaatgttgacacagctgcacagcttccattggcagaacttgaatggtgtctgggtgacagcagctctgagccagcccggtgctaggtgatgggcaactgcagtgcccatgccacaggctgggtcagattttcttgtggggacgcggtcatggggatgttgcttgtccagcttagctcccatgtgtcctggatgatggaggtgatgtgtgccttctagaccggggttgagtcctaattgctctaagtcagccatggccat

SEQ ID NO: 2951 - DNA, 367 bp, Homo sapiens
  SIMILAR (324)..(193): 861254mologous to Homo sapiens FRG1,accession number AF146191,Smith-Waterman Score=187.
cgtgatcatttcttcttctcctgctgttttactttttgcttctatgtcccctgcttcattgcatctaataaagcagccatttgaggccaacaaagccattttccccttctttgtgtggagctcccagggtaaaaagaccattgtcgagtgcatgtatataggttccctcatccatttcaatggctatggttccaacatatcaaactgggtttcttcatcttcttctctttttctcttcttctctttgctctttttcttcttactcttcgtcttggttcccttgagcacaagcttggtagacttcgcataagattactcggccatggctccgggacacttctgcgcagagaggctgaagccggcgtaa

SEQ ID NO: 2952 - DNA, 395 bp, Homo sapiens
  SIMILAR (146)..(45): 651254mologous to Homo sapiens Human secreted protein, SEQ ID NO: 5942,accession number G01861,Smith-Waterman Score=100.
attgcatctgaacgccaacaacaagttcatctgaatttatactaagatattttccatagccaggtttcagggcgattcaacatatcaagctgggtttcttcatcttctctttttctcttcttatctttgctctttttcttcttactgccatttattctggcatcttcatgaggccagactcctcgagagggttctcaagggcagtggcttcagctcactccttgatactttctttccatctcgcctaacaatatcaaaacttctgtttatcacggaggccaggaggaaagctcaatatttgcatgtacagtcaacctcaggcaaatctcggttcccttgagcacaagcttggtagacttcacataagaatactaggccatggctccgggagactt

SEQ ID NO: 2953 - DNA, 407 bp, Homo sapiens
  SIMILAR (72)..(4): 871254mologous to Homo sapiens Human secreted protein, SEQ ID NO: 5942,accession number G01861,Smith-Waterman Score=98.
cctcaacatatcaagctgggtttcttcatcttctctttttctcttcttatctttgctctttttcttcttactgccatttattctggcatcttcatgaggccagactcctcgagagggttctcaagggcagtggcttcagctcactccttgatactttctttccatctcgcctaacaatatcaaaacttctgtttatcacggaggccaggaggaaagctcaatatttgcatgtacagtcaccctcaggcaaatctcggttcccttgagcacaagcttggtagacttcacataagaatactaggccatggctccgggagacttctgcgcggagaggctgaagccggctcaggaagagtatgtgacctggagcagcaccagggcggggaggaacagaagtggaggcgaag

SEQ ID NO: 2954 - DNA, 707 bp, Homo sapiens
  SIMILAR (401)..(195): 571254mologous to Homo sapiens Human secreted protein, SEQ ID NO: 5941,accession number G01860,Smith-Waterman Score=174.
agcaaatctgggtcagactggatgcaacctgtgattcccaacagagacaaacaaagcaaggttcaggatgctcagtactgcgatgaaatgccaagacacagaaaagccatgtgtcaagaagggtcgtccgcgcgggaggctgcccctctctgcacaggcgccaggaaccgcggtccagcctccgtccagcccagacagggtcagggcgaaacctgggaggccgcgaaacctgggaggccacgaagcctgctctccgcaccacggcttccaccggattcgcgggggtggagtgcatccgaaaagaactgaggaggctcccgctggagctgcaggacccagctcttcgccttggttcccttgagcacaagcttggtagacttcacataagagtactaggccatggctccgggagacttctgtgcggagaggctgaagccggctcaggacgagtgtgtgacctggagcagcaccagggcggggaggaaaagaagtggaggcaaagtaaacactccctgacagcggagctaccgcggccgcagagggccgaaaggtgtccgcacgcatctgctccctcgtttcctctcgaggagcccctgaggatttgtgcctcccagaagtggggaaagctcgcccaaggcgccggtgctgacggtggcgggactgccgggctcgctgtggaaccgcctcccgctagagctgcgggctga

SEQ ID NO: 2955 - DNA, 1086 bp, Homo sapiens
  SIMILAR (748)..(1086): 971254mologous to Homo sapiens FRG1,accession number AF146191,Smith-Waterman Score=569.
cccgtgtcgacccacgcgctccgggaaatctcgggcattcaccgtttgggtgaagacggaggcgggttctggacagacgtaggctgtcagcggagtgtttacttcgccttctacttctgttcctccccgccctggtgctgctccaggtcacatactcttcctgagccggcttcagcctctccgcgcagaagtctcccggagccatggcctagtattcttatgtgaagtctaccaagcttgtgctcaagggaaccgaggtgaagagctgggtcctgcagctccggcgggagcctcctcagttcttttcggacgcactccaccccccctcgaatccggtggaagccgtggcgcggagagccggctttgtggcctcccaggctttgccctggcccctgtccgggctggactgaggccggaccgcggttcctgggcgcctgtgcagagaggggcagcctcctgcgcgggacgaccctgggaaacaggattagacgggcgggtgacccgttgaccccgtaacccacgaattttggggttcctttgaaggcatctctgcaggcctctgcctgatttgcctgaggttgtttgtacatgcaaatattgagctttcctcctggcctccgtgataaacagaagttttgatattgttaggcgagatggaaagaaagtatcaaggagtgagctgaaagccactgcccttgagaaccctctcgaggagtctggcctcatgaagatgccagaataaacggcagtaagaagaaaaagagcaaagagaagaagagaaaaagagaagaagatgaagaaacccagcttgatattgttggaatctggtggacagtaacaaactttggtgaaatttcaggaaccatagccattgaaatggataagggaacctatatacatgcactcgacaatggtctttttaccctgggagctccacacaaagaagttgatgagggccctagtcctccagagcagtttacggctgtcaaattatctgattccagaatcgccctgaagtctggctatggaaaatatcttggtataaattcagatggacttggtggtgggcgttcagatgcaattggg

SEQ ID NO: 2956 - DNA, 746 bp, Homo sapiens
  SIMILAR (117)..(1): 531254mologous to Mus musculus reading frame histone H3,accession number V00754,Smith-Waterman Score=85.
agcaccgacagccctgctctggaagcgcgggtctgcttagatgtcctaagcaacttcttgcaccaggcgccgccaatgaggagttcggtggatttctaaccaagtcccatttcaccgagagcggagtcccgcggggaccaggaggttccttctcgctccgggagagggcgctcctgcccggcgtttgtagcggcggcttcctggctgcttcccagcgtggatttgcacccggtcgatttcctgcgggcactctgtctcaacggcatcctttccatgagcccgcagatttaccctatgtcacaaacccgtgcaatgtcacactctctgtcacacactcatgcaatgtcagaccctctgtcacacacccaggcaatgtcgaccccaattctccagcttttctacttaatgccttgggccaaattagcaacgtgcacatcattttatacgttgcacatggtgacgtcatcatcatgagtggtgcaaagtggaaagaagtatacaggctgaatcacaatagagccatgaccgccgctattctccagataggaacctggtgtcaagatacaaatacgtgtgctgacgctgcgagtgtggtgtttaaagtgcactcgcgtacgcgcaggttcctgccgacccggaagcggatctcgcggggctactggcgctctcggcccacacaatatgacctcggggaggatgcgaggaagatgaactgtgatgatccacttcttcttaatgaatggtaa

SEQ ID NO: 2957 - DNA, 1010 bp, Homo sapiens
  SIMILAR (970)..(818): 401254mologous to Hordeum bulbosum chitinase,accession number AJ400135,Smith-Waterman Score=77.
tttaaataagggcatgaaagctgacactcaggagggggttacctgtgggaggggcaaatggctgaagccccagaggcagctgttccggctttgggagaatgggtggatacctgagacaggcaggggcacgccaccgtccactctgtctttctcttttgccactgatacatacgttacacatactactttatactaagtactgcttaaagtgtttcaataaattaaaaaactttggtctcttggctgaaaatgggatgaatgcagggtggtgagatctgagcagccagtcccttagggagacacccaagccgagagagaacatcggcagaagagatggagagcaaggtgagattcaagatgcttttgggccaaagtcaattggctgcctgcttagacagattaccggacaaaagagagggaagaatagaagaatggtcacaggtttcaagcatgagaggccctgcaagatggggccacaaataaggaggaaggactggaagaagaacaggtttgagaagcagggcaagtttgacgtgactattagacatgcgtctggagaaatcaagcagcttccgtacttgcgcagaactcccctcgcggcgaccacgcactacgggttggcgccagagtcaaaaggcgtcggccctctggcaagatggctgctgcggaggcgttggagcgcggaaatctggaaccgggatggcgacgtctacactgagtcggaggcgaagtattttaaacaattagagatgttggaaagagattataccactaaatcagaaagcactgaatattttgccgagacctggacgctgcccggtggcctcggcgggggccctgtccttggccgctgcctctctgaatcccaggtgagaagaataaaacgtcctgacgctgtccggcttccggttcttggagaggacgggccgtctctgccgagagaactgtgcggaatcaggaagcgctggtgctccttcgctttcacgggactaagcgaaatccggctttaa

SEQ ID NO: 2958 - DNA, 258 bp, Homo sapiens
  SIMILAR (164)..(36): 421254mologous to Zea mays putative coding sequence,accession number A23631,Smith-Waterman Score=70.
atggagttacctgcttttgggctgagagtaagaagtgaggtggcagaactggagcttgaggagaatgaaaaaccttcagtagagtacctgagaggagtggcccgggaagctgcccatcaacaagtagagggatctccaggtagcaccaagggtccagctgagagtgtgaccaagaattttagtgtcattaattgtgtggagttttctccagaagcctttaggctttatcctttattaagcacttacgattgtgcttag

SEQ ID NO: 2959 - DNA, 282 bp, Homo sapiens
  SIMILAR (116)..(232): 841254mologous to Homo sapiens Human secreted protein HCHPF68, SEQ ID NO:163,accession number Y86248,Smith-Waterman Score =168.
atggagatgcaagattacctaaggctgtttgaggggctccctggagaggtgtgggaccctgtgcaaaatcagatctgcatgagatctcagggcctgagagtagagtacaacacacccctcagttcacgagaagaagaagaagaagaagaagaagaagaagaagaagaagaagaagaagaagaagaagaagaagaagaagaagaagaagaagaagaagaagaaagaaagaaagaatgctctaaggcccaatgtaaacatttccccctctcagaagttctctag

SEQ ID NO: 2960 - DNA, 767 bp, Homo sapiens
  SIMILAR (4)..(111): 801254mologous to Homo sapiens Human secreted protein HCHPF68, SEQ ID NO:163,accession number Y86248,Smith-Waterman Score =152.
tgacagaagaagaagaagaagaagaagaagaagaagaagaagaagaagaagaagaagaagaagaagaagaagaagaagaaggagaagaagaagaaagaggaggaggaggaggcaaacctctgaacctcttttttacagatgagcacacgttacccattatttcagtgtcaggacatgtctccgtgtactgtattccctatgtaagaggcaatctggacctaaaagagtgtccaagagataagctagaagtagatctgcagatagtggttaagaaaagttttgcccttctcctgattacactctcttacccaacaaacctgtcagaaagccagcccgttggaaactccatgggctatgagattcagctgctcctccaagcaactttcaacattaaagaagagaagaaagccacattgactgagcctaaaacacaatgttggattaacatttataggggagggggtctctcaagtcagtgtaaaaacgacacttcccctaagaaggttcagagtcttcctttctcagcagtgaggaggtctagacgtcagcagttttggaacattgctgctgccaaagagtctatttgggattgtagagaacaattcgagagagtgattgaaagaggggatgagaaggcactcactaatggtgggggatttgctgcagggggtccaggggtgaatggtcctgctgggagtttgtttgccattacaaaacctggactgtttgttgagcacggaggaggtgatgattttggggggtcctga

SEQ ID NO: 2961 - DNA, 159 bp, Homo sapiens
  SIMILAR (54)..(113): 601254mologous to Oryza sativa similar to RING-H2 finger protein RHA1a (AF078683),accession number AP000616,Smith-Waterman Score=62.
atgaaggaagaaaggaggaggaggagagaagaagaaggagaaggagaagaagaagaagaagaagaagaagaagaagaagaagaagaagaagaagaagaagaagaagaagttgttttactcacaccagggacaggtgcagaggacttcaagaaacactga

SEQ ID NO: 2962 - DNA, 318 bp, Homo sapiens
  SIMILAR (102)..(251): 801254mologous to Arabidopsis thaliana putative protein,accession number AL162506,Smith-Waterman Score=202.
atgggccccatccacaagatatctcattatgtatatgcaaatatttcaaaatccgaaaaggtcttaaagtcagaacacttccgctctcaggcatttcagcctgggcaacagagtgagaccgtctcggaaaaaaagaagaagacgaggaagaagaggaagaagaggaagaagaagaggaagaagaagaagaagaagaagaagaagaagaagaagaagaagaagaagaagaagaagaagaagaagaagaagaaatctgaatgtctttactcagggttatatagtcattataaacagaagctctataaccagactatttaa

SEQ ID NO: 2963 - DNA, 688 bp, Homo sapiens
  SIMILAR (172)..(687): 1001254mologous to Escherichia coli Formate dehydrogenase a chain (EC 1.2.1.2),accession number D90792,Smith-Waterman Score= 878.
aagccaaagaagaagaagaggaagaggaaagaagaagaagaggaagaggaagaagaagaagaagaagaagaagaagaagaagaagaagaagaagaagaagaagaagaagaaaagaagaagaagaagaagaggaagaagaagaagaatgcagcagtaggttgtttacagatcatgcaagcaatatgtacggggcaggctcgagcattgatctgcatggggggcaattttgcgctggcaatgccagatcgggaagcgagcgctgtaccgttaacgcaattagatttggcggtacacgtagccactaagcttaaccgctctcatctgttgaccgcacggcatagctatattctgccggtcctgggacgtagcgagattgacatgcaaaaaaacggtgcgcaggcggtaaccgttgaggattcaatgtcgatgattcatgcctcgcgtggcgtgttaaaacccgccggtgtaatgctgaaatcagagtgtgcagtggtcgcgggaatcgcgcaggcagcactaccccagagcgtggtagcctgggagtatctggtggaagattatgatcgcattcgcaatgacattgaagctgtgctgccagagttcgccgactataaccagcgcatccgtcatcccggtggttttcacctgataaatgcagctgctgaaaggcgctggatgacgccgtcag

SEQ ID NO: 2964 - DNA, 435 bp, Homo sapiens
  SIMILAR (315)..(166): 501254mologous to Plasmodium falciparum serine repeat antigen,accession number AB021826,Smith-Waterman Score=87.
atgggagaaattggccaaaacaaaggggctacaggcctcatccagatccaaaatccaataaagcagtcaaatcttaaagttctgaaatcatcattttggctccatgtctcacatccaggtcatgtgaatgcaagagggcatgctgatgcaagaggtgggctcccaaggctttggcagctctgttcctttggctctgcagagtacagtctctttggtgctttcactggctggtgtttagtgcctgtggcttttccaggaagaagaagaagaagaagaagaagaagaagaagaagattaagaagaagaagaagaagaaaagaagaagaagaagaagaagaagaagaagaagaagaagaagaagaagaagaagaagaagaagaagaagaagaagaagaagaagaaaaaatcttcctgggtcacagagttggcatatga

SEQ ID NO: 2965 - DNA, 1294 bp, Homo sapiens
  SIMILAR (899)..(1102): 801254mologous to Mus musculus Pro-Pol-dUTPase polyprotein,accession number Y12713,Smith-Waterman Score=299.
aataataaggagggcggtcttccgttggttttggggttaaaggagttggggccttaatatgattagaccccaaaatactaaggactctaattctaattgtttggagaagactgatagcccttggtgtgaactgtttaaagagttatacaaaataaatgcctttgacactcctgattcattgctcatgagaggcaacgagtttagtgaccctatacatcatacctttgaccatatgtggagaactaaggaacataatgaagctggttggttgctcctaagttcagtggataaagtgatgaaagaaaatgatgaactcggggattctatctcccagcttcagaagcagatactgagcctcaaatctgccaagattgccctgagtgagagtctaatctcctgtagagaaagaactgaaattgtggaaaaatagacataagctcttatggcactgattagaaaagaatgggaccctgcaactggaatggggacatgtgggaggatcatgatgaagctggggacactgagtatgtcaactctgatgagtctttttgccagaaggaacagcttccctatccccagtagtggcaacatcccctccctgacccatgctgccatcagcctttccaactttcaggaaataaaccctgtgctgcctgaggcaacagtgatggcctcccctgaggtagttgccaggcaaaataatgttgattctcctcaggagccaccaccaacacccccatttgcttctagacctataactagactaaagtcctggtgggcccctagagatctaacagtggaaaccacagtcactcaactacacaacttaaatacagtgggaataattgagtcgcgaggtggcaggggccatgtggcagcactcaacagtcaaaggcaaggtgaatcacagcagaggcttctgggattttggagcaaggccctgccattttctgcagataactactcttcttttgagagacagctcttggcctgttactgggctttggtggaaactgaacatttaactatgggtcatcaagtcaccatgcagtctgaactgcctatcatgaactgggtgatttctgacccatctagccataaacacacaatgcttctgccgaaactaccatcagtggactcacagaatgccttatccaccgtcatggtattccacacagcattgcctctgaccaaggcactcactttatggctaaagaagtgtggcagtgggctcatgctcatggaattcactggtgttaccttgttccccatcatcctgaagcagctggattga

SEQ ID NO: 2966 - DNA, 495 bp, Homo sapiens
  SIMILAR (124)..(303): 911254mologous to Arabidopsis thaliana putative protein,accession number AL162506,Smith-Waterman Score=279.
atggctgggaagcaaggtagatccgaaggtgctagcagctggaggttgtcatctgtcttgcagctgaacagccaatactttctccaaggtgcacagcagtgcaccttcctagcggccacagcatggaaaaaaagaaaagaagaagaagaagaagaagaagaagaagaagaagaagaagaagaagaagaagaagaagaagaagaagaagaagaagaagaagaagaagaagaagaagaagaagaagaagaagaagaagaagaagaagaagaagaagaagaagaagaagaagaagaagaaggagaaccctttctcttgcttttagtaaatggggtcttaattcctggtgtgagatcttgtcttgactctacctcgcaattcagcttgacagggatgcttcttcaagagaaatcagaaatatttggtctagcggtatgtagtccactcatcaaacggaaaggaggacatattccagtactcaacactgtccctggatga

SEQ ID NO: 2967 - DNA, 1416 bp, Homo sapiens
  SIMILAR (1347)..(1412): 541254mologous to Mus musculus Pro-Pol-dUTPase polyprotein,accession number Y12713,Smith-Waterman Score=62.
atgattattattaaaactcaaaaactaacagatgctgccaaggttgtggagaaaaagaaacacttatacactgttgttgggaggccaaatggttacaaataccaagaagaagaaggagaagaagaggaagaagaggaggaagaggaagaagaagaagaagaagaagaagaagaagaagaagaagaagaagaagaagaagaagaagaagaagaagaagaagaaaaagaagaagaggaagaagaggaagaagcagaagaaaagaagaagaagaaggaggaggaggaggagaggaagaagaaggaggaggaggagggggaaggggaagaaacagggaacaaggaattacagagtagagacagggatgatctaggtggagaagaaaaagtccagccagtttggccttatggaggacaattctcatatgaaaatctcaagccatgctctttgcaaattgtctgcacatttgtcatagctcacattctccctctgccaatcctgtttcttcccattcttttcacagcacgctcagatgtttttcatgtaaaacattgcaaccctgtctgctttgttgtattggtcaaatttgactcatccgttaaatcaagagttagaaatgggagacttcctcttgatgttgcagaagtgaacactccacatgaaagcaggactgcaatggactcttgcagacagcctattgtgggacctagtgattgtcttcagaagcagacactgagcctcaaatctgctaagattgccctgagtgagagtcttatctcctgtagagaaagagctgaaactgtgaaaaaacagacaagctcttatcatacgagtgagtggtgtacctgcaaggaaagatgcatgcacagccttgccaggagacggctctgcaacgggtacaggctgctgtgcaagctgctcccgcttgggccatatgacccagatccagcagatccaatggagcttgaggtgtcagtggaagatagggatgctgtttggagcctttggcaggcccccaaagccacccctgtcatcgcccaatgggcccatgaaaaacgtggccgtggtggcagagatggaggttacacatgggctcagcaacatgaacttccattcacaaaggctgacctggctatggcccctgctgagtgcccaatttgccagcaggagagaccaacactgagccctcgatatagcaccattccttggggtgatcagcaagccacctggtggcaggttgatcatattcaacttcttccatcatggaaagggcagagccttgtcctcactgaaatagactcttactctggatatgggtttgcctgtactgcatgcaatgcttctgccaagactgccattggtggactcatggaatgccttatccatacaatattgcctctgaccaaggcactcacttaa

SEQ ID NO: 2968 - DNA, 432 bp, Homo sapiens
  SIMILAR (354)..(407): 681254mologous to Platichthys flesus metallothionein,accession number AJ291833,Smith-Waterman Score=67.
atggggccccaaagtgtctatgaattgaccgaaaatgaggaggaaaatgttgacgtcatccaattagcagagattaaccagattaggttttctggcacttggcagaatgatcaagccacttacgagcagcatgctgaagaaagaggaccacaaggtcagtgccaagcgctaagcacaaggagaaatgctggtgccacatggaagccagtggcattgcattcgcaagcacagaccaatcggctctctgtaaaatggaccaatcagcaggatgtaggtggggccagatacgagagaaaaagcaggctgcccgagccagcagtggtaaccctctggggtccccttctacgctgtggaagctttgttctttcactctttgcaataaatcttgctgctgctcgctctttggggccacactgcctttatgagctgtaa

SEQ ID NO: 2969 - DNA, 378 bp, Homo sapiens
  SIMILAR (301)..(375): 641254mologous to Arabidopsis thaliana putative protein,accession number AL162506,Smith-Waterman Score=80.
atggagccagattgccagggttcgagtcccgtacttggctgtgtgaccttggatcaagccacttacgagcagcatgctgaagaaagaggaccacaaggtcagtgccaagcgctaagcacaaggagaaatgctggtgccacatggaagccagtggcattgcattcgcaagcacagatgccaaattctgtgctgctgctacaatccattgagactttaacacccacatggaatacgcaattgggagagagtgaaggagtactgaaggcaaactcaggggctacacttcacaaaaataggagatttggaatttacaaagaagaagaggagaaagaggaggaggaggggaaggaggaagaaaaagaagaggaaaaagagtaa

SEQ ID NO: 2970 - DNA, 727 bp, Homo sapiens
  SIMILAR (307)..(519): 381254mologous to Homo sapiens hypothetical protein,accession number AL117235,Smith-Waterman Score=86.
atggagggaagacattcccgaccctacctcacagaggactgtgcagaaatctgccagctaactcagacagcagtcacagattcctgtacagaagagaaagagagtcatcaaatccaaataacttcaagccagctcccaaagcaagcctggcaaattgctcagctgacagcagcatcgtgtcaactgaactctttcttgactgcaatgccatgggctcagtggattgggcctgtgcgggaagaacccatcaggcagttacgaggacatccaactggcctggccaatgctgccagcctgacaatgagcccggatttgcacggccagcccggatttgcaggtctctccagcgcggccgcttgtggtctggcagtgggctatcatccgcgcctcccctccacacgccaggatgggcttgcttcccatctgccaggcaactcagggtccgcagctctgtgtggcaagcccatcagataaagagggattcctgctcttgtttgggaaagaaatagccagactcacaaacaagggaggggcaaggttatataaatgtgatattgttcaaggagtgtgctgtgaagatcccctagctaccttagactgggaactaagaccagatttggagcaaggagagaggcccaccccagagagacacaagccttttttgcttgggaagagtttctcagcaccactgattaaaatttgccgttatgaatggcaaatgttctag

SEQ ID NO: 2971 - DNA, 474 bp, Homo sapiens
  SIMILAR (125)..(6): 511254mologous to Homo sapiens Human AX56_8 secreted protein,accession number W58845,Smith-Waterman Score=73.
atgcatgataagtgcttaattaagatggaattaaatttgagggttgaagaaatggacagaaacgttccgactgactgcaatcaggttcggtactctccaagttttaggcatccactggggttttcagaattcatccccagcggatgtgggggacacttgaatgtccctcggttcatcacagtgattaaaagtagcagccagcatgctacctggatcctcaaagctcagcccatcatgtccttcaggtcttggtctaaatgccaacttttcaccccaattcaacaatgtcctcggctttgcaaacaagctgttaacagtgaaaatggtactgcctctgacctgctgaagcagaataaacaagacactgaaaccactgaggttgaaaattctgctgttcagacaggaagtcgtcatataccacacactgcacaatacgagaatgctgggatagaagaacaagttgcagaggattag

SEQ ID NO: 2972 - DNA, 633 bp, Homo sapiens
  SIMILAR (286)..(510): 341254mologous to Takifugu rubripes putative transcription factor (forkhead /winged-helix class),accession number X97021,Smith -Waterman Score=95.
atggtggcccggaacctgcgcttgagagcaagactgcctaagtttaaaacttgctctactgtggctgctcctgcaggcctcttatttggtgcctccacatcttcagctgaaaatgagaacagggcgtcgcaggtagtatgtagtcaaaacacttccagtatgatgtacacagcacgctgcccggagaagcccgcaggcatcagatcccagtgccttctgctcaaccctggagccctgtggacggggaaaaacgatctgcttctcataaagattcagcccgtctctgacccgccggtgaagcggcttcccgtcacctgtttccatctcccattcgcacagcaggtgattccacttccagaacttccgaagcacagcctacacagccacacgcagatgcgtgtgcaaaccagtacttctgcacacatgaatgcctgcacaggcttccctcagtctgtcccctacccggtcctcccacgctgttggaggagccgcttcccactctgtccttcgatggacacgctgatgcagctgggaatgagcttggaaacgctaactgaccagagtgatttctgggccctgagtgcattacagatggagaaagcttctgaattctctatggaactccaggcctga

SEQ ID NO: 2973 - DNA, 516 bp, Homo sapiens
  SIMILAR (314)..(409): 511254mologous to Drosophila melanogaster Bkm-like protein,accession number K01664,Smith-Waterman Score=66.
gtaatgcttatctgcaatcttggcacgagggcgaagctgtcactgaaatgaacttgatcttgatctgctttgatatggggacagaatccccgactgcactattgagggagtttcagaagagaaggaagaggtgctggaaggatgcttttgcagttatgcagcaaggaaacgaccagggctgtgaagatctacagaggaagtactccagtgtgggggaggcaagggaagaggacgaaaatgatgagaatgacactgaggtcattgtttagagcagatctcaagcagccgtttggccacgccatatcctttgtggagcatagtgggttatctatctgtctgtctgtctatgtatctgactatctatctatatatatattcagcttctttactgctacctacacatttttctccaaattttattaatttcatagtgttttgatttgggtggcagatgacttttaagcagtgggtgtttgccggccagatctttcctggcatgcggactgtgaggcaaag

SEQ ID NO: 2974 - DNA, 565 bp, Homo sapiens
  SIMILAR (409)..(278): 421254mologous to Homo sapiens Human normal bladder tissue EST encoded protein 170,accession number Y60498,Smith-Waterman Score=68.
tcatcttggaaatgttgagttttgggcccctgtagaagacccagctgagatttgcaggtctgcatcaaatggagaattcatcagagaggcaatggtactcaaaaccatgacagtgaaaggtgcttccctggtcagtttctgccacgggcctgtttatagggcacgggtttaaatagctgtctcccccctgcctgcactgccagattcccacgagggccagagatcatgtccggctggtcgatcatcctctccctaggaaaaggctctgcaaagttttcctgtaaagggccacacaggaaatatttcaggccttttgggctgtgccatctctgttgctattcaactgcctttgtagcgtgaaagctgccttgatgatatgtaaacagatgggtgtggctgtgttccaataatactttatttatggatgcagaaatttgaatttcccatcattttcatgtgttgaagaatagtattcttgtgatcctttttccccaaccatttaaaattgcaagagccattttagcctgtgagccataccctcgtgccaagctaagcgtagagatgt

SEQ ID NO: 2975 - DNA, 346 bp, Homo sapiens
  SIMILAR (317)..(144): 371254mologous to Caprine arthritis-encephalitis virus pol protein,accession number L78448,Smith-Waterman Score=77.
  misc_feature (1)...(346): n = a,t,c or g
ccacgtaaggccctgagtaggctccttagttgctgctttacctgatgagggccaaagagattaactctgcctcgttgccatgtctcagaaaagttgccatatttnacccagaaggggcttgttttcctcttactcttactttaaccatgtgcctggaggagccattctgggctcttgcacttgcccagcctttctttgccaggggcagagaagggaaagggggtagattgagtgtgccaagggccgtgcaaaggctttgtnataaagtcatctccagttaggatctgcacctgttttccttncgtaatagtgcctggcggccttttctnaagttacaggtggttgg

SEQ ID NO: 2976 - DNA, 369 bp, Homo sapiens
  SIMILAR (197)..(310): 411254mologous to synthetic construct hirudine,accession number A02168,Smith-Waterman Score=60.
atgtatgaagagactgcttacggaactcaaagactaaacgtgaatactactgtggcccagacacggatcgaaaacacttctcccagtgcttctggtgctatgtctgctctcccgagagcgtccagcaaggtcttccagcagacaggcctgagtgagaagcagttggcccttggggagcggggagatgatggacgctgtcaccggccagaaaaccagttgccccttgggatcggggagatgatgaacgctgtcaccgtcagaagggagcccaagtggcccgtcaagccacaagaatgggcatataagggagcagctggaggggcctcggagagcagccaggctagtctggggatggaccacctgctctga

SEQ ID NO: 2977 - DNA, 2806 bp, Homo sapiens
ttgggtccttctgctcatgcattcagttcaagtgtcctttatcccaggttcagagatgctgcctttctgaagaagacatctgaccctagcaggttggccagtgttattgaacaacaaaaatgggataaattgctttcatgattagctcaccttcttctggttttagcccttctgttctctgtacacgtgaacattcatgacatcaccttctggcttggttgcctctgaaaggaggggaaagtctcttggtaaacctatctcttttgggcggtttgctgtttctttgctgccgcctttgcaggtctcctctcactggttgcaggctttcatagcaaggtttggcgagaaatgttccaaacatctcattttggattctaggctgccacccctcattctgtgaaacgtattagcatgtgttcgccccaagatgactattccttgtgagccagttaatgatgatattctacgcccttcccttctaagctgtagttcaggaatccagcccacatagacagactcttgctttccatggtgtagtcaatgccaagtgatgcatctaggcaggaaaatctactctttgcttttttgggggcaattagtacatttgtgaagtgcagcatccaagaaacagcctgttttttcatcccttgagaaaggagcagtcattgcagcttttctgtccttgtcggcctgcagttcctggggaaaagagtacatctgagctacttgtccaagcctctgtctgcaggtgacaggttttggggggaaatgagatgcattaagtagaacatcatctcgggtcagacattgccccttttgtttgccaatgccccagtcctagagacttgtcctgacagtgccgcacacctacttttgatctctcagagcaggtggctccatccccagactagcctggctgctctccgaggcccctccacctgctccccttattgccccattcttgtggcttgccgggccacttggcctcccttcttgccggtgacagcgttccatcatctccccggctccccaagggccaactgcttctcactcaggctggtgtcatttcaggaggaccaaagcctgcgtgagcttttttatttttcagtaaaatggtgcttttttccttacttcgagatactatatataaataataatgtaaatggacaccttttcgtacggagctgttttgagtattgctttacagagctcactaaatcagcttcaacaatcttgagctctgtggctcctcaccctgtctgcatggaaggaccttgctggacgctctcgggagagcaggacatagcaccagaagccactgggagaagtgttttcgatccgtgtctggggcacagtagtattcactgtttagtctttgagttccgtaagcagtctcttcatacatttcttacagtctgggagtgtactgactaaatctgtgtaagcaaattgaaatactctttcttttagggtaggcgtcacagtgggttttttttttcctcagggataatttctattacaatttccttactgtcagaggggaccagatctttccctcactgtgggcagggggccgtgcagggtgggataaagggaagagctgggtttcccggagagtgactgttaacagcgttgactcgaagctaggagatggaggggggtggccgtctcttaggacattgggcacctctcagagcctcctgaggggcttctttgtcttctagaatctctaccggtggtcctcctgcaggttctggctcacagacatcatcatgccttttttttccctccctgaggcgccttggcagaagagcgtgaccctgtgagccaggccccccttagctctgcttcagatcacagaacacagacagactcgcgagttgctggacctctttcggtattaagtgtttgaatccatggtgggccttttgcaagtagcgttagctctttttaaatgttgaactgagctaaggatgcactttcttgtggacatagaaggggcccacgtaaggccctgagtaggctccttagttgctgctttacctgatgagggccaaagagattaactctgcctcgttgccatgtctcaggaaaagttgccatattttcacccaggaaggggcttgttttcctctttacttctttactttaaccatgtgcctgggaaggagccattctggggctctttgcacttgccccagccttttcttttgccaggggcagagaaggaatgggaaaggggggtaggattgagtgttgcccaagggccgttgcaaggggcaggcttgcttttccacccatctgctgaggggagccctctcgctctcgctccttgcctctgttcacacctgttgtcttggaagaggatggtcccttttgtcttaaagctttgtgataaaagtcatctccaggttaggttctgcacctgtttccttcgtaatagtgcctggggggcctttcttgaagttacaggtggttggggagccctcttcgcatgcagaacatctggtagattgatctgccaggctgggtggttctactgctttctcaatttctaagaaccttttttttttcttaaagagttctgctgaattatttgacaatatttgtaagtaccatggttcccttgtgggggatgctctgttctggtttctgttttcaaatcaaatgcctgtttgggaggagatgaacgtatttagtctattagatttgcactgctggattttttttttttaaagtgtaaccttgaatagctgtcttattgtttatcctgtaagattagtcaatcgattaaagtttgataatt

SEQ ID NO: 2978 - DNA, 551 bp, Homo sapiens
  SIMILAR (242)..(448): 351254mologous to Homo sapiens T-cell specific surface glycoprotein CD28 isoform 2,accession number AF222342,Smith- Waterman Score=72.
ggccccagtcacttaggctcaggccacatgttctgaccgggggttttattgttagttccatttcaaagcctttgcaatggtatttggttctgttaagcatgatcagcagtcttggagctggcgaggtctatatcccttactcagtgcagttctcaaagtcctttgtatgtcgtacaggatcacatctgtacatacacaccttgtggggtaagcccagaagctcatacacagcttcatgggtttactttcccaagcacttcctccctccctgcaatctccccagcactttctgcttccctcagcttccccttttcaaccttgtaggccatggaaggtgttgctgtcgctttaggtgactcttctctgccacacgcttcctgtggcctttgccttcctctggtgtgattcggcaggaagaccaaagaggggaaaaagaagtcacggggacccctttgggaccctacaatcagagaggaaggttactttccttcagagctttaatcactgaaaggcctggcggctgcactggtcactgtcactgcctctgttaa

SEQ ID NO: 2979 - DNA, 478 bp, Homo sapiens; identical to SEQ ID NO: 959
  SIMILAR (312)..(440): 321254mologous to Conus textile conotoxin scaffold VI/VII precursor,accession number AF193260,Smith-Waterman Score=62.

SEQ ID NO: 2980 - DNA, 1191 bp, Homo sapiens
  SIMILAR (113)..(298): 331254mologous to Felis catus tumour necrosis factor receptor p80,accession number U51429,Smith-Waterman Score=67.
acagtttgcccagcagcaattaaggtgaggctgtgatgatgccaaaaatgactggctgtttgctgccttatcactgcctgatgtggatatggagctgggcagagctgctcagcctctgcaaggcaattcagtggccctgggtggcacagcatgggctctgccatctgcttggaagccctctgtaagttcccacagcaccttcacctataccccgactagtacgctcttcaacctttgcagtcactttgcacaacaggtacggttttcggatggcagcttcagcatctcactccctggtccttttccagggacctcgatgcctgaactttcatcagggccaactcatgcaccagggacaggagggacagtcgggtctggcactgatcactcaccaatcgtggagacagcagtgaagaaacaggtcagctacattacccccggagatgccatcgcctggtgctgatttgaaaagagccagattatctactcacttgttctcatgaaggcattatgggaagttaaaggtaaccttcccaggtaaaggtaacggccgtgctcctggagggagaaatttgatgagcgaatgagcttgcaggctggaggcccgagagccagtactcgcctatccctggctgatgcgtttggggctgggggtaggatggtatccacagggctgttgtgcacaactgcagggggcgccagtcatccagaactcacagtgaaaggccccctggagcaccagacacattgtactctctgtgagtgatgcgcaaaaggagcccctgctggtgagattttcggcatctctcctgagtctctcgagaagctactcttcagggaaatgagacctacgtccttggtattgcctctatctgctggggttaccacagagaagagggttatcagcaaacaaaggtcagcaggacccatgagggcaggaccgtgtctgcttttgatcaatcaagtgctggatattccatgggctctcaatcgataccgtaaggtgaacgaaggagaagggacaatggcaggggatgtcagggaactttccacaggtagatgatgtacattctggcagctcaaggtcctcttttcaggtggtcaccctcagacatcaactgttaaggccttttcaatgtcagccaagtggtgcctgctcctgtcatccagtctccactgagccctcccatg

SEQ ID NO: 2981 - DNA, 375 bp, Homo sapiens
  SIMILAR (7)..(168): 311254mologous to Zea mays ribosomal protein S19 (AA 1- 93),accession number Y00141,Smith-Waterman Score=68.
gtttttgcagcccacatgaaggtaaacattgaagaggaagggtgccccaagcaggagaagcagcttgaacaaaggcaggaccgtgcaagccaaatccaaggaattgctgcaggtcattcaatttggctgcagcaaggggttcctcatgtgggagactttttcagaaatgatcctggtggaagtacaattcaattcctgaagagccttggatgtaacagcaagcagtttggactctttcctgagggtgatagcagtgaaagaatgcaaaacgggatttttacccaaatttgtagattagaggggaaagatcccagatcccaagtaatgaggagctgcaatgatccatctgagtgctgaccagtggcctgaattaag

SEQ ID NO: 2982 - DNA, 541 bp, Homo sapiens
  SIMILAR (208)..(300): 411254mologous to Mus musculus prostate kallikrein,accession number AF019086,Smith-Waterman Score=79.
aatttgtcaatgcagttacccagccctgagccggttaatgtttgtgacaagctcctcttcctctgcagccttgctttggtggctggaggatgagtccttctaatggtcaggtggactttccctgggctgggccatctgctgccacccgtgttgaactgggaaggactgggagacacctaaagactgattacaaaggattctctggaatggtccaggtctacagtgacctcatggagtgatgggaacccactactgtgcatctggctacaaaagctacctgcagaaaactgtcttcatcccagctggttccaaaatgctcccctgcgaacactggcagcagaaccggactcaactagagcaggggccgcctctgcagcccagcgaggatgaagccagggctggtgtctttggaaagctcctgtcacctgaactgcccggcactgggagccatcgctgtacctcacggcgcccgcgagacgggtggtccagtgccctttccacggccgcccgcggcttggatggcagtgtgaatggtgcttga

SEQ ID NO: 2983 - DNA, 345 bp, Homo sapiens
  SIMILAR (266)..(325): 401254mologous to Homo sapiens Human secreted protein, SEQ ID NO: 6595,accession number G02514,Smith-Waterman Score=46.
gcattcacaggactaagctaatcagaagtcaaacctagggatgcatccaaaatggagttgctcttgtctctacagctaggatttagaacctggacctggacgcctcactgcttcctgcttccttagtgccttggggcctggagtcagaataatctagctcaaacttgggagtcaaatgctccagggtcttgaactggtcagagctctcaatgccgcaaagacactttcagaagaggaacgaaggcctggaaggaaaagcatcaggggaacgacgcttacgtctctcctcctccctccagtctcccaccagtgctcccattggctgaagccaaccagaagccacag

SEQ ID NO: 2984 - DNA, 2238 bp, Homo sapiens
  SIMILAR (1457)..(1585): 901254mologous to Homo sapiens Polypeptide identified by the signal sequence trap method,accession number Y02377,Smith-Waterman Score=177.
atgagtttcctgtatgaattattaagacttttaaagtttgcgtttttaaagaagtttaaaggcatttatatgcagtatattgagtatggacagcagtctagagatcctcctgtgaaaatgcaaggctctatcacaacccctggaagtattgcactggctcaggcccaggctcaggcccaggttccagcaaaagctcctcttgctggtcaagttagcactatggtaaccacctcaacaactaccactgttgctaaaacggttacggtcaccaggccaactggagtcagctttaagaaagatgtgccaccttctattaatactacaaatatagatacgttgcttgtggccacagatcaaactgagagaattgtggagcccccagaaaatatccaggagaaaattgcttttattttcaataatctctcacagtcaaatatgacacaaaaggaggagctggtgaacaacacagagttggtgcagagctaccggcagcagattgggaacgtggtgaaccaggccaacctgcagctcttctggaacatgtacaacagccgcagagacctggacattaaccggcctggaacggtgcccaatgccaagacgctccgctgccccgtgatgctggtggttggggataatgcacccgctgaggacggggtggtggagtgcaactccaaactggacccgaccactacgaccttcctgaagatggcagactctggagggctgccccaggtcacacagccagggaagctgactgaagccttcaaatacttcctgcaaggcatgggctacatgccctcagccagcatgacccgcctggcacgctcccgcactgcatccctcaccagtgccagctcggtggatggcagccgcccacaggcctgcacccactcggagagcagcgaggggctgggccagttaaacttgaagtttgaaatcgaggttctctgcaagaaccttgcattagacatcaatgagctaaaacctggaaacctcctaaaggataaagatcgcctgaagaatttagatgagcaactctctgctccaaagaaagatgtcaagcagccagaagaactccctcccatcacaaccacaacaacttctactacaccagctaccaacagcacttgtacagccacggttccaccacagccacagtacagctaccacgacatcaatgtctattcccttgcgggcttggtaccacacattactctaaatccaacagcccatccacagttgaagcagtgtgtgcgtcaggcaattgaacgggctgtccaggagctggtccatcctgtggtggatcgatcaattaagattgccatgactacttgtgagcaaatagtcaggaaggattttgccctggattcggaggaatctcgaatgcgaatagcagctcatcacatgatgcgtaacttgacagctggaatggctatgattacatgcaggaaccttgctcatgagcatatctaccaacttaaaaaacagttttgcctcagcccttcgtactgcttccccactacaaagagaaatgatggatcaggcagctgctcaaatttaagctcaggacaattgttttcttctttcaaggttggtggtgtggacccaaagcagttggctgtttacgaagagtttgcacgcaatgttcctggcttcttacctacaaatgacttaagtcagcccacgggatttttagcccagcccatgaagcaagcttgggcaacagatgatgtagctcagatttatgataagtgtattacagaactggagcaacatctacatgccatcccaccaactttggccatgaaccctcaagctcaggctcttcgaagtctcttggaggttgtagttttatctcgaaactctcgggatgccatagctgctcttggattgctccaaaagtcaatggagaatggcttaaactacatggctgtggcatttgctatgcagttagtaaaaatcctgctggtggatgaaaggagtgttgctcatgttactgaggcagatctgttccacaccattgaaaccctcatgaggattaatgctcattccagaggcaatgctccagaaggaatggatataacaactaggcagaaggtcaacaagaaaagagaaggcttcaacgataccataaatcaaccagctacacctaatagacaatctatagaacacttgacccaacaagagcagaatatgcagtcttctcaaatgcacatggaacattctccagagtag

SEQ ID NO: 2985 - DNA, 579 bp, Homo sapiens
  SIMILAR (1)..(306): 961254mologous to Homo sapiens unnamed protein product,accession number AX059850,Smith-Waterman Score=524.
cggtacccaaaaagccccactcactacttcagttgcaccatgctgtacctttttgcagagggcaatacggaagccatccaagaacagatcacaagagttctcttggaacggttgattgtaaataggccacatccttggggtcttcttattacctcaattgagctgattaaaaacccagcgtttaagttctggaaccatgaatttgtacactgtgccccagaaatcgaaaagttattccagtcggtcgcacagtgctgcatgggacagaagcaggcccagcaagtaatggaagggacaggtgccagttagacgaaactgcatctctgttgtacgtgtcagtctagaggtctcactgcaccgagttcataaactgactgaagaatcctttcagctcttcctgactttcccagccctttggtttgtgggtatctgccccaactactgttgggatcagcctcctgtcttatgtgggcacgttccaaagtttaaatgcatttttttgactcttggccaaaatttagaagatgctgtgaatatcattttgaacttgtgtcaatacatgaaagagaaaaaaaaaaa

SEQ ID NO: 2986 - DNA, 835 bp, Homo sapiens
  SIMILAR (1)..(93): 931254mologous to Homo sapiens NDRG4-Bvar,accession number AB044945,Smith-Waterman Score=150.
ggggcgtcgcagtttcctcaggggtaccagtttccctccatggagcagctggctgacatgctccccagcgtggtgcagcatgtcgggttcaaagtatgtgattggcatcggagtgggcgccggagcctatgtgctggccaagtttgcactcatcttccccgacctggtggaggggctggtgctggtgaacatcgaccccaatggcaaaggctggatagactgggctgccaccaagctctccggcctaactagcactttacccgacacggtgctctcccacctcttcagccaggaggagctggtgaacaacacagagttggtgcagagctaccggcagcagattgggaacgtggtgaaccaggccaacctgcagctcttctggaacatgtacaacagccgcagagacctggacattaaccggcctggaacggtgcccaatgccaagacgctccgctgccccgtgatgctggtggttggggataatgcacccgctgaggacggggtggtggagtgcaactccaaactggacccgaccactacaaccttcctgaagatggcagactctggagggctgccccaggtcacacagccagggaagctgactgaagccttcaaatacttcctgcaaggcatgggctacattgcgtacttgaaggaccgaaggctgagtggaggagcagtgccctcagccagcatgacccgcctggcacgctcccgcactgcatccctcaccagtgccagctcggtggatggcagccgcccacaggcctgcacccactcggagagcagcgaggggctgggccaggtcaaccacaccatggaggtgtcctgttga

SEQ ID NO: 2987 - DNA, 741 bp, Homo sapiens
  SIMILAR (535)..(660): 401254mologous to Danio rerio Hoxx4 protein,accession number Y13947,Smith-Waterman Score=66.
atggatgccagccaaagatacaagattcctgggtcagagacaaaggacttcatcactcacagcaaaagcactagccagagctgcataggattgcttcggttctccgacatcacccaagtcccacaaagacaatgcaaagggcccatgatggagagtaacactgagcttggaacatttgccacttctctagcgagtggaaagaaacctggtcttttcctggtgggaggtgttactgcatctctcatggctgctcatggcaaatacagccctgcgaaacagcccggtgaggagcaagaaatgaaagccagcatctgcgtgtcacctgcagagcgccctgcagctggtcctctcatttgccctccaacagtgctgcaggctggtgtgaagagagtgacccgggaagctccaagacccagatttaaactcagttatgacgtttccatgagtgtcatgactgagcaagaaggtgaagagcccgcgcctgtttcctcatctgcggaacggagcgaacacgccacctacttcatgagacttaacagacgatggaagtggagcattcagcacagagcctggcacatgaactcttcctctgcacccccacccagccctagcaccgaatactccactcccttccagcagaccctccagcagggaccctgtggcattgcacaaatgctctctgacaaacacctacaagtccctggtgcctcagcctttggggcaaaacccaaccctgaataa

SEQ ID NO: 2988 - DNA, 1005 bp, Homo sapiens
  SIMILAR (394)..(576): 861254mologous to Oryctolagus cuniculus Phospholipase,accession number Z12841,Smith-Waterman Score=283.
atggccattggctgcccctcagggaaggcctcatcattggctgcacaaggctttagctttggtgccccaaagcctatcacgcagagatatggaggtaagaacacaccagatcagccagtaacagaggacaacatgctgctccccagccctgagcacgccagtcttcaggtcctgccagagcctctgtttcctaaactgaccaatggagacaaatacacctaccccaaaatacggctgtacggattcaacgaggtgaagtgcatgcaagggcttggcacacgaagcccagagagtgaggacagctgtgagcgacctccagtctgctggagtggagccagcattccacacacggcaacagccaaaaggaatttatgggaagagggagagcgggagctggaaccagtgggccgcaagactacctccaacaacttcacccacagccgagccaaactcaagtgcccctctcctgagagcccttacctctacaccctgcggaacagccgattgctcccagaccaggctgaagaagcccccgaggtgctctactgggctgtcccagtggcagcgggagtcggcccttgggagaacccggaggacctatacccagttccgtgttcttctgggcttcagtgtctgtttctatacaatgggaacagcatgcattcccctgctttttcctatagactggaaaacgtggtgaccaagtcacacatcccagcttatgctcccggcttaagacagtgtaacgacaaaggtaacccttacactcctggtttgagacagtataacgacaaaggagctgagtcgagagtaggagaaaaatgcataaataattaccaggtgagagaacgccgagccgtcgccgcagcctccgccgccgagaagcccttgttcccgctgctgggaaggagagtctgtgccgacaagatggcggacggggagctgaacgtggacagcctcatcacccggctgctggaggatgtgaaagccatccagcagtcttaa

SEQ ID NO: 2989 - DNA, 4041 bp, Homo sapiens
  SIMILAR (816)..(1256): 761254mologous to Homo sapiens protein phosphotase 1 catyltic subunit beta isoform,accession number X80910,Smith-Waterman Score= 575.
  misc_feature (1)...(4041): n = a,t,c or g
tttcgtgtggcggcctgggtctgacgcggtcctgttcgtgggggcctctcttggttatttatttattttccgcgggtgcctccgagtgtgcgcgcgctctcgctacccggcggggagggggtggggggagggcccgggaaaagggggagttgtagccggggtcgaaacgccgcgtgacttgtaggtgagagaacgccgagccgtctacgcagacttcgccgccgagaagcccttgttaccgctgctgggaaggagagtctgtgccgacaagatggcggacggagagctgaacgtggacagcctcatcacccggctgctggaggtacgaggatgtcggccaggagagattgtgcagatgactgaggcagaggttcgaggcttatgtatcaagtctcgggagatctttctcagccagcctattcttttggaattggaagcaccgctgaaaatttgtggagatattcatggacaatatacagatttactgagattatttgaatatggaggtttcccaccagaagccaactatcttttcttaggagattatgtggacagaggaaagcagtctttggaaaccatttgtttgctattggcttataaaatcaaatatccagagaacttctttctcttaagaggaaaccatgagtgtgctagcatcaatcgcatttatggattctatgatgaatgcaaacgaagatttaatattaaattgtggaagaccttcactgattgttttaactgtctgcctatagcagccattgtggatgagaagatcttctgttgtcatggaggattgtcaccagacctgcaatctaatggagcagattcggagaattatgagacctactgatgtccctgatacaggtttgctctgtgatttgctatggtctgatccagataaggatgtgcaaggctggggagaaaatgatcgtggtgtttcctttacttttggagctgatgtagtcagtaaatttctgaatcgtcatgatttaccatttcgattcgtcgagctcatcaggagctggaagatggatatgaatcttttgctaaacgactgccggcaaccttattttcagccccaaattacctgtggcgagtttgataatgctggggaaatgatgagtgtggatgaaactttgatgtgttcatttcagatattgaaaccatctgaaaagaaagctaaataccagtatggtggactgaattctggacgtcctgtcactccacctcgaacagctaatccgccgaaggnaaaggtgaagaaaggaattctgtaaaagaaacccattagattttgttaaggacatacttcataatatataagtgtgcactgtaaaaccatccagccatttgacaccctttatgatgtcacacctttaacttaaggagacgggtaaaggatcttaaattttttttctaatagaaagatgtgctacactgtattgtaataagtatactctgttatagtcaacaaagttaaatccaaattcaaaattatccattaaagttacatcttcatgtatcacaatttttaaagttgaaaagcatcccagttaaactagatgtgatagttaaaccagatgaaagcatgatgatccatctgtgtaatgtggttctagtgttgcttggttgtttaattattttgagcttgttttgtttttgtttgttttcactaggaataatggcaaatacttctaatttttttccctaaacatttttaaaagtggaaatatgggaagaggctttacagacattcaccaactaattattttcccttgtttatctacttaggatatctgtttaatcttactaaggaaaactttcgcctcattacattaaaaaagggaattttaggaggattggattgttttaaaaaaaaaaatacggcacattgtccaatccagtgattttaatcatacagtttgactgggcaaactttacagctgatagtgaatattttgctttatacaggaattgacactgatttggatttgtgcactctaatttttaacttattgatgctctattgtgcagtagcatttcatttaagataaggctcatatagtattacccaactagttggtaatgtgattatgtggtaccttggctttaggttttcattcgcacggaacaccttttggcatgcttaacttcctggtaacaccttcacctgcattggttttctttttcttttttctttctttttttttttttttttttttttgagttgttgtttgtttttagatccacagtacatgagaatccttttttgacaagccttggaaagctgacactgtctctttttcctccctctatacgaaggatgtatttaaatgaatgctggtcagtgggacattttgtcaactatgggtattgttgtgcttaactgtctaatattgccatgtgaatgttgtatacgattgtaaggcttatgtcactaaagatttttattctggtttttttcataatcaaagggtcatatggatactgtataggacaaggctttgtaggtgaagtataggtaggccaataatttctgtgacctgatccaagtttattgcagcctttcttttcctatttctttttttttaagggttagtattaacaaatggccaatgagtagaaaagttaaccatgaagattttagaaggagagaacttacaggacaccagatttgtgattctttgactgtgacactattggatgtgattctaaaagcttttattgagcattgtcaaatttgtaaagcctccatagggatgggaccatccatatcctataatgccccttcctatatgtgcctacccatagatgtgacatttttgacccttaatatccgtctttggaaaatgttaaaattgaggaaacctgtttaacttacattttatgggattgggccacattgttatttacttactgcaagagatatttcattttcagcacagtggccaaagttctttaaaatgcatatgtctttttttctaattcctgttttgtttttgagcttattttaaatgtagttttctcatttagtaaaagttgtctaattgatatgaagcctgactgattttttttttccttacagtgagacatttaagcacacattttattcacatagatactatgtccttgacatattgaaatgattcttttctgaaagtattcatgatctgcatatgatgtattaggttaggtcaccaaaggttttatctgaggtgatttaaataacttccctggattgggagtgtgtaaggctggggcggatttctaataaaaattttaggttgtaccacttttaggtagtccatagtgaagcaggtctaggaaaataagccctttggcagggaaaaagggcaatgttgattaatctcagtattaaaccacattaatctgtatcccattgtctggcttttgtaaattcatccaggtcaagactaagtatgttggttaataggaatcctttttttttttttttaaagactaaatgtgaaaaaataatcactacttaagctaattaatattggtcattaaatttaaaggatggaaatttatcatgtttaaaaattattcaagcactcttaaaaccacttaaacagcctccagtcataaaaatgtgttctttacaaatatttgcttggcaacacgacttgaaataaataaaactttgtttcttaggagaaaatgattctgtaattccagtgtcactaatttatattgttctttcctctgatttttttcaggttagtgatttttttgtatacaatttaatccaaatgttatggacattcaggaaatcatggaaacacagtaggatatctgttataatgtggggtgtatcacatgggattataaagcaaagttatggtcgatttctattcttgaaaggaatcaactacagtgaatcctttgcatttgaagccttaacatgcattgctttaattttgcccgggggacaaattttaataatcagcaagactggtttgtgcaaagcggttgagtccatcagggtatttagagcctagccagctacccagtatccat

SEQ ID NO: 2990 - DNA, 1539 bp, Homo sapiens
  SIMILAR (94)..(177): 781254mologous to Homo sapiens RPB11b1beta protein,accession number AJ277740,Smith-Waterman Score=118.
atggtggtgggactggactttggcttccgtcccctctggacattggcccccacactctgggtggcaccaggccttgcccagccatgtgaggacgcctgctcctcctttgccttctgccactactgtaagtttcctgaggcctccccagccatgcttcctgtacagcctgcagaactggtgagtgtggcactgaaccccagcaccatttgtgctttctgtccccctggatcttgggcccggctgccccccaatgcagggatgcccaccacggccgtcctcctggatgcaatccttcccagccctcaggcatctgccagcctcctccttctctggccttcccacatctcagcctggttcctggacacagatgccgtgatctcagaaggggacgatgtcaccggcagcaggtttggtgtccatgtcctcagatctcagaaggagacgatgtcactggcaggtggtttggtgtccatgtcctcagatctcagaagggaacgatgtcaccagcagcagatctcagaaggggacgatgtcactggcaggtggtttggtgttcatgtcctcagatctcagaaggagacaatgtcaccagcaggtggtttggtgtccatgtcctcagatctcagaaggagacaatgtcaccggcaggtggttggatatccacgtcctcagatctcagaaggggacgatatcaccggcaggtggttgggtgttcatgtcctcagatctcagaaggagacgatgtcaccggcaggtggtttggtgtccatgtcctcagatctcagaaggagacgatgtcaccggcaggtggttgggtgtccatgtcctcagatctcagaagaagatgatgtcaccggcaggtggttgggtatccatgtcctcagatctcagaaggggacgatgtcactggcaggtggtttggtgttcatgtcctcagatctcagaaggagacaatgtcaccggcaggtggtttggtgtccatgtcctcagatctcagaaggagacaatgtcaccggcaggtggttggatatccacgtcctcagatctcagaaggggacgatatcaccggcaggtggttgggtgttcatgtcctcagatctcagaaggagacgatgtcaccggcaggtggttgggtgtccatgtcctcagatctcagaaggagacgatgtcaccggcaggtggttgggtatccatgtcctcagatctcagaaggggacgatgtcactggcaggtggtttggtgttcatgtcctcagatctcagaaggagacaatgtcaccggcaggtggtttggtgtccatgtcctcagatctcagaaggagacaatgtcaccggcaggtggttggatatccacgtcctcagatctcagaaggggacgatatcaccggcaggtggttgggtgttcatgtcctcagatctcagaaggagacgatgtcaccggcaggtggttgggtatccatgtcctcagatctcagaaggggacgatgtcaccggcagctggttgggtgttcatgtcagtgcttgttttcactctcaatag

SEQ ID NO: 2991 - DNA, 1197 bp, Homo sapiens
  SIMILAR (1187)..(1047): 471254mologous to Homo sapiens PRO0889,accession number AF119839,Smith-Waterman Score=82.
atgtctccgccagcaggtttggtgtccaggtcccccagatctccaaaaggagacgatgtcacgggcaggtggtttggggtccacgtccccagatcttcagaagggaacgatgtcacccagcagcaggtttgggtgtccatgtcctcagatctcagaaggagacgatgtcaccggcaggtggttgggtatccatgtcctcagatctcagaagggcacgatgtcaccggcaggtggttgggtgttcatgtcctcagatctcagaaggagacgatgtcaccgccaggtggtttggtgtccatatcctcagatctcagaaggagacgatgtcaccggcaggtggctgggtatcaatgtcctcagatctcagaaggggacgatgtcaccggcaggtggttgggtgttcatgtcctcagatctcagaaggagacgatgtcaccggcaggtggtttggtgtccatgtcctcagatctcagaaggagacgatgtcaccggcaggtggttgggtgtccatgtcctcagatctcagaagaagatgatgtcaccggcaggtggttgggtatccatgtcctcagatctcagaaggggacgatgtcactggcaggtggtttggtgttcatgtcctcagatctcagaaggagacaatgtcaccagcaggtggtttggtgtccatgtcctcagatctcagaaggagacaatgtcaccggcaggtggttggatatccacgtcctcagatctcagaaggggacgatatcaccggcagaagccgccatcgtggttgtggtttgcgtgccaatttccaacgagagagcatctgaggctgttggagaagactggagccaatcacagcacatgctgaatggagggctcatattcgggcaggcagctgaggggaaggtacagcagacactttctgggcccatggcctcttacccctgttgtccaataagtaaaggaccagtttaccttcaggcaggctttcaccaacaggcttacgacagaatccggcccaaggctaacacccatggcagcatacaaacaaacaagaagccagttatgatggaagagaggctcacatggcaaggactgaagcttcctgccaacagccacacatatgagtcaccttggaagcagatcttcctgcaccagtcaaatcttcggatgactgcagccccagcctccacctcgaccacctcatga

SEQ ID NO: 2992 - DNA, 1523 bp, Homo sapiens
  SIMILAR (414)..(545): 361254mologous to Homo sapiens Extended human secreted protein sequence, SEQ ID NO. 402,accession number Y36017,Smith- Waterman Score=71.
  misc_feature (1)...(1523): n = a,t,c or g
agctttatttagattttttttaatattttatatttgcatccatgccattcgagaaacctttcccacgggaacaggtctattttcgcctaatgttacccataactcattcgctatttgacgtagttctcttaaataaatcatcctttagtaactcttagaattatctcctaatttacaaaaactgaaatgaaaagggactactaaatcattagcaggagtgggttgcaatcttattttcttgtaaggtaaaggggaaaatgaataaaaatcaaccaggaaaaggaaattcatgggggcaaggaaaaggtattttcttaaaatctgtctcccgtggngggnaaggatgcccagcttgggggccgctcccccggtcaccccctagggctcgggggttaaacagtttgggtcaaagggagggacaggaaaagtccttttggaggggcctctggctggcttgctgtttgctggacttttggaccaggtcagaaggaaagtgttgtttgttcttgagactttggacacaatgtcctatgccttctgatagagatactctagcatttgaaaatctccttgcttctttttaagagctgaaaatgtccaccgtttagccaaaaaagcacgaactaactgttgtcctaaaaggtgtgggttgaaactgttagttgttcaaggacgaaccagaagcaaaagaataaggaaattgaagttttaaggcccttgggcagaccttgctgaacagctcacacatcctccgtcccctggcattaaaatacacacagttcctttgctggtgaagcctctttggggccaacgccaccccccatataggcagatgttcctgccagctcttgtctcctggggtgggtaggctcaggctgctgtgacaagttgggggacggagtccaagggatcctgggagattctaagtgtggctgatggaaccaaccagaatggggagggtggagggctcaggtgctggactctgtgtccccactgtggccctccttttgaaagtgggtgcctcccctaacaacacctgcctggcccacctgcatcctaaaccccaggacaagaaagacacagctgcagggaggaacagaagctgctggaggcccctcggagaacagactcaggccagggtcccactggtccgtaccccttggaatgtgtggccaggcctgtcttgcccctgaactcaacctctcctcaaaagacagaccccaaagaaggggacccatgactgtccagcactctgcctcactaaagtcgtgttctgtatgtcagataaataaatatatagagaaaggccctggagggagctctgggtgggaagaaggtggaggatcctttcatgcatgggcaggagaatgggagagacagagagagaaggagagagaagaaccaacagaaaaagcaagctttgaaatccaatggtccctgggttctggccaccctaaactactttgcacagttgggtagcagcatggtaacagaacagacaagtcaacagagacacccacctc

SEQ ID NO: 2993 - DNA, 1646 bp, Homo sapiens
  SIMILAR (47)..(277): 321254mologous to Homo sapiens BPAG1n3,accession number AF165191,Smith-Waterman Score=75.
cggacgcgtggggaccaccgttatgtattaggagattttagttaggatatttagaaagaaaaagagaatctgccattccttttcttctctcttcaacctcagtacctccaaatcttggctgcatggaagtatctttggtgacatcaactcttctccaagtgaagacaactggttgaaggggaccaggaggttggacacagaccattgcaatggaaatgcagatgatttagactgttcttctctgactgatgactgggagtcagggaagatgaatgcagagtctgtgatcacctcctcttccagccacatcatatctcagcctcctggaggaaactcccatagcttgtctcttcagtcccagttgacagcttctgaacgtttccaagagaatagttcggatcattcagaaaccaggttgttgcaagaggtcttctttcaggcaatcctgcttgctgtgtgcttaatcatttctgcatgtgcaagatggtttatgggagaaatattagccagtgtcttcacatgctcattgatgataactgtagcttatgtgaaatcattgtttctcagccttgccagctatttcaaaaccactgcctgtgctcggtttgtcaaaatttgacaaccatttaggaatgccttcgatgaatgtcctccatctgaatatctggaaattgtccaacttgcagtctacttggaatcaagtgttttattggaagggagtaagcgagtaatggagaaaaagccattttagtttgactatgtgattttaaaatgatctcaggtttttccatcaaaattataatatgctcatgaaaataatattaatttgccttccctttgcaaacaccggcagttgaaaggaaaaggacggggaatgtgatggaaaagagaccgcctggaataaatgtccccctatgattctttaaggcagtggttctcgagcttgaattttcattaggaaattctgtgaggagcttgtaaccagatttctgggtctgccacatgcacctatctcttgctgaattgctttaatagaataatgagagcaagtttgtctaactaataccaacctgacaacttgaataacaataaatgcaatttggtacataaattataatgctgcaaaagtttgtcattcacctcagtggagtgacttgatattaggtggtaacccgtagatgatggttaatatgaaaatggacaggaaagaagcattttctgaaagttatattcttttgaaccacgttctaaacccaagtttttaatcttcttggggctcgtaattacctttcactttaatgtcacttaaagatataacacagaaaaatgccttgagggcaaaatataggcaaaacaccaatgcgctttcaaatgcatgaaaatggtgcagttgtacccttgagccttgactcaagggctgtagatgttccctttccaccccccacacttggtgcgtgttcacaaagcaaatatggcctgtaattcaaatttgttctatgtgatactctctgagtaaaaactcatacatgcagaaaattgtctttgctcgaaatgataatgccaaaatataactttatatataatttgcatttagtacatttttggttaaaaaataaactaataaataagtgaagtcatcagcaaaa

SEQ ID NO: 2994 - DNA, 213 bp, Homo sapiens
  SIMILAR (115)..(174): 501254mologous to Eriocnemis nigrivestis NADH dehydrogenase,accession number U85730,Smith-Waterman Score=58.
atggtggctcggcacctcctgctccagtgcccatgtccagtgctgacggtggtgatgcaggctctggcatcctcacactgggagtacggtgacctctgtggggacacaactgagtccttcatctctatcctcagctccttgagtaatgcttggcacacggtgggtgcttgggaaggtttggatgaatgggccaaggaaccaacaaagagatga

SEQ ID NO: 2995 - DNA, 642 bp, Homo sapiens
  SIMILAR (47)..(118): 451254mologous to Homo sapiens Fragment of human secreted protein encoded by gene 89,accession number Y02883,Smith-Waterman Score=49.
atgccacctgcagtggcagccgtggctggaaccttctttcctgtggacccgggtctcacgcccgcccccaggtgcagcacggagctaaggggcttcctgccctccacagcccatgcgcagctgaccagacggctgagctcagagaatatcccatgtggaggaaatctgagtgtcgaagagaaaccacagcctatggaagggacccctgagtgtcgaagagaaatcacaggcggcagtgattgtggcttccttcgtcgttgtgtgtacgccagcggtcacctgtctttgcaccccactctgaagcctgcaatgggacagcgattgcagcttccttcgtcgttgtgtagatgtgcacaggccacatgggagacctccgtgggctctccggccttcactcagccagagataattcccctgcccaaaggcagcccctctgcaaacaaagtcttattctttgaaacaggaaccctcaggggccgcctggggactggtgccgactgtcaaacccagcagatgggcttcatccaggcctcaactgtcagccgggacgaccccagatcacacgggcgtgggccgtggtcagccgggagcgtccacgtggtcagccagcctgatgtgttcggtgactcagccaaagcttaa

SEQ ID NO: 2996 - DNA, 424 bp, Homo sapiens
  SIMILAR (144)..(284): 381254mologous to Homo sapiens Human secreted protein sequence encoded by gene 33 SEQ ID NO:142,accession number B25753,Smith-Waterman Score=65.
cctattagagccttcaggttctgcatcagcattccggttaaaactattatcttcccaagttatctcccaaccaatgactaagcacagctgtaatactaaggcgtggtcatttctgcttaacatgggactccttcgatatgcaatcttactcttggtctccctactgggctggctgagactgtcagctctgcatcatggggaggagactcccctggccctatgttgttttcattaatccttcacagtcattgttcctcaatcaacctcaagcactcctaactccacctcagcatgttcttcccaaaggacctaacagatataatgatttaatactgacacatcagtattattcttcaaagatccagattaaaaattataattgtaatgcaaatatctatttctctcggacgcgtgggtcgaccgg

SEQ ID NO: 2997 - DNA, 525 bp, Homo sapiens
  SIMILAR (416)..(330): 481254mologous to Ralstonia sp. C-0 chlorocatechol 1,2- dioxygenase,accession number AF077914,Smith-Waterman Score=64.
ttaactggtggctactctgacttttcaggctcaagaaagccacacatcttaatctgaccattatatcaatgtgtagccactcggctacacgtaagactgagaagtcttatggggtcttttttgctcaaagccttcttaaaatccatcttttatttttgagagtttaaaaacagtcattttttccaattctgaatttctggttattattttctttcactcctgtaaaccaaacaatagtttcctaaactcatctcttccttgactacatttggcaaggtaatcaattacaatgaacacccactactaacaacttcttttcttaaaccttcaatcttggtagaaacatgaaatggcctccaagttgccaaagatagtcatccaaaaccttggaacaactctgaaggtccctcatatggattccttgcttcccagctccctttacaactggatgtgaaaggtgctgtcttctgtactttctcttgagagccacaaagaaataaccaatggctaattcagacctaaaaa

SEQ ID NO: 2998 - DNA, 1494 bp, Homo sapiens
  SIMILAR (1)..(897): 981254mologous to Cloning vector pZC320 SopA,accession number U26464,Smith-Waterman Score=1550.
atgaaactcatggaaacacttaaccagtgcataaacgctggtcatgaaatgacgaaggctatcgccattgcacagtttaatgatgacagcccggaagcgaggaaaataacccggcgctggagaataggtgaagcagcggatttagttggggtttcttctcaggctatcagagatgccgagaaagcagggcgactaccgcacccggatatggaaattcgaggacgggttgagcaacgtgttggttatacaattgaacaaattaatcatatgcgtgatgtgtttggtacgcgattgcgacgtgctgaagacgtatttccaccggtgatcggggttgctgcccataaaggtggcgtttacaaaacctcagtttctgttcatcttgctcaggatctggctctgaaggggctacgtgttttgctcgtggaaggtaacgacccccagggaacagcctcaatgtatcacggatgggtaccagatcttcatattcatgcagaagacactctcctgcctttctatcttggggaaaaggacgatgtcacttatgcaataaagcccacttgctggccggggcttgacattattccttcctgtctggctctgcaccgtattgaaactgagttaatgggcaaatttgatgaaggtaaactgcccaccgatccacacctgatgctccgactggccattgaaactgttgctcatgactatgatgtcatagttattgacagcgcgcctaacctgggtatcggcacgattaatgtcgtatgtgctgctgatgtgctgattgttcccacgcctgctgagttgtttgactacacctccgcactgcagtttttcgatatgcttcgtgatctgctcaagaacgttgatcttaaagggttcgagcctgatacctctgtgtccacggtcacactgccttctctgactttgactctgaatcttttgcctccctcttataaggacccttgtgattacatcgggcccacatggacaatccaggataatctccccatctccagatccttaacattaaccacatctccaaagttcttcttgccatcagagagactttcaagcagctggctggatgttcgtcatattgaaaagtatgtagaccaaggtaaaagtggaacaagagaattactttggtcctgggcacagaaaaacaagaccatcggtgaccttttacaggtcctccaggagatgggacatcgtcgagctattcatttaattacaaactatgtacgacatgctgttactaaaagtgctacagcaacagccacgggatatcaagaagttcttaattctgaacaaattttggatcttacaaaagctccagaagtctttgctatccctatacagggaaacaggcttaggggggttgtgctagttgtgggtagatttggagtttcacaattaaaggaggaacacccattactgggcctttgcaccgagtgcctagactcagaaggcaccaacaagcaaaaacaagcttga

SEQ ID NO: 2999 - DNA, 336 bp, Homo sapiens
  SIMILAR (327)..(184): 351254mologous to bacteriophage lambda Rz1 protein precursor,accession number U37314,Smith-Waterman Score=57.
atgccaagaggcatatttgtagtacgacatgctgttactaaaagtgctacagcaacagccacgggatatcaagaagttcttaattctgaacaaattttggatcttacaaaagctccagaagtctttgctatccctatacaggttgactcttcaatggatcagatcaagtctgaggctcctggagatgccctgagggtttcagagtcctgggggcatttgaatgcaggagtttgccggtgggccaggaggcgagataattcctttaacagaatgatcattggttgtacactgaggaagtatggagaatcctacacagatgatgagtttgtaacctga

SEQ ID NO: 3000 - DNA, 495 bp, Homo sapiens
  SIMILAR (320)..(237): 441254mologous to Zea mays putative 54 aa polypeptide,accession number AJ001485,Smith-Waterman Score=66.
gatgacctgaggcccgggtgtctcacctcaggaagagaggtgacagttcacagaaagcagtcagtggaagttttctagcagggaaacctttctaaagaagcagcatgatctgagctttcacaaacaggggggacgtagacctactaaccgatgttgtaggtaaatggaatggatggagatctgcaagggcccaggattccgaggcgttcagttctggtggttcatgaaacaggcttgaggactctcatcatggaccacacagctcgtggggacactgggaatccactgctcttgggttctggtggcagaggagagtggcagccaccccaagctcctttcatcgcacaggtccccagaaacaaactgagcagcaagaagaagggagacaccgtggaagggaaacttcccccaacacagccctgatccagactcctgaaaaacaagttggagattcttttaatctaagaaagaatatggtctgctaagaaatgccac

SEQ ID NO: 3001 - DNA, 1367 bp, Homo sapiens
  SIMILAR (195)..(686): 471254mologous to Canis familiaris microsomal signal peptidase,accession number J04067,Smith-Waterman Score=288.
acagtagccgtccggattttggggaacgacccacgcgtccggacggcgcggatcgtttggagttcggtccgccgccggaacgggagcctgggggtgcgggtggagtccggactcgtgggagactatctcgatgaacacggtgctgtcgcgggcgaactcactgttcgccttctcgctgagcgtgatggcggcgcctcaccttcggctgcttcatcaccaccgccttcaaagaccaggagcgtccccgggcggctggcacgtctcgcggatcatgctaaaaaatgtagaagatttcactggaccctagagaaagaagtggatctggggatttatcacatttgatataactgctgatctagagaatatatttgattggaatgttaagcagttgtttctttatttatcagcagaatattcaacaaaaaataatgctctgaaccaagttgtcctatgggacaaggattgtttttgagaaggtgataatcccgaagcctgctgcttgaaagatatgaaaaccaaataatttttttcctttgacgatggaaatgggtctcaagggaaacaggaatgtcactttgaccctgtcttggaacgtcgtaccaaatgctggaattctacctcttgtgacaggatcaggacacgtatctgtcccatttccagatacatatgaaataacgaagagccattaaagttattctgaatttgaaacaccatatttttatacttaatgaatggtatctcgttaatctcttcccttacatcttcatgtattgttggtttgttttttggttttgggttttttttttttttttttttttggtataagaactaacatcaaaaggcctgtttaaagggaaaggttaatgggctacttaatattatgaacaaaacaaaaaaacaaggctgccacagtggaatattatcttacaagaataagaactacataaaacagatttgtaaaaaatacatatttgaagtattccccgtatttccattattctttatgggatataaagtaagcatgaaaggtagttaaaactttcaggtgcctgtagagtcataataactgtattttataccttgcattcacacaaatacacattggatgtgatttaaaagtagacattctccttttcctcttttaggatatgtttgattactggaaaaataatatggttatttgttagaagtctggtttataaaaaagccaaaagtgatggaatttattccatttgtcttaggaaggcccataatacctgtttttcttacatgtgactagcaactttctccacttaaagactaaatacctctttatatgatgtaaattattctacttcattttaaaaatcttttagggcagcagaatg

SEQ ID NO: 3002 - DNA, 423 bp, Homo sapiens
  SIMILAR (80)..(418): 971254mologous to Homo sapiens uncharacterized bone marrow protein BM030,accession number AF217507,Smith-Waterman Score=560.
gatatctccgcattccggtcgaccaccgccggtgatggagttaataacagggattgccttttttttatagcactataatatgcacaaatctacaaattctgatacttccgcggaaacactgaattctacccgccaaggcacaggagctgtgcaaatgagaatcaaaaatgccaacagccaccatgacaggctcagccaaagtaaatccatgatcctcaccgatgtcgggaaggtcactgaacctatatccagacacagaaggaatcattcacagcatatcttgaaagatgtcattcctccattggaacaactgatgggtgaaaaagaagggtatctgcaaaaagctaaaattgcagatggaggaaagaaactaaggaaaaactggtctacttcctggattgttctttctagtcgaagaaatgg

SEQ ID NO: 3003 - DNA, 663 bp, Homo sapiens
  SIMILAR (268)..(387): 821254mologous to Homo sapiens uncharacterized bone marrow protein BM030,accession number AF217507,Smith-Waterman Score=160.
atggattctttgaaatggccagttaacttgagattttgcaagattgatggagtttgccaagcaaagaactggaagaagaatgttgaagcagaaagaaacaagtgcaagggtcgccagatggttgaaaaagaaggttatctgcaaaaagctaaaattgcagatggaggaaagaaactaagaaaactgggcacaaaccagaaagtgtggatttgtgtggagcacacattgaatgggccaaggaaaaatcgagcagaaagaatgtctttcaggaaaaactggtctacttcctggattgttctttctagtcgaagaattgaattttacaaagaatccaagcaacaggctctgtccaatatgcaagggctgaaaaatgaagcgtctactctgctggctacgcttgagatgctcccatgctatcaggacactcagcatattgactttggaagcaaggaagccacctccaattcacagagctggtgcctctgcctcattcatgaaaggacccaccaaaacctgatccagttatcaggttcatcaggccttgggagggttgcattagaacttcagaaaacacagcccagagccacgccgccatctgagcatctggggaaaaggcaggtgttcatcatgctcgtcgaacacaccctgtggcatttgctgtga

SEQ ID NO: 3004 - DNA, 1068 bp, Homo sapiens
cgaaacagaaacacgcttgtcctggaaggctgcccacctaagctcagctgtcagctgcagtccttacttcctcgtaagggaagagcagatctctgtgcttcagtttcactgttggtgaaatgggaagactggatttgatgacttgaaagtgcctttccacatctagcctgatgattctaataagctcttggactcatttcctctagtgacaggtgaagaggcaaaacctagccgttttagttagcagggttgccaagagagagctgggatgcagagaaccaagtgtgttttcaaggaatcctctcaaggaggcgagaagccctgttttccttcccagaaagggagccactttctggctgagcatcctgataaaaggctgatgacagtgggaagagacaagcagagacacaggagtggcacagagggaccagcttactcccatattccagagccttcaccacagtgaatgcagaagaaggttgacctcacagatgccttggttactgcaatgtgctcttctgttttaagttaatgttgctttttaaaaatcattatttggtttgatgattcctgagtttcaaaattaaatgcacaatcatttttcgatcatgaggaacaatgagtgacaagctcttatcccaacactcttcaagttctctcattcgcattggcaaccagatgcaggcctttccagccacggtgatgaggctggctcccagtcacctcatagggtggcagggggtagcagggggagtctgtgggacccggaagacttcatctctggagacctttccagaaggaaaagaacctcccctggcagggcctttccctttacagagcaaaatgctcatctcagaggagcttgaatttcttcaaatgcagggaaaaatcctagcaaatataatagggtatacggcaaggggagagaggatggctaagaaaagcatttggccccagaatattttgaagacaacaagctttgaaaacaagttgaaagctctgtataaattgcagggcgtgactcacatgcctgtgcgggacccatgttcacaaggtgctacctggtga

SEQ ID NO: 3005 - DNA, 518 bp, Homo sapiens
  SIMILAR (139)..(405): 281254mologous to Arabidopsis thaliana Contains similarity to ubiquitin carboxyl-terminal hydrolase 14 gb|Z35927 from S. cerevisiae,accession number AC003671,Smith-Waterman Score=81.
atgctgactctcctcagggtacctcggctgaataaaaattcaaaaaacagcaatggacaggaactagagaagacgctggaagaaagcaaagaaatggatatcaaacgtaaagaaaataaaggcaatgatacccctttggccctagagagtacaaacactgaaaaggagacaagcctggaggaaacaaaaatcggggagatcctgatccaggtcttgacagaagatatggtgactgttttaatccgggcctgcgtgagcatgctgggagtccctgtggacccagatactttgcatgccacccttcgtctctgtctgaggctcacccgggaccacaaatatgccatgatgtttgcagaactgaagagtacccgcatgatcttgaatttgacccagagctcaggctttcaaatgggtttactcccctggtcacccttctcttaagacacatcattgaggaccccatgtacccttcgtcataccatggaaaagaaaagaagaccaagatgaaccacacctga

SEQ ID NO: 3006 - DNA, 500 bp, Homo sapiens
  SIMILAR (70)..(303): 1001254mologous to Homo sapiens Human secreted protein, SEQ ID NO: 5530,accession number G01449,Smith-Waterman Score=413.
atgagaaggcgcgatgttgacggggtcctaagatggctgctgggcgaccacttcctgacagaagaaaagatgtggagtgggctgctacctcctggcctaaatgaaagtgacgctgagtcaaactcggaagatgaagctacgttggagaactctggacttaacttacaggaagataaagaggatgagagcatcagaaaaacagaaatcatagatttctcaacagatgaaccaaaaactgaaacagagtcaaatgtaaatgcctatgaagagtgtccttctggaattcccatagatatgtggaattcaggccttgaaaagaggatagaccaggctgtggaggagtggaatattgagaaggctgaggaactcagcaaccagctagctactcgagagcttggtgtaaaaattgccaaagcagttgcctgccacaactttgtaaaagccaaaaaggaggttgaaaattcacaggctgcccgaaaaaagaagaaacttgcatgggg

SEQ ID NO: 3007 - DNA, 668 bp, Homo sapiens
  SIMILAR (664)..(545): 401254mologous to Homo sapiens NF2=neurofibromatosis type 2 {alternatively spliced, form A4},accession number S73853,Smith- Waterman Score=65.
  misc_feature (1)...(668): n = a,t,c or g
ccgttgaatgtttatccagattataaatatagaggcatttccntccatccctgtttaatgtttattttgtaatcattggagtatgtgaaaaatttttgtttgttttgctttggtctctaagtaaacatgttcagcaaagtatttttttttttaagaaataaattgagatttgtatgttcttccttttaggtttgaagcaaagaagagatgggaaaccaaaagcaacatgggatacatgtaacttgccagagtgcttcaagacatttgtagactcacatgctcaatttactgagaatgttctcctgcctatgttaatatgtcagaaaattgatagcactaaaacaaaaataagcataaaatttgggattttgattatcagctcttttcagcctttctttaaggactttggcctattgaagcgaataaaatgaagcattctgttatttgtataagaaatgtacgaaaaacaatatagaacgaagaggataggattttgtttatttgtatggatggacccttggtataaaatcacttttggcgctttccattcatttgggttagcacagacagtgagcttctcgaactgtctttcctttttttgcttttgttgaagagagcccatactgtgcccgtgcaccccggccaaagtgacaaagcacgacttcggc

SEQ ID NO: 3008 - DNA, 1228 bp, Homo sapiens
  SIMILAR (236)..(592): 701254mologous to Homo sapiens Human secreted protein, SEQ ID NO: 5530,accession number G01449,Smith-Waterman Score=411.
gctgctgggcgaccacttcctgacagctccagttaatgggactgccagcaggctagacatccttcgccggaatgtgcagcgcttagttctgtgcccgggaggggcttctctctcttttgggattggagtgtggcattgccgccagaaagcctgcagaattccgggttgtgcagccaagcaggaacggtgtacctttctagacccatcctcttgcaatcttggaccctaagaaaagatgtggagtgggctgctacctcctggcctaaatgaaagtgacgctgagtcaaactcgggaagatggaagctacgttggagaactctggacttaacttacaggaagataaagaggatgagagcatcagaaaaacagaaatcatatatttcttatacagatgaaccaaaaactgaaacagagtcaaatgtaaatgcctatgaagagtgtccttctggaactcccatagatatgtggaataaatttcaagaattgcataaaaaacattctgaacagaaaagcacatcctcaagattcagagggaagagaagaacacgctccagaaaagataaattgaagaatgtaaaagaattacatagtgaaccgtcctcaaatgaaacccagtggaaagagcttactcagtattttggagtccacgatagatttgacccgcctgttaaaaggaaaaaagttgagaagtcaggccttgaatagaggatagaccagggctgtgggaggagtggaatattgagaaggctgagggaactcagcaaaccagcttagctacttcgaggagctttgggtgttaaaatttgccaaaagcagtttgcctgccacaactttgttaaaagccaaaaagggaggttggaaatttcacaggctgcccgaaaaaagaagaaacttgcatgggggttttgaagcaaagaagagatggggaaaccaaaagcaacatggggatacatgttaacttgccagagtgcttcaagacatttgtagactcaaatgctcaatttactgagaatgttttcctgcctatgttaatatgtcagaaaattgatagcactaaaacaaaaataagcataaaatttgggattttgattatcagctcttttcagtctttctttaaggactttgtcctattgaagtgaataaaatgaagcattctgttatttgtataagaaatgtaagaaaaaaaatatagaaagaagaggataggattttgttatttgtatggag

SEQ ID NO: 3009 - DNA, 362 bp, Homo sapiens
  SIMILAR (288)..(136): 331254mologous to Homo sapiens KOX 4 protein (56 AA),accession number X52335,Smith-Waterman Score=65.
ctaacagactctggaagacactgtcaaagtggcagctccacttcacacgggccctggcagcacataagaacacccacttacccccagtgctgtcagacatgagtgagctggtgtctgcctgctgggtgaggagcaagtggtgctcatttgaatttttctatcaatgcagtaggatgatcttttcaggcactggtggcatttgcctttttttctgaaagtttttgctaatttttggttgagtattttttctattgatgattagctctttatacattctggacaaaaaaatctcttatatgttggaaatacttttccttcaatctgttgcctttttttcccaacattttattgtgaaaacttcc

SEQ ID NO: 3010 - DNA, 675 bp, Homo sapiens
  SIMILAR (275)..(400): 391254mologous to Homo sapiens Plasminogen kringle 4 domain (residues 354-435),accession number P93231,Smith-Waterman Score=70.
atgcctgacatcctgaaagtttccccttcatcagcctttgtgcttctccaccagggcttcctacagcagttcctccctctggtttattcacagactgcagataactctggaggggatcgccccctcattggtgtcctgatgattgtggacacccagtcagccccattttctggccacaccaagcatggcaatgacaccaggttggcacaaaacaactctgcctggattgattacttagcccatcatagcgtacactttcttcattttaggaggtggaagatcagcctcaacagactctggaagacactgtcaaagtggcagctccacttcacacgggccctggcagcacataagaacacccacttacccccagtgctgtcagacatgagtgagctggtgtctgcctgctggggcccgtcggaccaggagcaggaacagggggctgagaccagccagccagggtctgccccagacaggatgcctgtcctgcagccttgcttctgcatagctgccagcattctggggactcatgactccatgacctggtcccccaagggtgctcagaggtccctcaaggcccttctaacaggaaagggggctatctccgctcatggagtaggttccgatgagtctctaactcagtcagaaactcttcccagtgttactcgaccatga

SEQ ID NO: 3011 - DNA, 600 bp, Homo sapiens
  SIMILAR (298)..(233): 501254mologous to Arabidopsis thaliana F5D14.5,accession number AC007767,Smith-Waterman Score=71.
atgtttgcggtctaccacgggcaagggcgactacggcgatcaacccactgtcgcacccagtatcggcaccgaatggtgccccggcgattacgcgcaaaatccttcggggtcaaatggacgacgcttaaagggcataccgggctcgtcaatatttataaagaatttctattaagagtggttgatttggagcagtatgaacaagaggcaagaacgaccctggactcaccaaagcccacatgcctctgcatcctacgcccagtgccatgtcccaccaccatcactgccaccaccatgcccaagagaaaggctgaagggatgctaaaggagataaagccaagtcattggttaccagtgtgtcaggcaatctggacttttcgggatgccactgagatggcacctgtcaaaagagcagtggttccgtttctgattgtggatcttcagataaattctgccgttttcatttcacttcctgatgtcaggttagttttgaccacagtagtgcatgcttgtgaaagagcctcggtgtcaaggccaacaagtagtaagaaacaaggaattcaagttttggaaatgcccagccacttgatagccagcccataa

SEQ ID NO: 3012 - DNA, 493 bp, Homo sapiens
tttttttttttaaagctatgttgttagcacacagaacacttcattgttgtttttgggggaaggggcatatgtcactaatagaatgtctccaaagctggattgatgtggagaaaacacctttcccttctagttttgagagacttcctcttggctcccaggaggagggattccctgactttgacacacatggccaccttggcacaaaagccttgtggtatagaaaaacaaatttgtttttatgtcctcttctccctttccatctttcagcatagacttaactcccttaagcccagacatctgttgagacctgacccctagtcattggttaccagtgtgtcaggcaatctggactttccagtgatgccactgagatggcacctgtcaaaagagcagtggttccatttctagattgtggagtcttcgataaattctgccattttcatttcacttcctgaaggcaggcgccggttgtgaaaagctgctaaacaacatg

SEQ ID NO: 3013 - DNA, 1097 bp, Homo sapiens
  SIMILAR (603)..(460): 401254mologous to Homo sapiens Fragment of human secreted protein encoded by gene 8,accession number Y36421,Smith-Waterman Score=74.
  misc_feature (1)...(1097): n = a,t,c or g
ttttaatgtgtcatagttgtttattattcattattgttgttaatctcttattgtgcctaatttataaataaaactttatcacaggtatgtatgtataggaaaaaacatactatatatagggttcagtactaaccgacatctctggcatctactgggggtcttgaaacgtatcccccgcgaagaagggaggactactgtatagctccaataacacagcctactttaaattgaaagtcatgtaggtatactgggttgcatagcatccccccaaaatttatgtccctnccctagaccctcagaatgtgactttatttaagaaataggattcattgcagatgtcattagttaaggattgagggcattgctggagaggggtgggccccttaatcccaatatgacttggtgttcttataagaaaagaagagacaaagaggcacagagagaagaatgccatgttaagacacagatgcacaaaagcaaaatggccatgtgacaatggaagcagagactggagtcaagcagcttccagcaaaagaacgccaaggactgccaacagccagcagaagcttagcgagggacacagaccagactcttcgcccggagcccggaccaggctctccccaggagtccccaagaagtaaccaatcctgctgacaccctgactttggacttctggcctcgggaagtggttttgccaccacgacaccagataatcaacaacttcccagagttagtgggatgtgacagggtagaagggaatgtggagtcagagcccccacacagagtctctactggggcaatgcctagtggagctatgagaagagggccaccatcctccagatcccagaatggtagacccactgacagcttgtaccgtgagcctggaaaagccacagacactcaatgccagccagtgaaagcaactgagagggaggctgtaccctgcaaagccacaggggtggagctgcccaagaccatgggaacccacctcttgcatcagtgtgacctggatgtgagacctggagtcaaaggagatcattctggagctttaaaatttgactgccctgctggatttcagacttgcatggggcctgtaa

SEQ ID NO: 3014 - DNA, 262 bp, Homo sapiens
  SIMILAR (1)..(99): 421254mologous to Hordeum vulgare haemoglobin apoprotein,accession number U01228,Smith-Waterman Score=64.
atgagcaaggctgagaagattcacatctcagacaccaacctggcaaagtcagccagatctaatttaaaatatggtcctggtcacatacctgtcaccaggcacctctgcaaatgtggctgtgatccagcatctgcaaatcttattggcctttatgtttacatgtctgagttggtgttgtgggacttttccttagttcagctaaagacaggggtccttatcacatggccatgaaagattaggctcgcagacaattcaaaggtaa

SEQ ID NO: 3015 - DNA, 777 bp, Homo sapiens
  SIMILAR (158)..(27): 371254mologous to Homo sapiens EAN57,accession number Y11142,Smith-Waterman Score=73.
atgcatgggaatgatgaacaccaatttctggataatataaatccatctaaaatggattttgacgatggagacggggaaataggatctaagagggattttctccggctctttgggaatctttgccagaagcaaaagcagtttgctgatagtgtcaatgcttatagtggtttgggggagctaaagccccttcatagtctccatctggcccccccaagccataaacaggaaattgaaataaaaacacagcttcaaagcaaagctcctactccctcaacaccttttagccagatttctgtggctaagccccttctatctggcaactctggagcagcccttggcctaatattaactgagggagggaaaacaatatctatatctatatccacacacatatatttgaatttacaaaaacataaggcaacgatggaattctcatggtgtcctgcaaaacatgctggcaccctttaccgagctacagatgcacttggcttaggacttgaagaagccataggaggagatctggtgggagcaggaggaactgtgagtcttgctgccccatgccagcaagaagaaggagcagcttgtttcccttctctgagtacttactctgcaggcatctggcaactggatatacaaagcaaattgcagagagcgcaaagggtagtcatcttcagtttgcttatgttgggacaagagcaggaaggtttggcagccataggtgtttacgccggagaatcttggcatagggaatggagaaaagatttggcagatgagtaa

SEQ ID NO: 3016 - DNA, 373 bp, Homo sapiens
  SIMILAR (158)..(373): 1001254mologous to Homo sapiens Ran binding protein 11,accession number AF111109,Smith-Waterman Score=370.
acgccaaacatggcgtgttcctataagccgctttcggcatcagtaggcggcggcgtggggtctggcagcgtggggagagggaccaaccgacgccacttcgtgttgggaagtgggagcgggagggccgggcaattcccgaccgaaccaaacggtttccatggatctcaatagtgccagcactgttgttcttcaggtgttaacacaggccaccagtcaggatactgctgtgttaaaaccagctgaggagcagttgaagcagtgggagacacagccaggtttctattcagtgttgctgaatattttcaccaaccacactttggatataaatgtaaggtggcttgctgtactgtattttaaacatggaattgatcgt

SEQ ID NO: 3017 - DNA, 633 bp, Homo sapiens
  SIMILAR (339)..(605): 341254mologous to Streptomyces collinus NapG oxidoreductase,accession number AF131877,Smith-Waterman Score=100.
atgggtagccagccagccagtatttctcatacaccccagctatatgctgcagaaattctgtaccaggcaaacacagctagaggtctagggctctcttcttccatccaggcaccactcctgcggcagaagctctaccacagggcagcaggcaaagaatatgctgggattacagacgtgagccaccacgaccagccgcctcagacaggtccttcaggagataattcagaagaagtcattgctatcatagaagatgacagctccatgaatgttattgcccccgaagaccttccagtgagacaagatgtggaggtggaagacagagatattgatgatcctgaccttgttgcgcaaacagccaagtctgcaggccgcccttgcctcgctaccgttatccctcatctcctggtagccccactttcctccctcgcctctcgggactcgggtgcccaacccactcccttccactcccgcgcgctcggtggctctcgggccggggcctcaccgtttggttcggtcgggaattgcccggccctcccgctcccacttcccaacacgaagtggcgtcggttggtccctctccccacgctgccagaccccacgccgccgcctactgatgccgaaagcggcttctag

SEQ ID NO: 3018 - DNA, 838 bp, Homo sapiens
  SIMILAR (545)..(613): 521254mologous to Homo sapiens Amino acid sequence of the trptase-L gene clone NVB352/3,accession number W68540,Smith- Waterman Score=49.
ttaggtgaggaagagtttagttattattttccaggaaggcaatgaaaggcacagactgcatatccaaaacccagtggactgtataagacaatatcctccagggcccagtgaagcgtaatagctccgagacagctactgataattcaaatgacaaaagccatagcatgaaatacaggccttgggcagcagcatctaaaaataggaggtcctcaggcatctcgggcaagatggccacacttctgttggcggtggtcactccccatctacattcccataacatgggcacatgcgggtactacacccacactgctaccttgtggagttctgtttcttcccctggggcactgggttcttacagggggacattggattgctcagcaactcctgttactagcactggtcctcattaatattttgcatctctggatgtatgctgctccacgtaggaaccactgcacacgtggctgtcgagcacttgataggtggtgtccaggatgatgaggacttagaaatgaccataggatgtcatggtgaagagatgattggtgaccttgataagaacagttttggcgctggtggtttgtgcatcggagagagagtaggagggcctgggtgctgtgaagtcctaattagaatgactccaacagaggatgtgggagaagagaggtctgacatgaagggaatacaactgagcatgcaagagaggaccagatgtagacaatttcctgaaggaaggagacatcagctgggccacctgcttcagggaggcctgggaagaggggaggcttggaaatatcaccagatttgggaagaaggtcactggctattgagggagcag

SEQ ID NO: 3019 - DNA, 450 bp, Homo sapiens
  SIMILAR (48)..(230): 361254mologous to Hydra sp. mini-collagen,accession number X61048,Smith-Waterman Score=81.
atgggacggacgagctgcacccctgggaaagagaacagaggaaggccggttatcaacgtcctcctgtgcctcagtttccagaaacaagccagactcagtgcctcagggagaccccgtgtggcctccggagagcacgggacccgccctttgtgcagctgcagggcctaccctcgccgggggctgctccctgcttacctccctcgcccgtgcaatgcctctacttcccgcaaggcctaccgggagatgttacaggtcacggtcatatttgagcatgagaagctcacgcagagaacattctggctgagggagaggactgcaactggcgtctccatctactggtaccgaggcgaggaggaaaaagcaggggggcccggagacggcccctctaagtctgtaactccagagctgctgctcagtccccagaacgtcacctccgagcagagcctgtga

SEQ ID NO: 3020 - DNA, 3261 bp, Homo sapiens
  SIMILAR (3040)..(1370): 1001254mologous to Homo sapiens OCTN2,accession number AB015050,Smith-Waterman Score=2883.
ttttttttttttttttgatatttaaaaaatcattttacttattaaaactttctcatttcccaaggcacttcagtagctttcacaaaaacatgtttgttcttttttaaccaggtgaggcatatgctttaaggagtaccatggtaacataatcagcaaagagaagacaattacactgaacacaaaatatcacccaataaagttacagggactaaagtgaggctactctgaaagactatgaacacaatttaaattggggttttgtaatatcctccccatgactaagtatcaaaaaaggaacacacacaatgaccctgtttttggcacttagagaaagtgctagaggcttagggctggtaaggccttgcacccagtggcagctgcagacaattgccagagtgattctgtgtttaaaaaaaaaaaaaaaaaaagacacaaaccaggaggctaaggaaccagcctttcccaagtgcattctgaagggcaaataacaaggagaaaaggatacaacaacaaacaaataaacagtaaaacaaaacccacattacagctttgagagaaaagacaacgttgctcatctctctcacctgataaatttcctttaaaccatacataagacgctatagtagcaaggaggtttccacagcagtggaaaacaagaatagtagattcaatggagcatttattatgagcctggacaagcccagtgctttgatcagatgtaaacaagtctactcagtcgtcatgctgagtggtcttaagagctcacacatcagtgcactttgctggtgatctgcatctgctcattctgctccatcttcattacctttcactttccctagctctgcgctctcctgccctggggaagcaatgatccagttaatgtcctctgtaactgagaaaaggtaagaatcaaactccttgtgcaattacttccttttcctctaaagttcaccactagaggggagtggggaaaggggtgggggacttagacctctagccttattaggggccttttcaagtagtctaaaattaaaatgtacatttagcatatgcttctcacattcctccagatctcactggttctagtgaaaaattaactgctttggaggtgctgagtccatcattgtaatagttaggacttagatgaagttgtctgtaggtagccccagtgtccctagaggaaggtggtgctctagggccatatgtagcctctgagtgtgggtgcccatccaggagcaagtcagacacaggtcaagaggacaaacagcaaaggcctttgtcactgaaggactcggagtctgcacaagctggccatttctggcaagacagtctttcctcttcagtttctcccttactggaagcgatgttagaaggctgtgcttttaaggattgtgggcctttcttgaccatcttttaacatccttgtgtgacttggagtttttctgtgtttcattcctttgactcttagcatctggtcaatggtgtctgggagtggggtaccgaagctctctgggagaaacaaggtgaggatggctgtcaggatggtcagacttcccatgagaatgtagggcaggaagcggtcgtaggcaccaaggtaaacgaagtagggagacaggatgctgcccaggcgggatgctgtggagctgactcccacacccatgtttctcaccactgtgggatacagctcggctgtgtacacgtagaccatggaaaaggcagccgtgactccaaacttgcccaccatcaccaggactgtagccaaataatacaagtctgggggtaccagctgcatgaagagaaggacactgccacccaggaagagggcagtggccatggaatagcgccggggcaaatattgcagcagcagccaggccaacacatatgctgggacttcaaccatcgctgaaaggaagcagttcacaaagatgtccccatgcaagttaggagtatcaagcgaaagcccaaaatagcccactgatatggtcatccacagcattatggacatgatggtgaccatccggatattccaggttcgaagcagatccagaatgttgtgggactgctgcttcttggaacttaggtcttgtaactcactcgggtcaaagatagtggaaggcacaacaatcccattggctttggcagccttgcggatgatcacctctgcctcttcaaatcgtccctgagagatgagccatcggggggactcagggatgaaccaccagagtgccacgcacagcacccccggcatcgtcagcgccaccagcagcatccgccagtctcggatgaagtaagcaaacagtggcagcaccatgtagccaaatgcataaaatatgcacactcctaacgtagagaatattatacgaactgacttgccaagaatttctgtccccaggacaaatgctgccacatagttggagatctggcccatgcctacaaggacaaacagcacgacaaacatctcaaaattcttcgagaagatctgcaggaagctgaagcctgtctgcatgcccatggtcacgaacagcacattcttccggccaaacctgtctgacagctgccctgaaatgaaggagcccaacagcacacccacgaagaacaaggagattgtgagtggggccttccagtcgtcctcacacaccaggttccactcggtcacaatggtggacaggtagacgtcctgactgaactcccagccatccagacagctctcctgctccagctgccccaggtccacgtcgcgccccggctccagcccgagcgccgagaagttggcgatggtggcgagccggtagcggcggcagctgtggggcacctcgcggccgtcccgcagccgcagtgggacagtgtggttgcgccaggcgctgctcaggttcgcggcgtccggcacccggcagcggtgctccggggtcgctatcaggaacacggaggacaggccggtgaagccattggggatgatgctggcgctgagcaggaagaagatgaggcgctggaagggcccccactcgcccaggaaggcggtcacctcgtcgtagtcccgcatgccgccctcagaggcccacagagcgcggcctggggtctgggaacgcggcgggctttgcgcgtgcgcgcggggcacccgccgccgaccaggcaagccaggcagcaggcgacccaagaccgtccgcggagggtaggctcgcgagctgacaccgccgccttggtcctgccgcggctggccttacatatggcgcacgaccagggaaggttccgggcctgggccgc

SEQ ID NO: 3021 - DNA, 481 bp, Homo sapiens
  SIMILAR (40)..(420): 991254mologous to Homo sapiens histone H2A,accession number Z83739,Smith-Waterman Score=625.
  misc_feature (1)...(481): n = a,t,c or g
cgcccccccttagatcaccgtccagataggagcaccntgtctggacgcggcaagcaaggcggtaaagctcgcgccaaggccaagacccgctcttctcgggctgttcttcagttccccgtgggccgagtgcaccgcctgctccgcaagggtaattatgccgagcgggttggagccggcgcgccagtgtacctggctgcggtgctggagtacctgaccgctgagatcctggagctggctggcaatgcggcccgcgacaacaagaagacccgtatcatcccgcgtcacctccaactggccatccgcaacgacgaggagctcaacaagctgctgggcaaagtcaccatcgcgcagggtggtgtcttgcccaatatccaggccgtgctgctgcctaagaagactgagagccaccataaggccaaataaggagcgaggttgtgaaaactggaaaacaaaggctcttttcagagccattctaaaaaaa

SEQ ID NO: 3022 - DNA, 420 bp, Homo sapiens
  SIMILAR (28)..(417): 1001254mologous to Homo sapiens histone H2A,accession number Z83739,Smith-Waterman Score=650.
agttcctccatttatcgtttcttcgtcatgtcgggacgcggcaagcagggaggcaaagctcgcgccaaagccaagacccgctcttctcgtgccggtctccagttccccgtgggccgagtgcaccgactgctccgcaagggcaactatgctgagcgggtcggggccggcgcgccggtgtacctggcggcggtgctggagtacctgactgccgagatcctggagctggcgggcaacgccgcccgcgacaacaagaagacccgcattatcccgcgccacttgcagctggccatccgcaacgacgaggagctcaacaagctgctgggcaaagtaaccatcgctcagggtggtgtcctgcccaacatccaggctgtgctactgcccaagaagaccgagagtcaccacaaggccaaaggcaaataa

SEQ ID NO: 3023 - DNA, 758 bp, Homo sapiens
  SIMILAR (733)..(359): 721254mologous to Homo sapiens CD37 (AA 1-244),accession number X14046,Smith-Waterman Score=447.
  misc_feature (1)...(758): n = a,t,c or g
tttttaccaaaaacgcaggggatttatttgaggtttgggtgaaaaataatcttgtgggtggtggtaggccgacagatggggacaggaagctgtggacgaaagccccaggtcccgtgggagaggtgacagcagcaggggcacgcagccacgtgggtccccaagggaatgtgaaggcggagggctccaggcgaactggggattaaacaaatatttacaggcagcagggaagtgcccagcgcacgtgacgggggcggggcgggactttggggagggcggggcctaacggtatcgagcgagccggttgtagacgtggtccaggtttctgcacaggaatatcgagagcgtcatgaacccgagctcgcggtaaatgtggctctctgcagggacagcgcatatggtctgcactgtgtctggaccgcgccaggtgtccaagcctgctgagctggggcaagatcaccttatctaggattgtggagtcgttggtcgccgacaagttgtagcaggagcagggcacgcggtgcgcctncgacccgttacctcttcagatgaggacttggnaccagtccttgcggtagtgccagccgcagcagcgcagcttgaactgcacatagtcccagctcttctcggggcgngtctnnnctcggggtggtgccgtactttttggatgtttctctttcacgtcccgcaagctttgctccagctgggccngctgagtgtgggatagatctcccaggtgactgggtggcaacagagcagca

SEQ ID NO: 3024 - DNA, 1335 bp, Homo sapiens
  SIMILAR (301)..(843): 1001254mologous to Homo sapiens CD37 (AA 1-244),accession number X14046,Smith-Waterman Score=948.
atggagacctgggagggactgccccatgagtccttggtgcccacaaattccaaggcccctcaggtgaagatgtcagcccaggagagctgcctcagcctcatcaagtacttcctcttcgttttcaacctcttcttcttcgtcctcggcagcctgatcttctgcttcggcatctggatcctcattgacaagaccagcttcgtgtcctttgtggggaggtttaaggagccaagccaatgtcacagaacaagtgatagggctgaaactactggggacgaggaggagctgaaggaggaaggagagggcttggccttcgtgcctctgcagatctggtccaaagtcctggccatctcaggaatcttcaccatgggcatcgccctcctgggttgtgtgggggccctcaaggagctccgctgcctcctgggcctgtattttgggatgctgctgctcctgtttgccacacagatcaccctgggaatcctcatctccactcagcgggcccagctggagcgaagcttgcgggacgtcgtagagaaaaccatccaaaagtacggcaccaaccccgaggagaccgcggccgaggagagctgggactatgtgcagttccagctgcgctgctgcggctggcactacccgcaggactggttccaagtcctcatcctgagaggtaacgggtcggaggcgcaccgcgtgccctgctcctgctacaacttgtcggcgaccaacgactccacaatcctagataaggtgatcttgccccagctcagcaggcttggacacctggcgcggtccagacacagtgcagacatctgcgctgtccctgcagagagccacatctaccgcgagatgactgtcatggtgctgagcgtacagctacagcgcagggcactccgccggaaatgcgagccgcacgtgccgggcgctggggattcgagccccgggcccagcctgatcgctgacggcggcggcgggcacagcggcagtctgtggggtggctggggcatggcgggtgcctgccccaactggggagacaaggcaccgcagggcaagctgcccatggccctggggctctggccgctgtgggttcaagacgaggaccagcctgacactggaacctctacccccacttgtagcagctattcccgcctcatcagccagccctgcggcagttcccgtcgagccccgcccttttctacctatccccttctccagccccttcccgcccaattcacggccccacccctgacctttctcgcccggctcgggttcatgacgctctcgatattcctgtgcagaaacctggaccacgtctacaaccggctcgctcgataccgttag

SEQ ID NO: 3025 - DNA, 1449 bp, Homo sapiens
  SIMILAR (309)..(1028): 411254mologous to Homo sapiens CD37 (AA 1-244),accession number X14046,Smith-Waterman Score=255.
accgctccggaattcccgggtggatacgcgcgtccgcggacgcgtgggtttctctctcagctctccgactctctttctctctcagcctctttctttctccctggctcccccactgtctgcacctcttctgtgtggcgagtggaccgcttaccccactaggtgaagatgtcagcccaagagagctgcctcagactcataaaggacttcctcttcgttttcaacctcttcttcttcgccctcggcagcctgatcttctgccttcggcatctggatcctgatcgacaaaaccagcttcttgtcctttgtggggcttgggctttcgtgcctctgcagatctgggtccaaagtcctgggccatctcagggaatctttcaccatggggcatcgccctcctggggttgtgttggggggccctcaagggagctccgctgcctcctggggcctgtattttggggatgctgctgctcctgtttgccacacagatcacccttgagaaatcctcatcttccaatcagcggggcccagttggagcgaagcttgcgggaacgtcgtaggaaaaaccatccataaagtacggcatcaaccccgaaggagaccgcgccagaagaaaatctgggactatgtgcagtccaacttgcgctggtgcggctggcactacggcagggactggttcaaagtcttcatcctgagaggtaacgggtcggaggcgcacccgcgtcactcgctcttgatacaactttatggcgacatagaactccacaatcctaaataaggtgatcgtgcaccagctcagcaggctggacaacttggggcgttccagaaaacgtgcaagacattgggctgttcctgagagagagcacacatttacccgggaaggctgcgccaagggccctccgaaagtggctgcaccaacaaccttatttttccatagtgggcatattgcctgggcgtcggcctactcgaagctcgggtttcatgacgctctcgaatattcctgtggaagaaacctggaccacgtctaccaacgggctcggctcgataccgtttaggccccgcccctccccaaagtcccgccccgcccccgtcacgtggcgtgggcacttccccctctgcctgtaaatatttgtttaatcccccagttcgcctggagccctccgccttcacatttcccctggggacaccacgtggctgcgtgcccctgctgctgtcacctcctcccacgggacctggggctttcgtccacagcttcctgtccccatctgtcggcctaccaccacccacaagattatttttcacccaaacctcaaataaatcccctgcgtttttggtaaatgaccacaaaaagggcggccgttctaaaaaagccctggaggggcccaatgttacccgtgcttgaccacgaatacctctttgcctatagcgacctcaatgactccctatctggctagt

SEQ ID NO: 3026 - DNA, 1563 bp, Homo sapiens
  SIMILAR (1048)..(686): 341254mologous to Caenorhabditis elegans collagen,accession number M25479,Smith-Waterman Score=92.
atgaaatatattgaacacaaatcgagcaaatatgacttggtcgttaacatccctctgattaaacaggagtgctgctatgagaacgggctgtgccattctgcaggcacacgagagtcgctgggttttagggtagtctctgtggagaatggtgactggaccacgtgggagaggggcttgaggcaggaagggattcaacaccagcctgttggcagtggacctgaccctgaccagtcacggaagccaactgggaaccaacgagggcaacagttagctgctctcagtgccacaacggacgaggatatggggactaatgctgaaaagccacagggcgttgataaggcactagcgataatcactgacctgagcccgttcttattcaaattcaagtgggcgaatcgcatggcgttgttgcaagcatcgtctgagaaccaagggtccttcctgagcatttcagacctgggtgcatcccgcactcacactcagttcctaccttgtgccgggccctgccatcagcccagagagccatgggctaaggggaaaaagcagcagggcccccatggacctatccaaaaggagattaatccagggtactcaggaaaatctgtgttggaaatccctgaaaaaacatggaagcagcatggctgcatgggacatagcctgatcccggatcctggctgtgaagtaagccgcgtggcttcggcggcacaccatcgtggccgtgggctggctgagcgctcagctcctcagcaccttggagacaccttggccctgctcgtggtcctgctgtggggcactggtcagatgacagtcttccccctgatctccacacccagctccctcactcccagctccacacttgcttcctggttggtcctggtgggccattattgggtctatgggactcagcaggcacctgtgctgatggtttctgggttcctggatgtttgctgctggaagttgggtggaagcagcgcggacccacggcgcatcgaacgcactccaacagaacccgacgcagacacgcgctttcaaccggcggagacactggcagggccagaaacgcgcgcagcgggggcgggaggtcggccctacgtctccgcaaaccccacgcttcggggtggccgcctcagacaggaccctgagtccgagactggggtaggggacctgcccgatcctgtaacaaccctcgtgcttctgcacaatcgcctcccactagcggtgactgttgggtgtctaccttcccggtgtcccactgagaagcgggctcttccttggcaggggcttcttcattgcctcgctgtggatgtcgaggtggggcaggagagtgaggagaaaacagagaggagggaggggtcagcagattatgatccagaggccaagcccagcccgtctgcttttgtgtataaagttctcatggaacagagctgtgagcctgccgtgtgtggtctacggctccccctggacacagctgcagagctgattcccgcacagacctcggggcccgcagagggaggcgccttccctccatcatccccactgagcaccagccgccgcagccgctaa

SEQ ID NO: 3027 - DNA, 903 bp, Homo sapiens
  SIMILAR (357)..(488): 451254mologous to Homo sapiens Human secreted protein, SEQ ID NO: 6064,accession number G01983,Smith-Waterman Score=79.
atgtctccacctacccaagagtgggcgaatcgcatggcgttgttgcaagcatcgtctgagaaccaaggccctgccatcagcccagagagccatgatgccatcctctccctgtgtcttcacacgatcatccctctgtatgtgtctgtgtcctcatgtcctcttaggaggatgccagattgcatcagggccaacctggtgacctcactttatgctaatcacctccctaaaggccctgtctccaaatctagtcccatcaggggctgcatgggacatagcctgatcccggatcctggctgtgaagtaagccgcgtggcttcggcggcacaccatcgtggccgtgggctggctgagcgctcagctcctcagcaccttggagacaccttggccctgctcgtggtcctgctgtggggcactggtcagggctcagggacgcaagttcgtgtcctaatcccagtgagcttgtgctccacagtggagaaaaaactacgtgggcaaagaaaaccaacgatcggcaataatttttaccaagaacccggggttaggggggatatggaggatggagggtggctaatgccagaacgagagcttttggaagaaaggagaccaatgaggaaaaccttcatggaggagctcgaacaatcgaatgctctgcccaagtgccagttgggtgatgaagatgacagggctggggagcaagcccagaagaatcgggcctggggaagcaaagggttggcctgggaatctgatatcctgtgctacatgactgctatgggaaaatgtatcccaacctgcgagaaacttctggaacaagctgcttctaggctggtgccagcccaggcgctgtgggcctcagtggaagtgtggccttgccggttcatcctctgcgggactgaaggctcctag

SEQ ID NO: 3028 - DNA, 683 bp, Homo sapiens
  SIMILAR (398)..(595): 321254mologous to Homo sapiens integrin alpha 7A subunit,accession number AF034833,Smith-Waterman Score=67.
atgtctccacctacccaagagtgggcgaatcgcatggcgttgttgcaagcatcgtctgagaaccaagggtccttcctgagcatttcagacctgggtgcatcccgcactcacactcagttcctaccttgtgccgggccctgccatcagcccagagagccatgggctaaggggaaaaagcagcagggcccccatggacctatccaaaaggagattaatcccagggtactcaggaaaatctgtgttggaaatccctgaaaaaacatggaagcagcatggctgcatgggacatagcctgatcccggatcctggctgtgaagtaagccgcgtggcttcggcggcacaccatcgtggccgtgggctggctgaacgctcagctcctcagcaccttggagacaccttggccctgctcgtggtcctgctgtggggcactggtcagttcacccccacacagcagggacctgtctcctgcaagcctcgctgtcaccgcatcctggacgtacatgagggcctgtgtctttcacagcgaagtccagacctcctgatgtgggatgatgcagcaagaagacccttaccagatgcaggcccctcaaccttggacttcctaacatccagaactgttaagaaataaaatttattcctttcctttccttttcttcctcctttcccttctcttccctcgtgcc

SEQ ID NO: 3029 - DNA, 534 bp, Homo sapiens
  SIMILAR (235)..(447): 231254mologous to Scaptomyza albovittata hunchback protein,accession number U93019,Smith-Waterman Score=61.
atggtggaagtacaagtgagtgaaacagaagtaagtgttcagaaagacagtttgggcagagtagacagtgtcaaatcaatgaatatcatatttaatggaagaaaacaccccagggggcagagaatgcaggaaattgtgtgtcactgtgatgaaaagcaaatgaaaggctttacagcagaaatgttggtctctgatcatctaacacgtccatcacaacttgcagatgtgttgtgtagacaccagccaactgagcatccaaaaacagattcttctcattctcttgttcaccacgtccttcactggaactctcagagatcagtaggaagcagtagatgttgtgagaaaaataatatccccacaatagaggacgatacagcttacaatgtccataatgctaatattgagaaactctgcccagaaagggaagatgaatctcaagagaacagaattggcatcatgtggcccagatgtttcctacttccagaagattttcctttcaatgctacctctggaggttctgggttttcattgtga

SEQ ID NO: 3030 - DNA, 1134 bp, Homo sapiens
  SIMILAR (469)..(762): 831254mologous to Plasmid F Protein D,accession number M12987,Smith-Waterman Score=394.
atgcaccagcacagaagtggaattgaatttgctctaaaggagaccaagggatttttggacaaactccataatgaaattactaggactttggaaaagatcagcagccgagaaaagtacatcaacaatcagcttgagaatttggttcaagaatatcgtgcagctcaagcccagctgagtgaggcaaaggagcgataccagcagggaaatggaggagtgacggaaagaaccagactcctctctgaggttatggaagaattagaaaaggtaaaacaagaaatggaagaaaagggcagcagcatgactgatggtgctctagagcctggaagaggactcactcctatatttttcactggagaagagactcctacaattgcgcctgccctacctgggacctccatcttctcaggtgccgtgccagtctggccaagagtggacaccttagtcaaggtatttattcgcgataagctcatggagcggcgtaaccgtcgcacaggaaggacagagaaagcgcggatctgggaagtgacggacagaacggtcaggacctggattgatgaggcaggtgccgccgctgctgctgacggtgtgacgttctctgtttcggtcacaccagatacgttccgacattcctatgcgatgcacatgctagatgccgacataccgctgaaaggtctgcatagcctggagggacataagtacatcagttcaacggaaggctacacgaaagatcttgcgctagatgaggctgccccgcaccgattgcacacactctctcttcagattcctctggagacaggggtttctgcctcttaccccatccccttcacctgggagagaactgtcactaaactcagcaaggaagactttctcaccttgggttttcagttaatgggggtagacacaaaacaactaaggacattgactgcggttgctttgagcaaggcagttagaggcgaggtttcgcagagcgcattttacccaccacagccctgctctcctcggatgcccatgccgatgggcgagtgcactcacctggctgtgaccgtggaacgccgcttttctcagtgtgaagacacctggcccaaacagggcactttaaaccctttgaggaataagatggagtcatataaataa

SEQ ID NO: 3031 - DNA, 1248 bp, Homo sapiens
  SIMILAR (856)..(1050): 691254mologous to Homo sapiens Human secreted protein, SEQ ID NO: 6688,accession number G02607,Smith-Waterman Score=221.
atgacagcagagcatgaaaccaaggacaggaaccttctgcgttcaggccctctgtaccctgaggtcacaggacttgagcctggtcaatcagcatccctggtctcccttgccacattgactcttcagggaggactcctctctcccagggaagtttctgttagaattgatggaggagggtctccatggcatcgcatgtgggaaccagaggcctgggaccaagaaaccaagactttaccagcagcagctgtctctgcctctaattcagtcagtcctgatgaagtggtagctctctggcaattccagaccatgcctcagggcctgcagatgccaaagaaaggaccactcctcaggcaccaccacatcatggcaacatctcagcagctcaaagacgtggcagctcctcatcctgaggcacttgaatctgtgacctctgttgtacacaaagccagggatatagggaaaggggagaggaaatatcctcctcaacacactgcaaaagaacaactctgcactgctgctgtgtttcctggcacactggaggcctttggccaacttccccgaaccctgtctcagcagcttctggctcattgctcgctgacacggccacctctgctcctgccaaggaaatctgctggcctttgcttcccctccccacctccatctcactcagttcctcctcaggccacaggcatgcctgagtggcaaatggcagcaaagaggaaggtgaaaaaggcaggaagaacgggaggaagggagcccgagagaaaacattcagaggagggagtttatgtacattatccaaatggatgtcaggtccctgtcgacaaagtttttaattgtgtgtggaaccacacgatcgtctcaatagatgcagaaaaaccttttactaaattccaacatcctttcatgagagaaatgctcaataaactaggcatcaaaggaacatacctcaaaataataagagctgtctatgacaaatccacagcaagcatcatactgaacaggcaaaagctggaagcattctccttaagaactgaacaccagagaggtcagtggtgctcggagaagactttagctttgccaccccctatgctgggtatcgttgtgaaggactcagatgcagcaactgttggtggtttagctcagattacttcttctgtcaagcttcctccaatccttctctcaccttctacctacccagctgccatccagggaagagttgctccctacctgtgctgtggcccctag

SEQ ID NO: 3032 - DNA, 1479 bp, Homo sapiens
  SIMILAR (286)..(573): 321254mologous to Enterococcus faecium SagA,accession number AF242196,Smith-Waterman Score=100.
atgatctcctggcccacccctgccctcttcccagccagagtcagagtcatcagggaatctctcttagatcttcaccaggagaatctggtagagtccctggagcacagaactgtactcaacctgattgaactcccacggaggggtaggcttccaaacgcaactgaatttcattttggtgcagcacctttctgcctcaaggccttagctttgatagctttagaaaataatggatatggtaacactatgcagggtttaaagtgccctgtttgggccaggtgtcttcacactgagaaaagcggcgttccacggtcacagccaggtgagtgcactcgcccatcggcatgggcatccgaggagagcagggctgtggggagcagccccttcactggcagtgagaaaggtgctcatttgaatatcaagcaacggaccagtgaaaattggcaaaggccagaaaagcgaccttcagaaggagccagcaccccagctcctgcctcagggcgatatgaagaccccaggaaggaaattatgctgagaaaaggagatcacacctctgtccagcctgcaccggccccttggcatgccctgaagacacaaggcctaaatcaaggtcaaagacacagccctcctggttgtgaagattccaaaggctcccagctgcatgaggagggttacccagaatgtcagatttggagcaattcagcgagaacccttcaaaattcagtgtggtatgtggaagagggtcaccctcatctagcagatgtgggcaggaagagaagtccacttgtgcttgctgccagaggagatggccactgccaattgaggctgatcatgaagagtgggttcctggagtcctcagcagagcactggctattcatggacaaggacaggaagactgtgccgaagatacctttttggtctcagattgttgaattttccttgactcctgggaaacagtttaaagcagccgcaaacatggtttccacaactgcattcctgaagcgcatacccagagttacttcttgtaacagcactttcttccagatgactgagatgcgtctgctgaaactgaaaggatcagcattcccagcttttaaagtagatgcttcctgtgagacccagcgcccagaagccactcacagacccttgcgggtgtctcttcacatgctgttcagtgccattgtagagatgaggcatccagaaacgtttgaccttgtgcaagaacttggcatccacttctgtcctccttcttccctagaagggaagcgctggactgggatcattagcatgagcaggcagtgctgccagctgcccgcctgtgtcctctgggctccggctggttatctgacattttgccaatcagttctctttcaattggtgctttcacatataaccaaaataataactgaagactatgatgataacactgagattcttcgcagtcactgtgtcattacagataaaactgtgttttcagcatag

SEQ ID NO: 3033 - DNA, 1780 bp, Homo sapiens
  SIMILAR (1655)..(1599): 711254mologous to Homo sapiens Fragment of human secreted protein encoded by gene 8,accession number Y36421,Smith-Waterman Score=69.
atgcctcagggcctgcagatgccaaagaaaggaccactcctcaggcaccaccacatcatggcaacatctcagcagctcaaagacgtggcagctcctcatcctgaggcacttgaatctgtgacctctgttgtacacaaagccagggatatagggaaaggggagaggaaatatcctcctcaacacactgcaaaagaacaactctgcactgctgctgtgtttcctggcacactggaggcctttggccaacttccccgaaccctgtctcagcagcttctggctcattgctcgctgacacggccacctctgctcctgccaaggaaatctgctggcctttgcttcccctccccacctccatctcactcagttcctcctcaggccacaggcatgcctgagtggcaaatggcagcaaagaggaaggtgaaaaaggaaggaagaacgggaggaagggagcccgagagaaaacattcagaggagggagtttatgtacattatccaaatggatgtcaggtccctgtcgacaaagattttaattgtgtgtggccctttctccttataacttatggaactggtccaaatgaggctgacttggtagccaatctggcatccgctattgaacctgcatacctaaggaagttactgcttaactcaactctcctgcttctgcctggagggaacactgcccatcctgtacactgccggaggctggaaaaggtgtcaagagatttgtgcctggccaagaccttggaggatgatggtgttgcacttcgtctagttattcagcacagaactgtactcaacctgattgaactcccacggaggggtaggcttccaaacgcaactgaatttcattttggtgcagcacctttctgcctcaaggccttagctttgatagctttagaaaataatggatatggtaacactacgcagggtttaaagtgccctgtttgggccaggtgtcttcacactgagaaaagcggcgttccacggtcacagccaggtgagtgcactcgcccatcggcatgggcatccgaggagagcagggctgtggggagcagccccttcactggcagtgagaaaggtgctcatttgaatatcaagcaacggaccagtgaaaattggcaaaggcccagaaaagcggaccttcagaaggagccagcacccccagctcctgcctcagggcgatatgaagaccccaggaaggaaattatgctgagaaaaggagatcacacctctgtccagcctgcaccggccccttggcatgccctgaagacacaaggcctaaatcaaggtcaaagacacagccctcctggttgtgaagattccaaaggctcccagctgcatgaggagggttacccagaatgtcagattttggagcaattcagcgagaacccttcaaaattcagtgtggtatgtggaagagggtcaccctcatctagcagatgtgggcaggaagagaagtccacttgtgcttgctgccagaggagatggccactgccaattgaggctgatcatgaagagtgggttcctggagtcctcagcagagcactggctattcatggacaaggacagaaacagaagaaaaaaagacccagagaaggcaagaaggtcatatggagacagagatcggatttgtagagccacaaaccaaggaacgcctggagccaccgaagctgggagaggcaaggaaggatgctcccttagagcctttaaaggaaacgcagccctgctgaacactgatttcaaacttctggcctctggaactgtacagaatacattatag

SEQ ID NO: 3034 - DNA, 447 bp, Homo sapiens
  SIMILAR (1)..(426): 801254mologous to Mus musculus Pro-Pol-dUTPase polyprotein,accession number Y12713,Smith-Waterman Score=621.
gctgacctggctacggccactgatgtgtgctcaattttccagcagcagagaccaacactgagccctcaatatggcaccattcctgggggtgatcagccagctacctggtggcaggttgattatactcgacttcttccatcatggaaaggacagaggtttgtcctcactggaatagacacttactctggatatgggtttgcctatcctgcatgcaatgcttctgccaagactaccatctgtggactcacagaatgccttatccactgtgatgatattccacacagcattgcctctgatcaaggcactcactttaccgctaaagaaatgtggcagtggcttcatgctcatggaattcgctggtcttaccatgttctccatcatcctgaagcagccagattaatagaacagtggaatggcctgttgaagcccaattacaacaccaactaa

SEQ ID NO: 3035 - DNA, 624 bp, Homo sapiens
atgatgaatgaggggtctggtgtctcattgtctggatacgatgatctgaagaaacagggaacacaacatggtcgaaagggtaaaataattcaccggctcacaatacatttcctagtgaatagatgcctggcgatggggccaataacaggccactcgccttcacgggaaaggtggcacctcgatcgaatactcctctttacagttacacagtgtcggtcaaaagaagagtcagtcttatcctcatatagaacctggaacatagaaatgcttatagtcattctggaagatacaagcaagcatcttctacgttccaatttctgggaaaacgaaggtaaatctgactatggttttgtgttcccatggtcaggaagaccaacaggtacccgggtcagcctcagggcctgctgccacgtgggtataactgagaactgtggatgctctccattgggagcaatagatgattatccgtattgtgctcaatttgagggggaggctaagggctggggaagctggtgtgaggtctctgggatcatgaagacattgaaaaagaaaaaagaaaatgatgaaaggcgggactcatggacattttgttacaaagtggtccagatttgtgtcacaggatga

SEQ ID NO: 3036 - DNA, 417 bp, Homo sapiens
  SIMILAR (271)..(351): 481254mologous to Mus musculus Pig-b,accession number D84436,Smith-Waterman Score=69.
  misc_feature (1)...(417): n = a,t,c or g
gactatattggcatcctgttctaaatgtcaagtgaagaaaaggttcnnnnnnnnnnnnnnnnnnnnnnnnnnnnnnnnnnnnnnnnnnnnnnnnnnnnnnnnnnnnnnnnnnnnnnnnnnnnnnnnnnnnnnnnnnnnnnnnnnnnnnnnnnnnnnnnnnnnnnnnnnnnnnnnnnnnnnnnnnnnnnnnnnnnnnnnnnnnnnnnnnnnnnnnnnnnnnnnnnnnnnnnnnnnnnnnnnnnnnnnnnnnnntttaagagggaactcctctgggtctcactgcttgagctgagacactggctcacctggctctcgtgccttcggacttgaactggaacttaccctgtcagctatctcgggattccagattgccagctgcagattttgggacttcctggccttcacagtcatacgaaa

SEQ ID NO: 3037 - DNA, 253 bp, Homo sapiens
  SIMILAR (1)..(138): 581254mologous to Homo sapiens ribosomal protein homologous to yeast S24,accession number X62691,Smith-Waterman Score=117.
gtgcacacggatgtcctggctgacattctcaagagcatcaacaatgccgaaaagaggcaaacgctaggtgctttttaagctgtgctccaaggtcattgcccgtttctcactgtgatgatgcagcacggattatgcggggtggagttggggggactttctgggccgggggacttttgcaagagaccccggtgactcaggattttgagttcttaaccagtcgagtgaaggattcaaaattaaccactccaagggg

SEQ ID NO: 3038 - DNA, 1011 bp, Homo sapiens
  SIMILAR (662)..(868): 281254mologous to Anopheles gambiae putative tubulin alpha chain,accession number U50468,Smith-Waterman Score=71.
atgatggcatgtttaaatgccaatgggaaggacagagaaatggatggtgtggggaaaaaccaagaacttgagtggaccaagggcacagagcagccttccagaggaacaaggagatttctggcagagggctcctttaggtcagcaacaacgtctgactcaacactagattcccacatgcaaaacagtcccaagcccaaaggggctcataaaatggtttatgttttgcttgtccaacagaccctgagcacctctaaatgtgatatccacaaccaaagggcaggctccaaaggcatggctggcggaggccacctggcccgctttgtgttggaccgtcacgctgccgtgtatcggaggcgtcagggtctgcagggctttgcggcagctgcagcccactcttgccactgtgatgggagctgctctgaaggatacgtctcatccatcctgcacctgagctcaagtgctcatcgacccttcctggctgctgttggactgggtcggggctgttgttcaagcttgctaacgaggaacagccaagataaacatcaagaaaagaaaaggaaagaaatcaccctcttgggaaacaaagaaacaaaccccaaacctctaacccaaatccctgagcttttgcggagacagacacagcttactccagaaagaagggtgcagctcagcatccctaaacactcccaggtgcgtgctctgcgacagagtgcgcaggacacggagctgcttaatggaaaccaatcctgcaacacttgctgtggtgatgcagccttgggccccgccagcagcggcttgctggctggcgcggggtcctctcccgggtccgctgcgttgcgcgggcaggacagtcaggataaagtggagaagactgagcaagaaagagctgcttcagaacaacgggcacatctggaggaagacagaggcctgacagtgcacacggatgtcctggctgacattctcaagagcatcaacaatgccgaaaagaggcaaacgctaggtgctttttaa

SEQ ID NO: 3039 - DNA, 814 bp, Homo sapiens
  SIMILAR (397)..(744): 281254mologous to Streptococcus pneumoniae surface protein C PspC,accession number AF145055,Smith-Waterman Score=99.
aaaaaactctcaaagagcatgtaatatgggaatacgaagttgacaagatgttattaaagacgaataaaattataccaatacctagacacctgatcccaacattaaacatgaaatacactaaaccagagttattttctggaggagtatttaaaatgatggggatgttattacttgggtcgcaatgaacctgaaaaccaattttctacagaatatacagcagcagggaagcaaggggaccagcagacccctttttaagtacgcatgtgataagcaatgaacacgaactgcccagagcagtctccaacactgacacgattcgcttccccaccacgacgccctagcgctactgtgcaacgaagacctcccaagcactggttccaatgcggagaccatgggctcccagactctgggaactccaacacgactgcgaaacgaactccgagcgaggactccccgagagctccccgcaacacggacctcacgcgctagcgaacaacagaaaaaaaaaagcgcgctctccctgcccctgaaacattcccagaagcccacgcagaccagaccgatgacctgtctccactgctggaggcgagtcagggacccgaagtctctaaacactcgcctctacccgccgccccgcgaaccccacacactgcagacgcgacactcgcaagtttcggggatggcggccggcgagggccatactgcgtctttccggagacacggaatacggcaccagccgtccctttatgatgcaatatgtctgcgcccaggggacgcttgctgggagcagccattttcaaccctactgccgtag

SEQ ID NO: 3040 - DNA, 568 bp, Homo sapiens
  SIMILAR (107)..(226): 871254mologous to Homo sapiens calbindin D28K,accession number S46006,Smith-Waterman Score=193.
  misc_feature (1)...(568): n = a,t,c or g
caaaaagcactcccactgagcaccttgcgacccccactcctacccgccagagaacaaccccctttgactacgcgcatgaaatttggtgccgtgacttggatcgggggacctcccttgggagctcaatcccctgtcctcctgttctttgctcggtgagaaagatccacctacgacctcaggtcctcagactgacccagccaaggaacatctcaccaattttaaatcagaaggcaggaatgtcaggctctgagccaaancaaggcatcgcatccccctgtgacttgcanctatacggccagatggcctgaagtaactgaagaatcacaaaaagaagtgaatatggcctngcccggcttaacttgatgacattccaccacaaaagaagtgtaaatggcaggtccttggcttaagtgatgacattacctgtgaaagtccttttcctggctcatcctgggctcgaaaacaccgccacttgngcaccttgcgacccccanttctggccgccagagaacaaaccccctttgactgtaattttcctttactacccaatcctgtaaatggnccaccc

SEQ ID NO: 3041 - DNA, 410 bp, Homo sapiens
  SIMILAR (74)..(250): 771254mologous to Human endogenous retrovirus tripartite fusion transcript PLA2L,accession number Z14310,Smith-Waterman Score=236.
  misc_feature (1)...(410): n = a,t,c or g
gtgcacccaggtgaaataaacagccatgtagctcacacaacgcctgtttggtggtctcttcacacggacgcacatgaaatttggtgccctgactcggatcgggggacctcccttgggagaatcaatcccctgtcctccntgttctttgctccctgagaaagatccacctatgacttcaggtcctcagactgaccagcccaaggaacatctcaccaattttaaatcagcggccaggcgttcctccagaacctcctcccacaggaacttgctacacgtgctggaaatctggcaactggaccaaggaatgcccgcagcccgggatttctaagccgcatcccatctgtgtgggaccccacggaaaatcggactgttcaactcacctggcagccanttccagagccctggaactc

SEQ ID NO: 3042 - DNA, 678 bp, Homo sapiens
  SIMILAR (144)..(188): 461254mologous to Sus scrofa domestica polyprotein,accession number U77600,Smith-Waterman Score=40.
atggctgaggaggactcaggaaacttacaaccagaaggtgaaggggaagcaggcacctcttcacatggtggagcaggagagagagtgaaggggaaggtgctacaaacttttaaacaaccagatctcacaaagcagacacgttttatccgtggacccaaaactccggcgccggtcacggactgggaaggcagccttcccttggtgtttaatcattgcagagatgcctctctgattatacacccacatttcaagggtgtcagaccacgcagggacgcctgccttggtccttcacccttagcggcaagtcccgcttttctggggaaggggcaacacgctttaaaaagattaaagcctattatcactcgcctgctacagcatggccttttaaagcctataaactctccttacaattcccccattttacctgtcctaaaaccagacaagccttacaagttagttcaggatctgtgccttatcaaccaaattgttttgcctatccaccccatggtgccaaacccatatactctcctatcctcaatacctgcctctacaacccattattctgttctagatctcaaacgtgctttctttactattcctttgcacccttcatcccagcctctcttcgctttcacttggactgaccctgacacccatcaagctcagcaaattacctag

SEQ ID NO: 3043 - DNA, 5130 bp, Homo sapiens; identical to SEQ ID NO: 2332
  SIMILAR (2614)..(4473): 941254mologous to Homo sapiens putative p150,accession number U93572,Smith-Waterman Score=3044.

SEQ ID NO: 3044 - DNA, 1404 bp, Homo sapiens
  SIMILAR (1)..(246): 701254mologous to Homo sapiens putative p150,accession number U93568,Smith-Waterman Score=282.
atgggagactttaacaccccactgtcaatattagacagatcaacaagagagaaaatcaacaaggatattcaggacttgaactcagctctggaccaagtggacctaatagacatctacagaactctccacctccaatcaacagaatatacattcttctcagcacgacatcacactttttctaaaattaaccacatgattagaaggaaccaaaaaagagcccgtatagccaaggcactcctaagcaaaaagaacaaagctggaggcatcatgctacctgacttcaaactacactacaaggctatggtaaccaaaacagcatgtgacatggatgaagctggaaaccatcattctcagcaaactaacacagaaacagaaacccaaacaccacgtgttctcactcataagtgggaattggacaatgagatcacatggacacagggaggggaacatcacacaccagggcctgtgccacagttgcatggctgtgcactatatcactcctggggattaccatccatttggactgcagaatcagaggagactctagagttgtacgccgtgctggcatctcacaggcaggctctggggtattactgcagtgagacaaaagagacacgttttatccgtggacccaaaactccggcaccagtcacggactgggaaggcagccttcccttggtgtttaatcattgcagggacgcctctctgattatacacccacgtttcaagggtgtcagaccacgcagggatgcctgccttggtccttcaccctttgcagcaagtcccgcttttctggggaaggggaaacacgctttaaaaggattaaagcctgttatcactcgcctgctacagcatggccttttaaagcctataaactctccttacaattcccccattttacctgtcgtaaaaccagacaagccttacaagttagttcagaatctgcgccttatcaaccaaattgttttgcctatccaccccgtgggtgaggctcctgtacctttggaaacaggagggaagagtgggaaggactgcatcttatggtttgagtgccatcttagccacaatacaatagaacaccaggtctcatccagtacattcagaatagtggtggccacaggggtgcttgtgtcactccacccacaactttatatggctcagaatagagagagacatgctgaatgtttgggtgaaagtaagggaagagaacaagagtctctgtcgggtaatccagagaattcaagattttctctactaacatcaaggaggtacctctacaagtcaacaagaactatagtattactaggcttggcaggccccctgaagcagaaaaagcttagatcacagcacccaagcctttacaaatatctgcaaagctttcgcaacaaggacagctacagataa

SEQ ID NO: 3045 - DNA, 1671 bp, Homo sapiens; identical to SEQ ID NO: 243
  SIMILAR (1159)..(1668): 791254mologous to Homo sapiens NAG13,accession number AF194537,Smith-Waterman Score=664.

SEQ ID NO: 3046 - DNA, 696 bp, Homo sapiens; identical to SEQ ID NO: 2107
  SIMILAR (217)..(327): 831254mologous to Homo sapiens Human secreted protein, SEQ ID NO: 5576,accession number G01495,Smith-Waterman Score=154.

SEQ ID NO: 3047 - DNA, 732 bp, Homo sapiens; identical to SEQ ID NO: 2535
  SIMILAR (660)..(731): 661254mologous to Homo sapiens putative p150,accession number U93568,Smith-Waterman Score=81.

SEQ ID NO: 3048 - DNA, 753 bp, Homo sapiens
  SIMILAR (59)..(97): 761254mologous to Homo sapiens calbindin D28K,accession number S46006,Smith-Waterman Score=45.
atgaacagccatgttgctcacacaaagcctgtttggtggtctctttacacggacacgcatgaaatttggtgctgtgactcagatcgggggacctcccttgggagatcaatcccctgtcctcctgttctttgctccatgagaacgatccacctacgacctcaggtcctcagacccaccagcccaaggaacatctcaccatttttaaatcagaccatctgggatgccaagcttcgggtaactctcacagtggaaggatcaggcaatggaaactgtgctacccagcagcagtcctctcgggaaagtgaaatgcaatggggtgaagcagtggaagatcttgaggaaggatgctggggtaggcttgctctgagtggggttttggattctgctgcaccaagcccagagctgagaatctcattcccagatatcaaggtcatggtggccaaagaagcaaacaaagccacaaaaatagcaaaaatgtccaaaatcaaaatggtagaaggtgactcagagggtcattcaatggagatacacactggcaccagtgttagcatgtccaggtcagtcgatttatggtcctccaagtggcttacagcagtggcagttgtgggctatggatggcatgtgcagatgcacaacagtccagttgctggggacagtgaggtcattgccagtaaccctcagccctggcagcagcagtcagcagcagtagcagctcaggcagaggatgtcaatgcagctccagtgatgttgtga

SEQ ID NO: 3049 - DNA, 1566 bp, Homo sapiens
  SIMILAR (768)..(797): 901254mologous to Rattus norvegicus potassium channel,accession number AF091247,Smith-Waterman Score=58.
atgaggaccagagaagtcagcataactggagcagattttacagctctactggtagatatcattggcaattctaccagctacctcacagagatttttaagtcaacctccatcctctcagtgaatcaaagcaatgaatcagattgcatcttcatctgtgtgatgacaggaaagtcaggaaggaatctttctgacttctgggagatagaagaaaaatatcccattatcaattacacatttaccagcggcttgtctggtgttctggctttattgctcacacaaagcctgtttggtggtctcttcacacggacgcgcatgaaatttggtgccgtcactcggatcgggggacctcccttgggaaatcaatccccgtcctcctgttctttgctccatgagaaagatccacctacgacctcaggtcctcagacagaccagcccaagaaacatctcaccaatttcaaatccgggaccgaggaagccatgaacactacaagccttttggcgcctgctgctgagataatggccacacctggcagcccatcccaggccagccctacctcgggagcattcacccatggcacacagactccgagtccaaccaaggcaacagcccccagatatccacaaacaggagcgcagagtcgacggccccgccgcttccgccggccccctgcgggggccgcccccaaagcagccgccccacggcacccgcacccgcggggcaccgccccccccccccggcggatatcacctgaatctattcgcccacacccccccccccccctagaccgcggcccccgcccccccgtcacgccgttcctgattgtcctggggtgcttgattctggctgtcctgaccacattcaaggagtatgagactgtctcgggagactggcttctgttactggagacatttgctattttcatctttggagccgagtttgctttgaggatctgggctgctggatgttgctgccgatacaaaggctggcggggccgactgaagtttgccaggaagcccctgtgcatgttggacatctttgtgctgattgcctctgtgccagtggttgctgtgggaaaccaaggcaatgttctggccacctccctgcgaagcctgcgcttcctgcagatcctgcgcatgctgcggatggaccggagaggtggcacctggaagcttctgggctcagccatctgtgcccacagcaaagaactcatcacggcctggtacatcggtttcctgacactcatcctttcttcatttcttgtctacctggttgagaaagacgtcccagaggtggatgcacaaggagaggagatgaaagaggagtttgagacctatgcagatgccctgtggtggggcctgatcacactggccaccattggctatggagacaagacacccaaaacgtgggaaggccgtctgattgccgccaccttttccttaattggcgtctccttttttgcccttccagcgggcatcctggggtccgggctggccctcaaggtgcaggagcaacaccgtcagaagcactttgagaaaaggaggaagccagctgctgagctcattcag

SEQ ID NO: 3050 - DNA, 2678 bp, Homo sapiens
  SIMILAR (1662)..(1955): 941254mologous to Homo sapiens NAG13,accession number AF194537,Smith-Waterman Score=482.
agacaaaggagacatgttttatccgtggacccaaaactccggtgccggtcacggactgggaaggcagccttcccttggtgtttaatcactgcagggacacctctgtgattattcacccacgtttcaaaggtgtcagaccacgcagggacgcctgccttggtccttcacccttagcggcaagtcctgcttttctggggaaggggcaagccgagctaggtcccaattcttcctcagcctctgctcctccaccctataatctttttatcgcctcccctcctcacacctggtccggcttacagtttcgttcggtgactagccctcccccacctgcccagcaatttactcttaaaaaggtggctggagccaaaggcatagtcaagcggctgaagactgacactgcccgatcgccttggaagacccctagaccatcacggacgccgagcttcagaaaagcagaacggactaaaggtcttttaaaaatacacctcaccaagctcagccaccaacttaaaaaggactggacaatacttttaccactttcccttctcagaattcaggcctgtcctcggaatgctacaagactggctactggccaattgggatatccttttatcagtcaaagctatgtcctggtcaatggatttcaaactgttgaggatctatgtgaagctgcagaccttcgagtgagtgttgcagaccttcgagtgagtgttacagctcttaaggtggcgcgtctggagttgttcgttcctcccggtgggctcgtggtctcgctggcttcagcagtgaagctgcagaccttcgcggtgttacagctcataaaagcaaaaagatgggactggggcaccttggagcagggggcggcgctcatcggggaggctcgggacgcacaggagcccacggagggggtgggaggctcaggcatggcgggctgcaggtccagagacctgccccgcgggaaggcagctaaggcccggcgagaaatcgagcgcagcgccgggctgacgatcaagaaggaaagatgcatacgaaatggatacagcaaagaaaaaatgaaactcatagttgtttctcatggcctccatgtaaatgacttgcagcataaactgacgcttttcaccaaggaaacatacacatacctagccagggattcagagaagcagaagcaggggtatctagcaggacttgaaggagcccatgccaacagggtgaaccagcagatcagtgacaacttagtagttaaaacaggggccttaccccctccttatagaaccaagggagaaaagctctatttttatatgtccagacagaactgccttttcagcgtatcagggcaactcctccaaggtttctttcctaatggaggacaagctgcacctaacccttatgctctgctttcccaaataccagaagaagcagaatggtttacagtcctggaccttaaggatgactttttctgcatcccttacatcctgactctcaattcttctttgcctttgaagatccttcgaacccaacgtctcaactcacctggactgttttaccccaaggtttcaggccatctatttggccaagcattagcccaagacttgagccagttctcatacttggacactctcgtcctttgtggggtgttaaagtctcccattattattgtgtgggagttgaatcaaatagacacaataaaaaatgataaaggggatatcaccaccgatcccacagaaatacaaactaccatcagagaatactataaacatctctacacaaataaactagaaaatctagaagaaatggataaattcctcaacacatacaccctcccaagactaaaccaggaagaagttgaatctctgaatagaccaataacaggagctgaaattgaggcaataattaatagcttaccaaccaaaaaaagtccaggaccagatggattcacagccgaattctaccagagggttgctgatgtaaaactgagagaagaaaaagatgaaaatatgctgttggtgcccctctcagatcttctttaccaggtccatgctcccatcccccagctgccagaggtgttggctgctaacagccccacctgccacttggatcctcccactatcacagaatccaagagcaatgaagccaccacaggacgacaagcttcactcaaatgtgaggcctcggcagtgcctgcacctgactttgagtggtaccgggatgacactaggataaatagtgccaatggccttgagattaagagcacggagggccagtcttccctgacggtgaccaacgtcactgaggagcactacggcaactacacctgtgtggctgccaacaagctgggggtcaccaatgccagcctagtccttttcacggggtgctctgctgaccaagccaatccagagaagaacaggcagctcgtgagcctctgccagccagcggcagcagcaggtagagacccagagccagagcccctgaagagttggcgattattcatcttcattgacaaaaccaaagaaaaggttttgatagtattgacattcacttctaaacactggttactagccatgcaagcaccaccaagcccttatcccacctatctggagaaagctttgacttctgaagaggcaagatacaaattaagcttagttaacaatttcccttatacagtcattgcagcctcatga

SEQ ID NO: 3051 - DNA, 1221 bp, Homo sapiens
  SIMILAR (1)..(477): 721254mologous to Homo sapiens Sequence encoded by human reg cDNA,accession number P81514,Smith-Waterman Score=580.
atggctcagaccagctcatacttcatgctgatctcctgcctgatgtttctgtctcagagccaaggccaagaggcccagacagagttgccccaggcccggatcagctgcccagaaggcaccaatgcctatcgctcctactgctactactttaatgaagaccgtgagacctgggttgatgcagatctctattgccagaacatgaattcgggcaacctggtgtctgtgctcacccaggccgagggtgcctttgtggcctcactgattaaggagagtggcactgatgacttcaatgtctggattggcctccatgaccccaaaaaggatcacaactcctcatcagcaaggaaacaaaactggatagacaatgagtttgatgaattgacagaagtaggcttcagaaggtgggtaataacaaacccctctgagctgaaagagcatgttctaacccaatgcaagaaagctaagaatcttgataaaaggttacaggaactgtttcacgtgactcagaaagagagagactctgtttgcttgggcgaaagtaaggaaaaagaacaagagctgctacctggtaatacagagaattcttccagatcctgtccaagaacatcaaggcagtacctctatgagtatgcaagaaccacagtattactgggcttggagacaaaggagacacgttttatccgtggacccaaaactccggcgccggtcacagactgggaaggcagccttcccttggtgtttaatcattgcagggacacctctctgattattcacccaggtttcagaggtgccagaccacacagggacacctgccttggtccttcacccttagcggcaagtcccgcttttctggggaaggggcaagctgctccttgccaggcggagctaggtcccaattcttcctcagcctctgctcctccaccctataatccttttatcacctcccctcctcacacctggtccggcttacagtttcgttcggtgactagccctcccccacctgcccagcaatttactcttaaaaaggtgcctggagctaaaggcatagtcaaggagcttgctacaagtgccagaaatctggcagccaggccaaggaatgcctgcagcccagaattcctcctaagctgcgtcccatctggggaccccactggaaatcagactgttcaactcatctggcagccactccaagagcccctggaactctggcccaaggctctctga

SEQ ID NO: 3052 - DNA, 1287 bp, Homo sapiens; identical to SEQ ID NO: 445
  SIMILAR (769)..(1263): 411254mologous to Murine leukemia virus gag-pol polyprotein,accession number U13766,Smith-Waterman Score=280.

SEQ ID NO: 3053 - DNA, 933 bp, Homo sapiens
  SIMILAR (715)..(852): 511254mologous to Human T-cell lymphotropic virus type 2 gag protein,accession number X89270,Smith-Waterman Score=147.
atggaggagaaggaggagaggaaaaggagaaggaagaggaagaggaggagggaagagggaagagatggggaaagaaaaagaatggagaagcaaaaggagaaccaggatcctaaagatccacctacgacctcaggtcctcagaccgaccagcccaagaaacatctcaccaatttcaaatccgagacaaaggagacacgttttatccgtggacccaaaactccggcgccagtcacggactgggaaggcagccttcccttggtgtttaatcattccagggacacctctctgattattcacccaggcttcagaggtgtcagaccacgcagggacgcctgccttggtccttcacccttagcggcaagtcccacttttctggggaaggggccagctgctcctcgccagaccgagctaggtcccaattcttcctcagcctccgctcctccaccctataatccttttatcgcctcccctcctcacacctggtccggcttacagtttccttccatgactagccctccccctcctgcccagcaatttactcttaaaaaggtggctggagctaaaggcatagtcaaggatttaattaacctcaccttcaaggtgtacaataatagaaaaaagttgcagttccttgcctccactgtgagacaaaccccagccacatctccagcacacaagaacttccaaacgcctgaactgcagcagccaggtgttcctccagaacctcctccccgaggagcttgctacaagttccagaaatctggccaccgggccaaggaatgcctgcagcccaggattcctcctaagccacatcccatctgtgtgggaccccactggaaatcggactgtccaactcacctggcagccactcccagagcccctggaactctggcccaaggctctctgactccttcccagatcttcttggcttag

SEQ ID NO: 3054 - DNA, 1317 bp, Homo sapiens
  SIMILAR (1)..(816): 941254mologous to Homo sapiens putative p150,accession number U93564,Smith-Waterman Score=1398.
atgagtgaactcccattcacaattgcttcaaagagaataaaatacctaggaatccaacttacaagggatgtgaaggacctcttcaaggagaactacaaaccactgctcaaggaaatcaaagaggatacaaacaaatggaagaatattccatgctcatgggtaggaagaaccaatatcatgaaaatggccatactgcccaaggtaatttacagattcaatggcatccccatcaagctaccaatgcctttcttcacagaattggaaaaaaatactttaaagttcatatggaaccaaaaaagagcccgcatcgccaagtcaatcctaagccaaaagaacaaagctggaggcatcacactacctgacttcaaactatactacaaggctacagtaaccaaaacagcatggtactggtaccaaaacagagatatagatcaatggaacagaacagagccctcagaaataatgccgcgtatctacaactatctgatctttgacaaacctgagaaaaacaagcaatggggaaaggattccctatttaataaatggtgctgggaaaactggctagccatatgtagaaagctgaagctggatcccttccttaaaccttatacaaaaatcaattcaagatggattaaagacttaaacgttagacctaaaaccataaaaaccctagaagaaaacctaggcaatactattcaggacataggcatgggcaaggacttcatgtctaaaacaccaaaagccaaaattgacaaatgggatctaattaaactaaagagcttctgcacagcaaaagaaactaccatcagagtgaacagcttatactgctttacctcggagagggtacagtcaacatcagctccaagggaagaaaatgatcaggaggaagagaataaagagaaggaagaaaaggaagaggaggaagaagaatatcacaacccatctgacctctcccctcctccccaggctgctcctcgccaggccaagctaggttccaattcttcctcagcctccgctcctccaccctataatccttttatcacctctgctcctcacacctggtccggcttacagtttcgttctgtgactagccctcccccacctgcccagcgatttactcttacaaaggcggctggagctaaaggcatagtcaagcccgggattcctcctaagccgtgtcccatctgtgcgggaccccactggaaatcggactcttcaactcacctggcagccactcccagagatgctggaactctggcccaaggctctctgactgactccttcccagaccttctcggcttagcagctaaagactga

SEQ ID NO: 3055 - DNA, 771 bp, Homo sapiens; identical to SEQ ID NO: 598
  SIMILAR (309)..(407): 481254mologous to Homo sapiens Fragment of human secreted protein encoded by gene 29,accession number Y36505,Smith-Waterman Score=73.

SEQ ID NO: 3056 - DNA, 2241 bp, Homo sapiens
  SIMILAR (628)..(2232): 911254mologous to Homo sapiens putative p150,accession number U93563,Smith-Waterman Score=2478.
atggcagaggcaatggcaaaattgggatctgagagaaaaaaagagcagggattaattcaggaactgaaacaaaatcagtctctggaactctggtatgagaacaggaaaggcaaaatcaagactggagaatcaggtgatggagagcctgacgcgagtgaaatttggtgccatgactcagatcgggggacctcccttgggagatcaatcccctgtcctcctgctctttgctccatgagaaagatccacctacaacctcaggtcctcagaccgaccagcccaagaaacatctcaccaatttcaaatccgagacaaaggagacacattttatccatggacccaaaactccggcgccggtcatggacttgggtaggcagccttcccttggtgtttaatcattgcagggacgcctctctgattattcacccaggtttcagaggtgtcagaccacgcagggacgtctgccttggtccttcacccttagcgaccatcacagatgccgagctttatgtaactctcacagtggaggggaagtccatccccttcttaatcgatacagaggctacccactccacgttaccatcttttaaagggcctgttgcccttgcctccatacatgtgcagaatgtgcagatcaaaagagacaaagaaggccattacataatggtaaagggatcaattcaacaagaagagctaactatcctaaatatgtatgcacccaatacaggagcacccagattcataaagcaagtccttaatgacctgcaaagagacttagactcccacacaataataatgggagactttaacaccccactgtcaacattagacagatcaacgagacagaaagttaacaaggatatccaggacttgaactcagctctgcaccaagcagatctaatagacatctacagaactctccacaccaaatcaacagaatgtacatttttttcagcaccacaccgcacctattccaaaattgaccacatagttggaagtaaagcactcctcagcaaatgtaaaagaacagaaattataataaattgtctctcagaccacagtgcaatcaaactagaactcaggattaagaaactcactcaaaaccactcaactacatggaaactgaacaacctgctcctgaatgactactgggtacataaagaaatgaaggcagaaataaagatgttctttgaaatcaacgagaacaaaaacacaacataccagaatctctgggacacattcaaagcagtgtgtagagggaaatttatagcactaaatgcctacaagagaaagcaagaaagatccaaaattgataccctaacatcacaattagaagaactagaaaagcaagagcaaacacgttcaaaagctagcagaagggaagaaataactaaaatcagagcagaactgaaggaaatagagacacaaaaaacccttcaaaaaattaatgaatccaggagctggttttttgagaagatcaacaaaattgatatactgctagcaagactaataaagaagaaaagagagaagaatcaaatagacgcaataaaaaatgataaaggggatatcgccaccgatcccacagaaatacaaactaccatcagagaatactacaaacacctctgcccaaataaactagaaaatctagaagaaatggataaattcctcgacacatacaccctcccaagactaaaccaggaagaagatgaatctctgaatagaccaataacaggctctgaaattgtggcaataatcaatagcttaccaaccaaaaaaagtccaggaccagatggattcacagcaaaattctaccagaggtacaaggaggagctggtaccattccttcagaagtacaaggaggagctggtaccattccttctgaaactattccaatcaatagaaaaagagggaatcctccctaactcattttctgaggccagcatcatcctgataccaaagcctggcagagacacaaccaaaaaagagaattttagaccaatatccttgatgaacattgatgcaaaaatcctgaataaaatattggcaaaccaaatccagcagcacatcaaaaagcttatccaccatgatcaagtgggcttcatccctgggatgcaaggctggttcaacatacgcaaatcaataaatgtaatccagcatataaacagaaccaaagacaaaaaccacatgattatctcaatagatgcagaaaaggcctttgacaaaattcaacaaccttcatgctaa

SEQ ID NO: 3057 - DNA, 642 bp, Homo sapiens; identical to SEQ ID NO: 1395
  SIMILAR (123)..(1): 731254mologous to Homo sapiens Human secreted protein, SEQ ID NO: 7420,accession number G03339,Smith-Waterman Score=153.

SEQ ID NO: 3058 - DNA, 2664 bp, Homo sapiens
  SIMILAR (970)..(1689): 1001254mologous to Homo sapiens heat-stable enterotoxin receptor,accession number M73489,Smith-Waterman Score=1251.
atggacccgctgagcatgagcattcatcaggtggtgctcaggcctgatgaacagggcccaggccaggaacaacagcctcccctttatgtgatggagcctggtgaaataaacagctttattgctcacacaaagcctgtttggtggtctcttcacacggacgcgcatgaaatttggtgccatgactcggatcgggggacctcccttgggagatcaatcccctgtcctcctgctctttgctctgtgagaaacatccgcctacgacctcaggtcctcagaccgaccagcccaagaaacatctcaccaatttcaaatccgagacaaaagagacatgttttatccatgaacccaaaactctggcgccggtcacggactgggaaggcagccttcccttggtgtttaatcattgcagggacggcctctctgatcattcagccacatttcaagggtgtcagaccatgcagggatgcctgccttggtccttcacccttagcggcaagtcccgcttttctggggaaggagcaaaccatcacggacaccgagcttcgggtaactctcacagtggaagctgataacactttggccctgggagctgcatcccccatcacagggcctacatggaggaagtccaagatcaaggcactggcagattcagtgtctggtgagggcctgctttccagctcagagacagctgccttttgctgtagctcttcagtttctcaaacatgctatgccccttctcagatctggttctttgcacaagctgtccccctgcctgggaataatgacaagaaaaaaaaggtcggtacatgttcaacacagacaaaaccatcctgttttttccaaacattttccattcccatttggttgaatccacgaatgcagaacccatggagacagagggctgacagtatttcactctgtggcacaggatcggcccagtttgctgtttctgcctattctgctctaagactttttcatgaccaaaaaaatgaaagctatatggataccttgatccgacgtctacagctatattctcgaaacctggaacatctggtagaggaaaggacacagctgtacaaggcagagagggacagggctgacagacttaactttatgttgcttccaaggctagtggtaaagtctctgaaggagaaaggctttgtggagccggaactatatgaggaagttacaatctacttcagtgacattgtaggtttcactactatctgcaaatacagcacccccatggaagtggtggacatgcttaatgacatctataagagttttgaccacattgttgatcatcatgatgtctacaaggtggaaaccatcggtgatgcgtacatggtggctagtggtttgcctaagagaaatggcaatcggcatgcaatagacattgccaagatggccttggaaatcctcagcttcatggggacctttgagctggagcatcttcctggcctcccaatatggattcgcattggagttcactctggtccctgtgctgctggagttgtgggaatcaagatgcctcgttattgtctatttggagatacggtcaacacagcctctaggatggaatccactggcctccctttgagaattcacgtgagtggctccaccatagccatcctgaagagaactgagtgccagttcctttatgaagtgagaggagaaacatacttaaagtacaaggttcttttgacctatgatacccacgtaaataagacctatcctgtggatatgagccccacattcacttggaagaactctaaacttcctaatgatattacaggccggggccctcagatcctgatgattgcagtcttcaccctcactggagctgtggtgctgctcctgctcgtcgctctcctgatgctcagaaaatatagaaaagattatgaacttcgtcagaaaaaatggtcccacattcctcctgaaaatatctttcctctggagaccaatgagaccaatcatgttagcctcaagatcgatgatgacaaaagacgagatacaatccagagactacgacagtgcaaatacgacaaaaagcgagtgattctcaaagatctcaagcacaatgatggtaatttcactgaaaaacagaagatagaattgaacaaggtatgtagcccttacttcaaacccttgagaaataacttcacttcatttcctctaatcactgaggttgctggtggattgcttcagattgactattacaacctgaccaagttctacggcacagtgaaacttgataccatgatcttcggggtgatagaatactgtgagagaggatccctccgggaagttttaaatgacacaatttcctaccctgatggcacattcatggattgggagtttaagatctctgtcttgtatgacattgctaagaggacagcactgagactcagatttgtccaagaagacctgtggacagctccagagcacctccgccaagccaacatctctcagaaaggagatgtgtacagctatgggatcatcgcacaggagatcatcctgcggaaagaaaccttctacactttgagctgtcgggaccggaatgagaagattttcagagtggaaaattccaatggaatgaaacccttccgcccagatttattcttggaaacagcagaggaaaaagagctagaattttttacttaa

SEQ ID NO: 3059 - DNA, 513 bp, Homo sapiens
  SIMILAR (25)..(507): 441254mologous to Murine leukemia virus gag-pol polyprotein,accession number U13766,Smith-Waterman Score=295.
atgaatcttaatagaaatgcacttgtgctgactctgttttcggactcagcccgcctgcacccaggtgaaataaacagccatgttgctcacacaaagcctgtttggtggtctcttcacatggacacgcatgaaatttggtgccgtgactcggatcgggggacctcccttgggagatcaatcccctgtactcctgttctttgctctcacgctttaaaaagattaaagcctgttatcactcgcctgctacatcatggccttttaaaacctataaactctccttacaattaccccattttacctgtcctaaaaccagacaagccttacaagttagttcaggagctgtgccttatcaaccaaattgttttgcctatccaccctgtggtgcccaacccgtaccctcttttgtcctcaataccttcctccacaactcactatgccgtgcttgatcttaaagatgcttttttcactattcccctgcacccctcatcccagcctctctttgctttcacttag

SEQ ID NO: 3060 - DNA, 667 bp, Homo sapiens
  SIMILAR (461)..(583): 901254mologous to Homo sapiens calbindin D28K,accession number S46006,Smith-Waterman Score=207.
  misc_feature (1)...(667): n = a,t,c or g
gcacccgcccggttttgccggctccacccacgcgtccggtgctctctagttatgtctctggaatttattaggaaaggatgcaaatatgaccaatggaaagcaagttctactgtatttcattcaatttttaatatctatgtatgtatttcaggataccatggatttcaaaattaaaatgtaatttacatgttaatcataatttgaagatattttaggaggataaaccatgaacctctgcattaatgtcttaggagtgaaataaatttttccctgtttatgtctcagggctaagttttcacacgtagaacataccacgagggatctttcttcttgaaggaattacannnnnnnnnnnnnnnnnnnnnnnnnnnnnnnnnnnnnnnnnnnnnnnnnnnnnnnnnnnnnnnnnnnnnnnnnnnnnnnnnnnnnnnnnnntttggtaccgtgacttggatcgggggacctcccttgggagatcaatacccagtcctcctgctctttgctctgtgagaaagatccccctacgacctcaggtcctcagaccaaccagcccaagaaacatctcgccaatttcaaatccggaccccactggaaatcgcactgtccaactcacctggcagccagtcccagagcccctggaactctggcccaaggctctctgactcct

SEQ ID NO: 3061 - DNA, 428 bp, Homo sapiens
  SIMILAR (2)..(100): 871254mologous to Homo sapiens calbindin D28K,accession number S46006,Smith-Waterman Score=154.
  misc_feature (1)...(428): n = a,t,c or g
tcccctgtactcctgttctttgctccgtgagaaagatccacctatgacctcaggtcctcagaccgaccagcccaaggaacatctcaccaattttaaatcagaaggcaggaannnnnnnnnnnnnnnnnnnnnnnnnnnnnnnnnnnnnnnnnnnnnnnnnnnnnnnnnnnnnnnnnnnnnnnnnnnnnnnnnnnnnnnnnnnnnnnnnnnnnnnnnnnnnnnnnnnnnnnnnnnnnnnnnnnnnnnnnnnnnnnnnnnnnnnnnnnnnnnnnnnnnnnnnnnnnnnnnnnnnnnnnnnnnnnnnnnnnnnnnnnnnnnnnnnnnnnnnnnnnnnnnnnnnnnnnnnnnnnnnnnnnnnnnnnnnnnnnnnnnnnnnnnnnnnnnnnnnnnnnnnnnnnnnnnnnnntctcgtgccgaattcgtcaggg

SEQ ID NO: 3062 - DNA, 437 bp, Homo sapiens; identical to SEQ ID NO: 442
  SIMILAR (315)..(434): 401254mologous to Simian T-cell leukemia virus gag,accession number Y07616,Smith-Waterman Score=100.
  misc_feature (1)...(437): n = a,t,c or g

SEQ ID NO: 3063 - DNA, 576 bp, Homo sapiens; identical to SEQ ID NO: 1844
  SIMILAR (259)..(570): 551254mologous to Sus scrofa domestica polyprotein,accession number U77600,Smith-Waterman Score=300.

SEQ ID NO: 3064 - DNA, 864 bp, Homo sapiens; identical to SEQ ID NO: 1393
  SIMILAR (151)..(783): 791254mologous to Cloning vector pZC320 SopA,accession number U26464,Smith-Waterman Score=871.

SEQ ID NO: 3065 - DNA, 801 bp, Homo sapiens; identical to SEQ ID NO: 600
  SIMILAR (349)..(798): 451254mologous to Sus scrofa polyprotein,accession number U77599,Smith-Waterman Score=339.

SEQ ID NO: 3066 - DNA, 480 bp, Homo sapiens
  SIMILAR (479)..(288): 441254mologous to Mus dunni endogenous virus pol polyprotein,accession number AF053745,Smith-Waterman Score=102.
tgtctaagaattgggaggacctaggacatctgattagagagtgcataaggaggttcagcatagccctgccagcaaagatgatttatttacttttaagagttgagaatggcggtttggggatagcaccccggagatatccagctgtggtggcttggagaaacagtgtaaaccggcagtgtaaacaagagcagggcatgtatgagtagttgagaccggtgaataggagtatgactagacagaagatagtagggatgccaagtttttgggggcgcagtccaagttggtctggtgtctggaatgagactggggcctaataaaaaggagcatctatacaggagctcaaatgggctgtatcctgtcgcattccgaagacaggcccgaattctgagaagggcaagtggtaaaagtattatccagtcctttttaagttggtggctgagcttggtgaggtgtgtttttaaaagaccagtagtccgttct

SEQ ID NO: 3067 - DNA, 756 bp, Homo sapiens
  SIMILAR (73)..(144): 911254mologous to Homo sapiens calbindin D28K,accession number S46006,Smith-Waterman Score=122.
atgggttcatggctacaaggactaagggctatggtttttgcactgaactacatggttaccagagttagaaacaaaaaagatccacctacaacctcaggtcctcagacccaccagcccaagaaacatctcaccaatttcaaatccgagacaaaggagacacgttttatctgtggacccaaaactccggcgccgctcatggactgggaaggcagccttcccttgatgtttaatcattgcagggacacctctctgattattcacccatgtttccaaggtgtcagaccatgcagggacgcctgccttagtccttcacccttagcggcaagtcccgcttttctggggaaggggcaagtacccctcaaccccttcttcacccttagtggcaagtcccgcttttctgggggaggagcaagtaccccaaccccttctttccatgtctctacgccttctctgcttttctggggaaggggcaagtacccctcaaccccttcttcacccttagtggcaagtcccgcttttctggggaaggggcaagtacccctcaaccccttcttcacccttagtggcaagtcccgcttttctggggaaggggcaaaagcccccgagaccatcacggatgccgagcttcgggtaactctcacagtggaggctgctgtatgttcaaccatcgccttaagcctagggtgggaaattcttcctcgacactggggtaaagaggaggtaaccaaaacaatttattatcctgtgattccataa

SEQ ID NO: 3068 - DNA, 756 bp, Homo sapiens
  SIMILAR (67)..(186): 971254mologous to Homo sapiens calbindin D28K,accession number S46006,Smith-Waterman Score=213.
atgggggcaactcacccttttgagctgttgacaaagatgacttcccagggaagtgacatatcgggggacctcccttgggagatcaatcccctgtcctcctgttctttgctccatgagaaagatccacctacaacctcaggtcctcagaccgaccagcccaagaaacatctcaccaacttcaaatccgagacaaaggagacacattttatccgtggacccaaaactccagtgctggtcacggactgggagggcagacttcccttggtgtttaatcatagcagggatgcctctctgattattcacccacgtttcagaggtgtcagaccacgcagggatgcctgccttggtccttcacccttagcagcaagtcctgcttttctggaggaggggcaagtaccccaaccccttctctccatgtctcttaccccttctctgcttttctggaggagaggcaagaagccctcaaccccttcttcacccttagcagcaagtcccgcttttctggaggaagggcaagtaccccaacctcatatctctgtgccccgatcccttatttctacaccccaacctcttataactttgcaccccgacccctttcccgcttttctggaagacagtaaggaagtactcaagcaacaaccaaaagggagaataaaacactgtgctgatggaggtatgtccaaggagcccaagaaccaactgaaaggactcccagtgaccaaagctggaaacattcatggaataaacgacatttga

SEQ ID NO: 3069 - DNA, 1189 bp, Homo sapiens
  SIMILAR (837)..(799): 761254mologous to Homo sapiens calbindin D28K,accession number S46006,Smith-Waterman Score=45.
atgatcgggtcagagaaaaagcacaaggcagctcagaggtattacttctcagtatggcatccccatttgaaacagctgcaaaacaagccacagcttgggaatgtggcaaggtttcagcagcgtggaggtgaaaggcaagagttgcatggacagattctctgcaaggtgctgagcaaggtagcagacatgccaggtcttgagtgcattgtgtctagaggtagagcacagaggaggaaaagggggattctgaggcgatcgggcagcttcagtcttcagctgctaagccaagaaggtctgggaaggagtcagagagccttgggccagagttccaggggctctgggagtggctgccaaggtgagtgggacagtccgatttccagcggggtcccgcacagatgggacacagcttaggaggaatcctgggctgcaggcattccttggcctggtggccagatttctggcacttgtagcaagctcttgccccttcccccagaaaagtgggacttgctgctaagggtgaaggaccaaggcaggtgtccctgcgtggtctgacacctctgaaacctgggtgaataatcagagaggcatccctgcaaaggttaaacaccaagggaaggctgccttccctagtccatgaccggtgccggagttttgggtccacggataaaacgtgtctcctttttctccgatttaaaattggtgagatgttccttgggctggtcggtctgaggacctgagcttgtaggtggatctttctcatggagcaaagaacaggaggacaggggattgatctcccaagggaggtccgccgatctgagtcacggcaccaaatttcatgcgcgtctgtgtgaagagaccaccgaacaggctttgtgtgagcaacatggctgtttatttcacccaccaccaccacttgccagctctcgaaaactttactagtgccattgaactttctggagaaacaatatctaacatttcttcttttcctggaatttccaaccttctctttgttcttccgacatactgaagaccacctcatgagatctggttgtttaaaagtgtgtagcatctctcctctctctctcttcctcctagctccagccatgtgagacatctcaccccctctttgccttttgctatgattgtaagtttcctgagagctccccagaagctgagcagatgatgccat

SEQ ID NO: 3070 - DNA, 1143 bp, Homo sapiens
  SIMILAR (157)..(312): 821254mologous to Homo sapiens Human secreted protein, SEQ ID NO: 5210,accession number G01129,Smith-Waterman Score=226.
atggacccgctgagcatgagcattcatcaggtggtgctcaggcctgatgaacagggcccaggccaggaacaacagcctcccctttatgtgatggagcctggtgaaataaacagctttattgctcacacaaagcctgtttggtggtctcttcacacggacgcgcatgaaatttggtgccatgactcggatcgggggacctcccttgggagatcaatcccctgtcctcctgctctttgctctgtgagaaacatccgcctacgacctcaggtcctcagaccgaccagcccaagaaacatctcaccaattttaaatcaggagagacaaaggagatgcattttattcgtggacccaaaactccggtgccagtcacggactgggaaggcagccttctcttggtgtttaatcattgcagggacggcctctctgatcattcagccacatttcaagggtgtcagaccatgcagggatgcctgccttggtccttcacccttagcggcaagtcccgcttttctggggaaggagcaagctgctccttgccaggctgagctaggtcccaattcttcctcagcctctgctcctccaccctataatccttttatcacctcccctcctcacacccggtccggcttacagtttcgttccgtgactagccctccccctcctgcccagcaatttactctgaaaaaggtggctggagctaaagacatagtcaaggcttctttggcaccagccttggctcaaggggtcccaggtacacctcaggccactgcttcagagggtgcaagccttaaatcttgggagtgtctatgtggtgttaaccttgcaactgcacagagtgcaagggtgaaggaagcttgtcaggaagcttgtcagtctctacctagatttcagaggatgtatgagaaagcctgggtgcccaagcagaagactactgcagaagtggagctctcacagagagcctctactagagtagttctaagaggaaatgtggggttggagtccccaagcagagtcttctctatagcactgtctagtggagctgtgggaggggttcactgtccttcagaccacagaatgatagagccagcagctttcaacctcagtatgaaaaatccacagaggcaaagctgcctaagggcttag

SEQ ID NO: 3071 - DNA, 2256 bp, Homo sapiens
  SIMILAR (1597)..(1821): 481254mologous to Murine leukemia virus polymerase,accession number AF136491,Smith-Waterman Score=171.
atgtggccacaagccaagggacacaggcagccgccagcgctgagagaggcaagaacagattctcctttagagcccttgaagggagggtgccctactgagtttcagacttctagcccccagaactatagcaagaagttcttctccttgctgagtgtcacttcctacagttccttcgccttccacaagttttctgtagctgtttacaacatttctaacctgaagacagtggaccccgccaaattccccacaaggtattgctactgtttaaacaatcggaccaatgacttatcagattttacagctctactggtagatatcattggcaattctaccagctacctcacagagatttttaagtcaacctccatcctctcagataatcagtgtggtccagtttccacaccagtaaatgcaccaatatttaagtcttcatatttctgggatccacaaagttggaggaagaatccaaagctcaaaagtttaaggaacgtaggcagactcaagaaaacatctggaaggaatctttctgacttctgggagatagaagaaaaatatcccattatcaattacacatttaccagcggcttgtctggtgttttggctttattgctcacacaaagcctgtttggtggtctcttcacacggacgcgcatgaaatttggtgccgtcactcggatcgggggacctcccttgggaaatcaatccccgtcctcctgttctttgctccatgagaaagatccacctacgacctcaggtcctcagacagaccagcccaagaaacatctcaccaatttcaaatccgaggcaaaggagatatgttttatccgtgaacccaaaactccagcgccggtcacggactgggaaggcagccttcccttggtgtttaatcattgcagggatgcctctctgattatacactcacgtttcaagggtgtcagaccacgcagggatgcctgccttggtccttcacccttagcggcaagtcccatttttctggggaaaaggcaacacgctttaaaaagattaaagcctgttatcactcacctgctacagcatggccttttaaagcctaaaaactctccttacaattcccccattttacctgtcctaaaaccagacaagccttacaagtttgttcaggatctgtgccttatcaaccaaattgttttgcctatccaccccatgctgtactcactctttgttgagtctcccacaattaccattgtttctggcccggacttcaatccggcctcccacattattccggataccacacctgaccctcatgactgcatctctctgatccacctgatgctctccccatttccccacatttccttcttccccatttctcaccctgatcacacttggtttattgatggcagttccaccaggcctaatcgccactcaccagcaaaggcaggctatgctatagtacaagccactagcccgcctcttagaacctctcatttcctttccatcgtggaaatctatcctcaaggaaatcacttctcagtgttccatctgctattctactacccctcagagattgttcaggccccctcccttccctacacatcaaactcggggatttgccccacccaggactggcaaattgatattactcacatgccccaagtcagaaaactaaaatacctcttagtcttggtagacacagggtctaagaaggcgaccgtggtcatttcttcccttctgtcagacataattcctcggtttggccttcccacctctatacagtctgataacggaccagcctttattagtcaaatcacccaggcaatttctctagctcttggtattcagcgaactcatggtcttttaaaaactcacctcaccaacctcagccaccaacttaaaaaggactggacaatacttttaccactttctcttctcagaattcaggcctgtcctcggaatgctacaggactgcacagtgatggagaggcccgaagctccttccaggctcaccatttcaacttcatcacacatgggacagtccctgatgtttttgttccaattttacaactcctgaatgaggactttgaagatccatgcttgggttacttgcctagccctgagatcagtatttgtctagaaccaactagttggagtaaggacaggagctgttcttcaggagaggagggaagtgctgggcagacagtaacgggtgacctccacaaagctcagactcctgaattggaccagccagcctccttgaactgccctgatttataa

SEQ ID NO: 3072 - DNA, 966 bp, Homo sapiens
  SIMILAR (421)..(516): 471254mologous to Homo sapiens gag,accession number AF156961,Smith-Waterman Score=56.
  misc_feature (1)...(966): n = a,t,c or g
gaattcggcacgagaatagccaganaacggcactttcaatttttccatcctgcaagatctaaataattcttgttgtaaaatgggcaaatggtctgaggtgcctgacgtccaggcattcttttacacatcagtcccctcctagtctctgtgcccagtgcaactcctcccaaatcttctttctttccctcccgcctgtcccctcagtaccaaccccaagtgtcgctgagtctttctaatcttccttttctacagacccatctgacctctcccctcctcgacaggctgagctaggtcccaattcttcctcagcctccactcctccaccctataatctttttatcgcctcccctcctcacacctgttccggcttacagtttcattccgtgactagccctcccccaacttgctcagcaatttactcttaaaaaggtggctggagccaaaggcatagtcaaggttaatgctcctttttctttatcccaaatcagatagcatttaggctctttttcatcaaatataaaaatccagcccagttcatgactcctttggcaacaaccctgagacactttacagccctagaccctaaaaggtcaaaaggccgtcttattctcaaaatacgttttattacccaatctgctcctgacattaggaaaaaacttcaaaaattagaatctggccctcaaaccccacaacaggaattaatcaaccttgccttcaaggtgtacaataatagagaggaagcagccagacggcaatgcatttctgagttacaattacttgcctccactgtgagacaaaccccagccacatctccagcacacgagaacttccaaacgcctgaaccgcagcagccaggcgttcctccagaacctcctcccccaggagattgctacaagtgccagaaatctagccaccaggccaaggaatgcccgcagcccgggattccttctaagccacgtcccatct

SEQ ID NO: 3073 - DNA, 2009 bp, Homo sapiens
  SIMILAR (1246)..(1404): 841254mologous to Homo sapiens Human secreted protein, SEQ ID NO: 5210,accession number G01129,Smith-Waterman Score=238.
atgatgaaggagaccaacaactcctttctgaagtttcagcccacttcccgcagggaagagacaaaggagacatgttttatccgtggacccaaaactccggtgccggtcacggactgggaaggcagccttcccttggtgtttaatcattgcagggatgcctctctgattattcacccacatttcaaagcctgtattcttaagaacttaaaacctcttcaactctcacctgacctaaaatctaagcgtcttttttcttctgcaatgccgcttgaccccagtacaaactcgacagtagttacaaattgccagaaaaacggcactttcaatttttccatcctacaagacctaaataattcttgtcgtaaaacgggcaaatggtctgagcatgctttgaaaggattaaagcctgttatcactcgcctgctacagcatggccttttaaagcctataaactctccttacaattcccccattttacctgtcctaaaaccagacaagccttacaagttagctcaggatctatgccttatcaaccaaattattttgcctatccaccccatgatgttactaggggagatatcagtcaccaaggccttggctggctccctgataaaagcccttgcagtattccacactgcagaatccccaggctatgctctcctggattcttactacctgctccagaaagggagtgtttgcatctccatcctccaagaagaggaagcattttcttggccggggaaaggagagtgtcgagataagtcctgggcctctctgggcctaatacccgcatttccccagggaggacagtggaaacaggccctggggcttctggaccacagctgcctctgctttggggaattaggcaccaggttggcagccccagcatccttcagcaccttcccaataacaaaccgagagcgggagagaaaaactgacaagctgattccaaaattcatgtggaaatgcaagggacccagaataaccaaaacaatcttggaaaagaatgaagttggagaatttacacttcttgatttcaaaacttaccacaaatttgcagtaatcaaaactatgtggtactggcataaggacagatacattgatcaacagaatgacattgaaagtccagaaataaattcatatgtttatggtcaactgatttttgacaaagactcagcccgcctgcacccaggtgaaataaacagtcttgttgctcacacaaagcctgtttggtggtctcttcatatggacgcgcatgaaatttggtgccgtgactcggattgggggacctcccttgggagatcaatcccctgtcctcctgctctttgctccatgagaaagatccacctacgacctcgggtcctcagaccgaccagcccaaggaacatctcaccaattttaaatcgggtttcagaggtgtcagaccacgcagggacgcctgccttggtccttcacccttagcggcaagtcccgcttttctggggaaggggcaagtaccccaaccccttctctctgtgtctctaccccttctccgcctttctggggggcaagaaacacccaaccccttctccttcaccctgagtggcaagtccgcttttctagaggagcaagtaccccaacctcgtatctctgtgccccagtcccttatttccacgccccgacctcttatctctgtggcccaatcccttatttctgcaccccaacctcttatatctctgtgccccaatcccttatttccatgccccgacctcttatctctgcaccccaaccccttatttccacgacccaacccctttcccgcttttctggaaggagcttgctacaagtgccagaaatctggccaccaggccaaggaatgcctgcagcccgggattcctcctaagctgcgtcccatctgtgcgggaccccactggaaatcggactgtccaactcacctggcagccactcccagagcccctggaactctggcccaaggctctctgactgcttcccagatcttcttggcttag

SEQ ID NO: 3074 - DNA, 3123 bp, Homo sapiens
  SIMILAR (2254)..(2973): 471254mologous to Murine leukemia virus gag-pol polyprotein,accession number U13766,Smith-Waterman Score=514.
atgactaatgcagagcattataagcatagtctccatgcttatggagcatgggccattatggcccagtgggaaatggagaattgtaaacatgaagagggaacttttccagtaagctcggggagggagcggcagagagggggagaagttactagaacccaatgctgcaatggcccccagcatatcctaagagtgtccaggttcttcacagaacctgacggtcttaatatcattggtgattattctgggcctgctcaagcagccacacaactacctatgagttggatgctgttgcatttgggctacccggaaaggaaagagatgcccttgggcaaagcagctgtctatggcaagcacactctgaaggagctgacagctggaggcaagtccttccctccagaaagggcatttgggcagtgcatctcctgtcctaccactttcttcatctgcaaaatggggatcatgatagtaccagcttgcagggttaaatgttcttccacactgactctgggcctagccatgtgtcctgttttggtccatgtgacatcagctaacataacccaagcagagacttgctgcccattttctctgaatggtggcccagcacctggagggacagagtacaaaggactctggcatgttgaattcctcaagcaacctgctggtaagcatggactctatgatgcgccagcaacacgttttgctttatccaacacatgtcctgttaagtcacggactagtgtggtctatgggctggcagaggtgaaaagatctcccttttcatgtagcttgcccacctacttacagcgttgcatcacagggtcaagtgtttctcctccacttcacgcagctcgggagccctcttgtctggaaaggctcttccctgctggtgcctccaggctgggctggttgttgctcctctatgctcccgaggtcctcagtgcctgcctttatcagaacagaggccacagcgcaccttggttaaatgtacagtctctgggaccagactgcctggactcacaactctggctccgccatttacagcccacctgcacccaggtgaaacaaccagccatgttgctcacacaaagcctgtttggtggtctcttcacacagacgcgcatgaaatttggtggatcaggggacctcccttgggagatcaatcccctgtcctcctgctctttgctccatgagaaagctccacctaccacctcaggtcctcagactgaccagcccaagaaacatctcaccaatttcaaatccgaagcgtttaggctgtttttcatcaaatataaaaatccagcccagttcacggctcgtttggcagcaaccctgagacgctttacagccctagaccctaaaagagaacaaccccctttgactgtaattttccattaccttcccaaatcctataaaacggccccacccccatctcccttcgctgactctcttttcggactcagcccacctgcacccaatgaaataaacagccatgttgctcacacaaagcctgtttggtggtctcttcacacggacgcgtatgaaatttggtgccgtgactcggatcgggggacctcccttgggagatcaatcccctgtcctcctgttctttgctccgtgagaaagatccacctacgacctcaggtcctcagacccaccagcccaaggaacatctcaccaattttaaatcagacaaaggagacatgttttatccgtggacccaaaactccagtgccggtcacggactgggaaggcagccttcccttggtgtttaataactgcagggacacctctctgattatacacccacgtttcaagggtgtcagaccacgcagggatgcctgccttggtccttcacccttagcggcaagtcccgcttttctggggaaggggcaagctgctcctcgccaggccgagctaggtcccaattcttcctcagcctctgctcctccaccctataatctttttatcacctcccctcctcacacctggtccggcttacagtttcgttctgtgactagccctcccccacctgcccagcaatttactcttaaaaaggtggctggagccaaaggcatagtcaagaccatcacagacgccgagcttcgggtaactctcacagtggaaggccgagacagtttaactaaattatctgcttccctgacgattcctggactacagccacatctcattgccgtccttctccccaacccaaagcctccttcgcgtcttcctctcatatccccctaccttaacccacaagtatgggacatctctactccttccctggcaactgatcacatgcccattaccatcccattaaaacctaatcacccttaccccactcaacgccaatatccaatccctcagcacgctttaaaaggattaaagcctgttatcactcgcctgctacagcatgggcttctaaaacctataaactctccttaccattcccccattttacctgtcctaaaaccagacaaggcttacaagttagttcagaatctgcgccttatcaaccaaattgttttgcctatccaccctgtggtgcccaacctgtacactcttttgtcctcaataccttcctccacaactcactattctgtgcttcatcttaaagatgcttttttcactattcccctgcacccctcatcccagcctctctttgctgtcacctggactgaccctgacacccaacagtcccagcagcttacctgggctgtgctgccgcaaggtttcagggacagccctcattacttcagccaagctctttctcatgatctactttctttccacccctctgcttctcaccttattcaatatattgatgaccttcttctttgtagcccctcctttgaatcttctcaacaagacacacttctgcttcttcagcatttattctccaaaggatatcagtctgatgacagaccagcctttactagtcaaatcacccaagcagtttctcaggctcttggtattcagtggaaccttcatatcccttaccatcctcaatcttcaggaaaggtagaatggactaatggtcttttaaagcttctgctcctacttctgactgctaatatcgatgacaccagttatctgcaaattcctcataaggggctccaatga

SEQ ID NO: 3075 - DNA, 2867 bp, Homo sapiens
  SIMILAR (142)..(843): 851254mologous to Mus musculus protocadherin,accession number AF281899,Smith-Waterman Score=1033.
atgcagaaacgactttggaactgggtaacaggcagagattggaacagtttgcagggctctgtagaagataggaagatgcgagaaagtttggaactctctagagacttaccgaatggctttgaccaaaatgctgataatgatattaatgatgaaaaccaggctgaggtggtctcagatagagatgaggaacttgttggtaactggagcaaagggactcctgaggattacccacgatttttccatatgcatcctaggacagcagaacttagtctcctggagccagtaaacagagactttcaccagaaatttgatttggttattaaggctgaacaagacaatggtcatcctcttcctgcctttgccggtctacacattgaaatactggatgaaaacaatcaaagtccatattttacaatgcccagttatcaaggctatatcctggaatctgccccagtgggagcaaccatttcggacagtctcaatttgacttcacctttaagaatagtagctctggacaaggacatagaagatacaaaagacccagagcttcacctttttctgaatgactacacctcagtcttcaccgtcacacagactggtattactcgctacctcaccttacttcaaccagtggacagggaagaacagcaaacttacaccttttcgataacagcatttgatggtgtacaagaaagtgagccagtcatcgtcaatattcaagtgatggatgcaaatgataacacgccaaccttccctgaaatatcctatgatgtgtatgtttatacagacatgagacctggggacagtgtcatacagctgctgatggcaacaaaagacactggggactactatggagggagagagggagaagagacaattgaaaaattaactattgtgtactatactcagtatctgggtgacagaatcaatcataccccaaacctcaacatcatgcaatatacccagggggcttccgaggcgatcaagcagtgtcagtcttcagctgctaagccgagaagatctgggaaggagtcagtcagagagccttgggccagatttccaggggctctgggagtggctgccaggtaagttgaacagtccgattttcggtggggtcctacacagatgggacgcggcttaggaggaatcccgggctgcgggcattccttggcccagtggccagatttccggcacatgtagcaagctcctgtgggaggaggttctggaggaacgcctggccgctgcggttcaggcatttggaagttcttgtgtgctggagatgtggctgcggtttgtctcacagtggaggcaaggaattgcaacttttttctattattgtacaccttgaaggcgaggttaattaaatcttgccccttctccagaaaagcgggacttgccgctaagggtgaaggaccaaggcaggcatccctgcgtggtctgacacccttgaaacatgggtgaataatcagagaggtgtccctgcaatgattaaacaccaagggaaagctgccttcccagtccgtgaccggcgccagagttttgtgtccacggataaaacgtgtctcctttgtctgtctcagaaaatgaaaggaattgaaattaagagaagggagagattgaagagtggaaaggagaaagtgtggttgagggacagtgagagaggctgcatgctccctcccatgaggggtggaacatagcaggtcagagtgcatggagttcgctcctgccagtgccaaagcagccagctggttccagcactcgtgtactccagtttctgccttgtcgactcgcaaactccctctgtcctttcccctgctctatattccatcacttcactagaatttaaactgcctccactgtgagagttacccgaagctcggcgtctatgatggtctatggggcttccaaggcgatcgggcagcatcagtcttcagccattcagtggagaagatttgtccctcccccagaaaagcgggacttgccactaagggtgaaggaccaaggcaggtgtccctgcgtggtttgacacctttgaaacgtggatgaataatcagaaaggcgtccttgcaatgattaaacaccaaggaaaggctgccttcccagtccatgactggcgccagagttttgggtccacggataaaacatgtctcctttatctcagatttgaaattggtgagatgtttcttgggctggtcagtctgaggacctgaggtcataggtggatctttctcatggagcaaagagcaggaggaggggactgatctcccaagggaggtcccctgatccaagtcacggcaccaaatttcatgcgcgtccatgtgaagagaccaccaaacaggctgaagtacggtcatccaacagccaatcttctctatttctgtccccagccaaactccttgttcagatgctccttcttttctctccttctcagccatgccagtgtggtgctcgccccttcttctgctttttcctcctctgtttgtggagcttggtttccacatggccccaaaatggggtcgtggagccccatagtgttcttgaaaaccacaacttttggtgacgacaacaaaaccgcctgttctattttctacaccacccctccaccaacccgaggcagagcagcatggaaagagaatcagtatgctcaggaagggagagtgaagtgagtgtgggtctttgcactggaactcagtgtttcccaccagctgattaaggtgcccactggtccagaacaaatttgagtgataggccacaataactggagtttttggacaaacactcatgctgcactgatcttggagccagtggacttgggatgtgcatgacccagtgcgataccagttgtggcaagaaaagggagtacccat

SEQ ID NO: 3076 - DNA, 2069 bp, Homo sapiens
  SIMILAR (742)..(768): 881254mologous to Homo sapiens calbindin D28K,accession number S46006,Smith-Waterman Score=40.
actggctactggccaattgggatatccttttatcagtcaaagctatgtcctggtcaatggatttcaaactgttgaggatctatgtgaagctgcagaccttcgagtgagtgttgcagaccttcgcagtgagtgttacagctcataaaggtggcacacccagagttgtttgttcctcccagtgggttcgtggtctcgctgacttcaggaatgaagctgcagaccctcacgaccagggaatggatgagaatcctactgattttctggaacggctaagaggggccttggtaaagcacatgtctctatctcctgatttagtcgagggacaattaatcctaaaggataaatttattactcaggcagcccctgatattgagaggaagctgcagaaacagaatgggccatctctcagggacatatttttcagtccccagaatggctacaattggaggatggcaagcttttatctaccagttgcgaacaaatggaaaattcttaaaagcctttaccagatcttacacctaggcccagattgggagggaccttacactgtatttctttctactcctatggcagtggaggtcactggaatagactcttggattcattacacccaagtgaaggcctggaaagctgatggagccacctctgtcaacccagaagagcacccaaagtaccaaggtgaaataaacagccatgttgctcacagaaagcctgtttggtggtctcttcacacggacgtgaatgaaatttggtgccgtgactcggattggggggacctcccttgggagatcaatcccctgtcctcctgctctttgctccgtgagaaacatccgcctgatccacatacgacctcgagaaagatccacatacgacctcaggtcctcagaccaaccagcccaagaaacatctcaccaatttcaaatccagctgctcctcgccaggctgagctaggtcccaattcttcctcagcctctgctcctccaccctataatccttttatcacctcccctcctcacacctggtccggcttacagtttcattctaagtcagacctgtcctcagaatgctacaagctgcttcagctccagccgtggatataaggggccagctcaggtcatggcttcagagggcgcaagccccaagccatggcagcttctatgtggtattgagcctgctggtgcgcagaagtcaagaattgaggtttgggaatctccacctagatttcagataatgtatggaaaagcctgtatgtccaggcagaagtttgctgcaggggcagggttttcctggtatgttcctgtggcagttgttggagcaaaagttcacgatgtgaacctccatatgctgtcctttccatccaagtggaagctgcacacatgcatgaaatttggtgccgtgactcggatcgggggaccgacctcccttgggagatcaatcccccatcctcctgctctttgctctgtgagaaagatccacctacgacctcaggtcctcagacagaccagcccaagaaacaactcaccaatttcaaatccgagacaaaggagacacgttttatctgtggacccaaaactctggcgccggtcacggactgggaaggcagccttcccttggtgtttaatcattgcaaggacgcctctctgattattcacccacgtttcaaaggtgtcagaccatgcagggacgcctgccttggtccttcacccttagcgaatttaattaacctcaccttcaaggtgtacaataatagaaaaaagttgcaattccttgccttcactgtgagacaaacctcagccatgtctccagcacacaagaacttccaaacgcctgaacctcagcggccaggcattcctccagaacctcctcccccaggagcttgctacaagtgccagaaatccggccaccaggccaaggaatgcctgcagcccaggattcctcctaagccacgtcccatctgtgcgggaccccactggaaattggactgtccaactcacctggcatccactcccagagcccctggaactctggcccaaggctctctgactgcttcccagatcttcttggcttag

SEQ ID NO: 3077 - DNA, 375 bp, Homo sapiens
  SIMILAR (193)..(89): 441254mologous to Hepatitis GB virus C polyprotein,accession number AF005102,Smith-Waterman Score=70.
atgcagaaactacatgtccaagaatctctttccaggttagagtttaccagtgggattaaatcatgtgaatattggaaggaagagaaaaacaaattccgatattctcaggcaagcattgtgaccagagccctatgccttcacaagaacaagttcccacaccagggtcaagaaggaaaccgtaagtcaagacaaaagtgcccagtgaaggcagaagatgaggggtctcaggttgcatcttcggaggcacgaggattcaaaggtggagaaaacgacagcttcagatattctatgatgtacagatgccatttatcaaattctttgatttcaagtaataatggtgttggtgcagccagagttgcaaaagaggactgttga

SEQ ID NO: 3078 - DNA, 519 bp, Homo sapiens
  SIMILAR (37)..(102): 471254mologous to Drosophila melanogaster Mst84Dd,accession number X67703,Smith-Waterman Score=61.
ttttttgttttagcagtgtgaactctttattcactcccagcctgtcctgtggcctgtcccactgtgtgcacttgctgttttccctgtccacatccatgctgtacagacaccaccattaaagcattttcatagtgtgtggtttcgctttgcccattccttccagtaggccctccgggtgctgttgccgaatgtcagggcgtagttgtcctgcatggcggggatgaaccccatgtagaaggggatcaggccttggctgctgtagatgtggttgctgggccagtgtgttccaggcagcttctcgcccaggtcacagtgggggtttctaaacaggaactggctcttgtcgaattcgtccatggcttgcatgacgccgtctcggtaattcaaccccattacccaggtgaaacggggaatgaagccagcgtagcctgagatggccttgcgttggattaggttagggtggtccagctgcggcagccgctggaagctgcccacatctagcgtctcctgctggcggcg

SEQ ID NO: 3079 - DNA, 1072 bp, Homo sapiens
  SIMILAR (564)..(511): 1001254mologous to Homo sapiens unnamed protein product,accession number AK000565,Smith-Waterman Score=96.
tttttatctttgtcccaattaggaaaaactagtgacactgctttatttgagaacagaataaagagcgtggctggaactctgccaagatggtctttaacattctgccctaaccagggtgttaactttccaacactgttgggtgtatggctgagtgctgcagatttctcagagaattagcaaaaggttgaaataaacgctaaaggatgagtccgtaagaagggaaaataaggctgggttttctttctagttcctttttaaaactctaagcaggaaatactgcccaattgcataagtgaagactgtacacagcagcatcaaaaaggctatttacaagaggattttcttcaacagaatccactttgaaagcactggagaattttggcatcttaagctaagagcagtttaccaaggaacagggccaatctaagtgcctaactagcatttaaagttgtcaaggggtggggatgtgcaaattaagcagcaaaagattattatcttgttttgctttaaagggaaagtaatagtggtcagaggggccagttccaagggctggtccaaaggggggccgctggtcttggtactccgccacatgcccattccggtggtggccatactcaaacttgatccgcagctcgccaatcttagattggggaaggatatctgggatccactcgatgatgaaaggtgttggctccttttgatctggggaagtgttgccaactttgagaaaagtttttagttccaagggtcgcagcactggttgtttttctatacgaccgtaggtttctgctatgctttctacttccactttagggcatttaaatagctcataagtcccatctcggttctggataaagctacgggtgatttccaagggcatctctggggtatctaagatttgtttaccttgcagctttaatggtggtgtctgtacagcatggatgtggacagggacaccagcaagtgcacacagtgcgcacaggccacaggacaggctgggagaatatagagagttcacacaaattccctgctttccccagtgactgagggctgtaggctacatccagctgat

SEQ ID NO: 3080 - DNA, 440 bp, Homo sapiens
  SIMILAR (155)..(325): 401254mologous to Homo sapiens bA425A6.2 (similar to connexin),accession number AL121749,Smith-Waterman Score=84.
  misc_feature (1)...(440): n = a,t,c or g
ctgaatgaatttcagttatttccaaaaactaaatctcccaaaggatgaagagttttcatcactgaggatatttaaaataatactgcagcctctgagagtaatttgtcaaccacccagccaccatcctttcctcttcaaattttgactcatgaagacagaaaacatcttgagaaagatgatcgggacacgacagaattgtcaggttgctgaggccaggaggacaccaagcgaaggtcaccgtgaacaggaaggcagagatgctgttcctgactgtggctctcagaggaggggccgcgacttgggagagcccacaagatgctcgaaatgcccgaaagtgcacgggacaggctccatttcactgggcacctcccctttccacccttctactctcgcgaattccaccacatggactatggtcctcaaanncnagggtcctctat

SEQ ID NO: 3081 - DNA, 713 bp, Homo sapiens
  SIMILAR (181)..(708): 281254mologous to Halobacterium sp. NRC-1 Vng1983h,accession number AE005093,Smith-Waterman Score=87.
acagccacatccttcaaaggtcactgagtcctgagagtaatttgtcaaccaccccagccaccatcctttcctcttcaaaattttgacttcatgaagacagaaaacatctttgagaaagatgatcggtcaatctttcagcaacaggcattactcatctgtcatcaagcgccattcattagccatctctcggggacacgacagaattgtcaggttgctgaggccaggaggacaccaagcgaaggtcaccgtgaacaggaaggcagagatgctgttcctgactgtggctctcagaggaggggccgcgacttgggagagcccacaagatgctcgaaatgcccgaaagtgcacgggacaggctccatttctctgggcacctcccctttccacccttctactctcgcgtggctgcaccgggacaccaccgaacgccgcccagaaacaaaaacttacctcagacgccaacgggaacgcgctgttaagatggcggccgttatgcgcatgcgcccacgcagacacgccgcgcacgcgcaaaggctaggaccacctagggggcggggcctcgggttcccgggcccatcagatgctgcggcttttccaacccagagctgagaggaaatgctgtttacctccccgaagagcgcaagtgtcaccggtagggggtcttgactgcaagctgtcggacgcgtgggtcgacccgggattccggaccgtac

SEQ ID NO: 3082 - DNA, 900 bp, Homo sapiens
  SIMILAR (745)..(876): 291254mologous to Saccharomyces cerevisiae ORF YKR012c,accession number Z28238,Smith-Waterman Score=66.
atgatgtatttttaccgaattatcttctcagaaggctctaaagctccaggaatgtatcccttaaatgaggaagaaaaaggcaaaaagaaatcaaagatcctgcaaggtgatgctgtgtccaggtggcatgcccttttattccaaatggcatgcaggtctcaaatcccatggcccacccctgaggatacgcagccggtgatcctttcaaaacctaatcagatcacactcccgctcagagtgaaagcccatatccttacagagggctatgaggctttgcaagatctgagctctgacctccatgctggatcctcttccctgctgactccactcaagccacggaggcccaccagtcctcaaacacatgaggcatgcccgagctttgatgtctgtggtgctctctgcctagaagactcttctgcaaatgtctgtctggcttatcccctcaatccctcatcttcttcagaatgtaagctccatgagttcaccaactcttgtctgttgttgctcactgcaatatccccagtgcctagagtggcatctgacatatccttggcactcaataagcatctactgaatgaaagaggcactgtgaaaccatgccccagagacaagcttatccacttccagggtctcaactccaaaccctgtgatgatgttttccaaactgttctcaaatccagaatgctgaattgcccagtgcctgctggcgccctccccatgaagtgccccaaagcactgcaaactccatacaactcaaaactcattaccccaactctggcccttacaacttatctcccctgctgtacaactgtgtctataaatggcactgccatccatgcagatgaaaaatcttcatcttctccctcatcagaaaaccctacagagccctctcatctctaa

SEQ ID NO: 3083 - DNA, 579 bp, Homo sapiens
atgggggaggagagaaagagatggggtgagagaaggcgagagggagacccacccagagaactgtggctgagcactgatctacgcatgcctatgaagaaattacctgaggggaaaagaaccactagaaaggaggaggcagaacatccggaggagctcgaacagggctgggattgttcgtgttcccacaagccagagtggaaagacctcctaattcaaagggcatcgtggaggctgcagcagggtagtgtgtcagcaatggggccagattagccccaggctgaaggacccacactaacgaggcttctaagcaatcctcaaaaggattccaacacaacccaagaatattcaaagtaataccaaaaattcagcacccacccatgtacctttcacaatgtctataccattcaatcaaaaactatcacacatagaagcaggaaaatatgattcatacccagggtcaaaatccatcaatagaaacagacccagagaagacagatacaatgggatttgtatacaagaacagtgaggcagtgctaactagatttcatatgctcaaaaaggtagaagaaggcatgggcg

SEQ ID NO: 3084 - DNA, 483 bp, Homo sapiens
  SIMILAR (423)..(482): 401254mologous to Homo sapiens Human secreted protein, SEQ ID NO: 7249,accession number G03168,Smith-Waterman Score=40.
atgcgccggtgcctggaagagctgggggcggggacccggaggctcgcaggcttccctacctcctggagatgcacggccttgggcgtttctccgcagctgcaaagctgtgctgtgacccacccgctcagcgagcctttataccgggaccacctcccgggggtcgagagagagaaaccaaacaatggatctctatttgcagaacttgctacctccaaaagttgggcctggaggaggagtgtttgggatcactctcaatgtatgccctgcctctgcctgagggcaacaatcctggggcacccccagagccccttgtggagacaaccaccagagcataattattccaggtcagccctctgtgcccagtggccacaaaatggggtccagatttccaggcttgccactcagaagaaacagatcagaatggctcagctcaccctctcaatccctaccttcatagaatcaatccaccctgccggcttttga

SEQ ID NO: 3085 - DNA, 252 bp, Homo sapiens
  SIMILAR (154)..(225): 501254mologous to Streptomyces coelicolor A3(2) putative plasmid replication initiator protein,accession number AL034355,Smith-Waterman Score=67.
agcagaaggagcggctcctctacctactctggggagaggtagcatttctgagagtcaaatgccgcatcgccatgcttctcaagtttgaacgctcaggtgaatctcatggattcctgagaagttggctggaactaagggagcattcagagaccacagatccagttgactggtccctgctgacatccagtccacgttgttggccacatcagctcctcttcaaactcatgatgcaaatcaacagctaaacatgtt

SEQ ID NO: 3086 - DNA, 822 bp, Homo sapiens
  SIMILAR (622)..(425): 341254mologous to Homo sapiens Human gene 42-encoded protein fragment, SEQ ID NO:358,accession number Y86443,Smith-Waterman Score=90.
atggactttggagactcagggagcgagggtgggaagcggatccctgacctctcccatgaaaagtggtttcctggtttagaagagaaagatcaagcacaactgagaattttccattttcaaaaaaaaggccttgtgaatagagcaaaggggatgggatgtcatttccacgattgggttgcaaaagattgtgactttcgtcttgctagcagactctctctgtggccttctcagcttgcacacttcgatgaagttcttaaaactggcaggcagacttccaatttccagtccagcaagcacgaagcttgggagtcagcacttcatcctaacaacaaggagaaggctaaccaaactaaaaaccaaacagttcttttagattcttatggcaagagaggtcatggggcaaaccattactccccaacctggagagaccagcagacgaatatccggaatcacaatttaccagggcagaaagctccgtgggaaccggtgccagggggtggtactttcaatttccttcaagaacttttcctgtgcatgcacaggctgaggctgcctcttttgagaagagggagaaaagaagaagaagagggagataaaaagaaaatgtttgtgaagcagccaccaaaagttaaaagaaaaaactttatgtctaaaggtcaagtagttggtggccacacctgggtgaaaggcagggccaatcctagcatgggagtgccctgcagtcatgacctcagtggcttcctcactttctgggaccttttgcaaaattcttgtggcttgccatttacgaacctggtggcttcaatgcctgcagcaccttaa

SEQ ID NO: 3087 - DNA, 252 bp, Homo sapiens
  SIMILAR (151)..(252): 411254mologous to Streptomyces coelicolor A3(2) putative plasmid replication initiator protein,accession number AL034355,Smith-Waterman Score=68.
agaaggagcggctcctctacctactctggggagaggtagcatttctgagagtcaaatgccgcatcgccatgcttctcaagtttgaacgctcaggtgaatcccgtggattcctgagaagttggctggaactaagggagcattcagagaccacagatccagttgactggtccctgctgacatccagtccacgttgttggccacatcagctcctcttcaaactcatgatgcaaatcaacagctaaacatgttgat

SEQ ID NO: 3088 - DNA, 2398 bp, Homo sapiens
  SIMILAR (1690)..(1893): 571254mologous to Homo sapiens Human cancer-related protein Nmi,accession number W73473,Smith-Waterman Score=170.
gatggttaaaaaaatttgggttttattgtttttgctaaataatactaaaaaaaaaatttcattttgaaggcagggcttgaattatttaatttgatcccatttatttaaattaaaaaaaaaaggaaggggaaagagaatcatggcccaaaaaaatagtagttaacccccaccccacccccaaagctctagccagtcatgtgagcatcacccacatccccactcagtgcctgatattcggatggtggcatactctgcccccaggagactgcctgaaggcacggggcaatgggtgccaattttagctctcagcaggttagtcaaccaaacaaactggtgggctaaagtccagaaattctttccaggttttctgctcattggctgagcacatacaaactgtcataagcctgtaaaatttaaaggggaagttggggtgggacgtaagagcaaaaaggacagcaggagaagagaaattacgggtcacccaagtttttccctgggctagtggctctggatatagatttaaagagaggtccagagtaaatggactcccaggtttcttatcaaagaaaaactataccctcaaatgaggagcttgagatgtgccatgcaagagagttcttcctgcagaggcacaggagaaagggcagctgactctctcatgtggagagagtggcgaggaaggtcttctagtaccatgaagtaagacaggcagagggagaatcctgaggtttgggccaaatgtgagactggtacacacacagttaaagactaaaaagccatcaggaacccctcaaagccaaattctatctgcacactggctctacaaagttcgcatcaagaatctcttgcaccaagtcaagttagtggcctggctatgatggatggtggggagggcaatacatttttattttcagagggatgaggtgggaagaatagccatgatctagtaaaaagagacctgcaagaagcagaaaatatttagagaacattttaatatatattttcatttatatatttaaagttaagaaaaataaaactaattcaagccatgccctgtgcaaaaaaaaaaaaaaaaaagaaaaaagaaaaaaaaaggaaaagaaaacaaaaatttaaagtgagacgtttgcttgctctggtctcaatttaagaatcacagtcagcttgttacttttattttggaagaaaagatgtaaaagtttctttcaatcattcaggaaggcaagtgtagcccacttataaaaaacagaatggcaggaaccaaactaggaaaggaaagtcagaagtaaagggccagagtgggaaaataattttccaaaaataaaattaacaaggtgaactgttcccagaagagggctgtgaaaaggacatggtggaccgaagtctgttagtccaagtaatgattcaacttttaaattattctcttgttcttttttgttgggtgttttgtttgttcaagtctaagatttggaaatgctgaccctttgttaagagccaacaggacatataaggatcccttccctcccgccggcctgcctccgctgaagccaccaccagcgcctccttggctggatgctggaagagtcctccatgtgtacggactcaggatgtcagggcagcctccttctgtggttgcatgggcttggcaaccgtgcgagtatcttttggctttccacgtctctaaaatgtttttcaaactattttgcgtacgatggctcagtgcagctcccctctttgcctttacagttttccacttgatatggggggtgtaataacaacttcttccatgactacgatgtttttttcttgccatttacagtctttaatggtcatgtgaatggtctggaaaagctgctgcccctctagagagacaccagcagtgattgcataggcctggctcagcattctcctccttctctgtccgtgctttgctggccagcttactaacattggagtgaacctaggggaggaggggtttctgttcggtcattagattatttccacttctgaaacatactgtaagtttatgagcaagatgtctgcatggttgggctttccactacacgccggcccggactcgggcttcacgcagggaaggatacttaaagccagcattttggattggtagtcaaaggctaccacctcgccgtgcagcagctgctcctggcacgttcggctcgactcatggctctcaacgctgaagtcatcgccacggaggagccgccatcttgggagtgcagccgcggccggcggcggcggcggcagcagcgggcgaaagccgggcccccagtgagcgccgcgacgcgacggcgcgcacggagcgtgcttgcgtcacacgccggggcgtggcctggcgctggttggggcgggatcccagactggagtgcagtggcgccat

SEQ ID NO: 3089 - DNA, 255 bp, Homo sapiens
  SIMILAR (117)..(70): 621254mologous to Streptomyces caelestis cytochrome P-450 hydroxylase homolog,accession number AF016585,Smith-Waterman Score= 67.
atggagtcggttaagttagatcccttccagtgtctcagtcataattttgcaaaggcggcttcacgttgtccaggaaacagggtgattggttctgtcagaactaaaccaatcagtcatggcaatcccctggctacatttgacctaattcagggcgatgaaaagcaagatatcagaggccttctggggaaggagctttatcatttttatgagagggctgtagacatgattctctctctccctttctctgaaaattga

SEQ ID NO: 3090 - DNA, 2398 bp, Homo sapiens; identical to SEQ ID NO: 3088
  SIMILAR (1690)..(1893): 571254mologous to Homo sapiens Human cancer-related protein Nmi,accession number W73473,Smith-Waterman Score=170.

SEQ ID NO: 3091 - DNA, 306 bp, Homo sapiens
  SIMILAR (22)..(99): 761254mologous to Homo sapiens Human secreted protein, SEQ ID NO: 5576,accession number G01495,Smith-Waterman Score=91.
atggctgtttatatcacctgggtgcagggggcttccgaggcgatcgggcagcgtcagtcttcagccgctaatccgagaagatctgggaaggagtcagtcagagagccttgggccagagttccaggggctctgggaatggctgccagaaaagcgggacttgccactaagggtgaaggagaaggggttggggtacttaaccctctcccagaaaagcgggacttgccgctaaggaaaatgaaaggaattgaaattaagagaagggagagattgaagagtggaaaggagaaagtggttgatggacagtga

SEQ ID NO: 3092 - DNA, 503 bp, Homo sapiens
  SIMILAR (1)..(126): 761254mologous to Homo sapiens Human secreted protein, SEQ ID NO: 5576,accession number G01495,Smith-Waterman Score=156.
atggtctatggggcttccgaggcaattaggcagcgtcagtcttcagccactaagctgagaaggggtcagtcagagaagcttgggccagagttccaggggctctgggagcagctgccagtccatgaccggtgccagagttttgggtccacggataaaacgtgtctcctttgtctctaccagaaaatgaaaggaattgaaattaagagaatggagagattgaagactggaaaggagaaagtggttgagggacagtgagagaggttggagaagagagtaagaagaggccgcttacctgatttaaaattggttacctaaccaaactcctgcaaaaacacaccatctatgcctgtgatggggactatctgaatctacagtgccctcggcattctacaataagtgttcaattggcattttatgggcaagattaccaaatgtgtagttcccagaagcctgcctcccagagggaagacagcttaacctgtgtggcatccaccaccttccag

SEQ ID NO: 3093 - DNA, 1254 bp, Homo sapiens
  SIMILAR (1009)..(833): 391254mologous to Streptomyces coelicolor A3(2) putative gntR family transcriptional regulator,accession number AL034446,Smith- Waterman Score=95.
caggtatttcatcacaggtgcagacttctgctgggggcttaagcctcacttcctctgtgagaggagctgcagctcactcttgtccataaaaggccacgaggctcgcagagcggtgacatcagcccaacaggaagtacggaggaaggggcctgcttcaccagcagccactgctgggacttgactcatcacccagctcccaagatcacacctcccgaggttccagcatggagcagctctctcgggctccacctgggagaggtccctgcaggaccccatcttcgggctccactgggcttcttgagaaatgggtatgggccaagaaagaaaaacaggaaaaagggcagtttcaggttggacaacatgcccacgttgggactcccctccatcgaacacccctatgagcacagcactcggcacctcccgcaggcctgcctcagtgctgcaaagaaagggccgcgacactctcatgacgagaagctctgcttctccacagccagctcaattcacaagcttgggttacaagtctttgggaggcaaacagagagcttagacctgtgccctgttgtatctgtggaccagctcatgtggaagagacaagatcttcaggaagaatcccaaagccaggagcagcacaaagcagccagctcgcatcagctcgaggacagcgcctcccggctgcagccatggtgttgggtggtggcccagggcctgcttcccacagcacctgtctggtccaccagcatcccagggaacagaaaagtgtctcagggctgcagaagaaccaactctggatcaagcacatctcctaaagctccactgaggccacatcagccccaggcctcagctctgcgtggaccagaccagataagccaggaccgcgtctgctatcgcgttccagtgtgtggcgcggtcgctgcaggggcggctgtgacaactcacttcctgcacctggactctcgggagagtgtttttggggagattcaaatggctgcctggaagatgcatttggccatcaccttcattaagcgagcaggagtgtggacggaaggaatgagcgatttgaagcctccgtggaaggcggggcagttcagtcaagaagtgtttggactcctactgccagctctaacagacagcactaatccatctcagaattcctgcatcgagtctcaaatccttgccagcacagggctccaggcagccactactgatcgatcggagatgacactcaaagtaaaactaatctgcaatgcttag

SEQ ID NO: 3094 - DNA, 615 bp, Homo sapiens
  SIMILAR (231)..(287): 781254mologous to Homo sapiens Human GUS protein fragment,accession number W93828,Smith-Waterman Score=80.
atgcaagggctggtgaattaccagatctccatcaagtgcagtaaccagttcaagttggaagtgtgtcttttgaatgcagaaaacaaagtcgtggacaaccaggctgggacccagggccagctgaaggtgctgggtgccaacctctggtggccgtacctgatgcacgaacaccccgcctacctgtactcgtgggaggtgcggctgactgcacagaagtcactggggcctttgacttctacacactccctgtggggctccgcactgtgcccgtcaccgagagccagtgggatggtgattgctcacaccaaagccttggacccctcccagcctgtgacctttgtgaccaacgtcacctatgcagcagacaaggggcctttatgggaagtagcagcaccatccagttctcagagagcaagctctggagtaactgagctaacccgggttaccccagtggatttacagattgaggttagaacccagcagggttctcttcctggaaagaatagccttccctctaaggtttcaaatagaccctggaaacatcggtatttgattaaacttgaggaatggattgttcctaattttaatactacctcaagtgaaagtcctgtttaa

SEQ ID NO: 3095 - DNA, 1032 bp, Homo sapiens
  SIMILAR (478)..(401): 421254mologous to Chironomus thummi Sp12 gene homologue,accession number X70780,Smith-Waterman Score=46.
catgtatacatacatacactcagaagagtttggaaaaggaagacttgctgagtcttctggcctccatctttctcccatgctggatgctccctgccctcaaacattggactccaagttcttcggcttttggactcttggatttacaccagtggtttgccaggggctcttgagcctttggccacagactaaaggctgcactgtcagcttccctacttttgaccaatggtcagaaggaatcttgcagcaatgaccatagagcgctttctcctgcctgcagacgcctctttttattcagcctttatgggaagtagcagcaccatccagttctcagagagcaagctctggagtaactgagctaacccgggttaccccagtggatttacaatttgctgtttcttcaaggagctgtgaaaccaagggacatataaaactgctcttttctccctgattctgcctgcaattttctgcttctttgaggagctgtgaaaccaagggacataaacaattgctcttttctccctgtttctgcctgtagcttgaatgtgaggcaactgtgagcacgctaccagattagccctgctccgcaaggagcagttatatatatataatcacacacacacacacatttttcagggaatcctgcctaatttcttccgaagttcagctgtctcagttcacaccaaacaagttacacgatttcataacggatagaggacagaagcttaaggagggagggccgaatgcaccgggaaccctagtcaagtgtaggaaatcatcacgagcgaggcgaagcaggtcgtgggagacgagaccttcactcaggaacggggacgatgtgaatcgtgtttctatcgagtggctgggggaccgggttgggatcagccaggaggaggtagccgcacaaggcttagctgggtctcccgcgcagacatctcctggacagcgacgcagcgccgcgcaggcgctcactgcccggctccagggctgcgggtggcgagtccctgcctgcccggcgctcgccctcggggaagg

SEQ ID NO: 3096 - DNA, 361 bp, Homo sapiens
  SIMILAR (157)..(11): 341254mologous to Arabidopsis thaliana hypothetical protein, 3' partial,accession number AC073178,Smith-Waterman Score=71.
  misc_feature (1)...(361): n = a,t,c or g
ttcgcatgactgggctgctaaaggcactggatcctaggctaggaggagaaagggtgctgtgaactggagttgccagagatccagaagagggacagctgcctggagatgagaccattctgagctccgcttcttcttctatggaatgtggataatcacttctacttcatgatcacaaggtnnnnnnnnnnnnnnnnnnnnnnnnnnnnnnnnnnnnnnnnnnnnnnnnnnnnnnnnnnnnccctcaaaagcagggaagctgacagtgcagccttcagtctgtggccaaaggcccgagagcccctggcaaaccactggtgtaagtccaagagtccaaaagctgaaaaacttggagtctgatgtt

SEQ ID NO: 3097 - DNA, 3577 bp, Homo sapiens
  SIMILAR (226)..(312): 1001254mologous to Homo sapiens dinG,accession number Y10571,Smith-Waterman Score=150.
gcccctcgctcgctcgctccttcccgccctccccgcagcgccggccgagccggcttcccctcagtctctcatgaatattgagcggcccctgttgtatttcccgagctccattgcggaagctgaggctcgccatattgtgcggcggcgccggcgtccgcggcagctgataccagagtcttgctccggccgcggccagcggagccctgggctggggcaggagccgcaatgtctcaggctgtgcagacaaacggaactcaaccattaagcaaaacatgggaactcagtttatatgagttacaacgaacacctcagtgactctcttacagaaggcaataacagatggcttagaaattgtggtttcacctcgaagtctgcacagtgatttaatgtgcccaatttgtttggatatgttgaagaacaccatgactacaaaggagtctttacatcgtttctgtgcagactgcaacatcatagcccttagaagtggcaacaaagaatgtcttacctgttggaaaaaactagtttccaaaagatcaccaaggccagacccaaagtttgatgcactcatcagcaaaataaatccaagtcgtgatgaatatgaagctcatcaagagagagtattagtcaggatcaacaagcacaataatcagcaagcactcagtcacagcattgaggaaggactgaagatacaggccatgaacagactgcagcgaggcaagaaacaacagattgaaaatggtagtggagcagaagataatggtgacagttcacactgcagtaatgcatccacacatagcaatcaggaagcaggccctagtaacaaacggaccaaaacatctgatgattctgggctagagcttgataataacaatgcagcaatggcaattgatccagtaatggatggtgctagtgaaattgaattagtattcacgcctcatcccacacttatggaaaaagatgacagtgcacagacgagatacataaagacttctggtaacgccactgttgatcacttatccaagtatctggctgtgaggttagctttagaagaacttcgaagcaaaggtgaatcataccagatgaaccttgatacagccagtgagaagcagtataccatttatatagcaacagccagtggccagttcactgtattaaatggctctttttctttggaattggtcagtgagaaatactggaaagtgaacaaacccatggaactttattacgcacctacaaaggagcacaaatgagcctttaaaaaccaattctgagactgaacttttttatagcctatttctttaatattaaagatgtactggcattacttttatggacagatcttggatatgttgttcaattttctttctgagccagactagtttacgctattcaaatcttttcccctttatttaagatttcctttttggaagggactgcaattattcagtatttttttctttcctttaaaaaaatatatctgaagtttcttgtgttttttttttttccccacaaagtgtgtttccacttggagcaccattttgacccaggaatttttcatagtttctgtattcttataagattcagttggctgtccttttcctgctcccctcaaaagatttttagtcatacagaatgttaaatattatgtattctgaccttttttttttcccccggagtcttggtatatttatagttttcctatataaactgtagtatcttcatgaagaacccaaggctcaaatttactgtccttaaaaacaattctcataggattattcttttcatggtattttcttccataatatctcattttaaaaagaagttctttatgaaacttagtgtccattgtcatgcaatgttttttttttccattctttttcccctgtaattttggaatttctggtcctgggaagaatcaaacaaaatcttaagttctatgagaacttggttcattgacatattctgctgaagaaagaaaaattaaattggtagtaaaatatagtcttcaagtatacgtttgagagtgcttttttttgtattagttctgctgtcacttcatttcctgtattatatgtgatgtttttccccattaaaataccagagataatggagatattttgcactttagccttgatgaaaagtacaagatatgttcaaagcttccctaatttttttcttatttgtagccacataagtttcaagaataacatggcacacagaacaatggaaaaaagtttgtttccattggaaaattatatcattttgggttgccacatcagtttataaatttggcgctcttttaattacactctgtagaaggttaatagagcttgagccctgctttaatatgtagtgaaagataattctgtagaaaaacgtcagccagtagggtaaagtcattctactgttcttaatttttatattgaggaacaatattgggtgtttgggagccagaaagctttgttgacagatcagaaataagattgacttgggtgttatatttcatctctctccagactctaggtatatttccaactttatatatcacagtatttaaaaagacatgtttgcattgagaaattaaccctaaagggttttcaatagggtgtagacctccagtacctttgtaactaaagtctgtctagtcattgtaaatatttatctgtcagttttgacagattggggccagcttgatgttttaaatcttcagcccggtatgaaaacttaaaggtatatattcaattttttaccattttatggaaaatatttaaaatttgtttttacagggtttttttttttttttttttttttttgtaatctgtgccatgaaatttgaaaaccaccaaaaatcaagggaacttttatatattcaattccttttctggtgtaatgttaaagttgtatagattattaatgcatgcccactgaatataaccctggttttgtgataaaactgcttagattttgttgatgacattagattagtagttgcattaaataactaaattcccattgtgattaattgaaattttgtctttaagcagagagttatttgtgactataagctttgtgcttagagaatgtatgtgtttttatctgtcagtatgggaggatataaactgcatcattagtgaaattattggttgtgtaatcctttgtgaaatataattctaggtatttgatagggtattgagtgtattttgtgtgtgtgtggatgtgtgttttggggtacggggagaggcgatgctattgggccatcactacccaacccagggttttcaaaaaaggtatatacctaaggtaatttcttttaatcactatctcaactgaggaagaaaaaggcttcacacaagtggtgtgaaggctttgggtacttagttctaaatttttttatggtaacatatacatagccacatttacagttttaaccattttaaggcatgtaattcagtggggttaggtacattcacaatgttgtgtaatgatcaccgctgtctacttgtaaaactttttcatcaccccaaacagaaactctgtgtgcaattaaagtaatgcatttctcttcttcttaacccct

SEQ ID NO: 3098 - DNA, 444 bp, Homo sapiens
  SIMILAR (439)..(308): 881254mologous to Homo sapiens Human secreted protein, SEQ ID NO: 6297,accession number G02216,Smith-Waterman Score=205.
agcagtggcctgccccgcttgtaaaagccgaggggttccggaaagccgaccgtgctttacaggacaactgcaaagaggaagagaggcgaaatccagggggagaccatgtgaccacgcgtggcactggccaatcccacagcaagtcatacagcagaggcattgaaacacacacccccaggcaccccctgaggctccggggttctgctctggaggagaacgaccctcgggtgagagagcagcccaggggcacgcagcccgacacgtcctcgagatcacggacggcggcaaggcttttggcgagactcaccccaaccaacaccgtccgtgcaggcctgaggctgggatcccgtgctgcttccaggtctccgcctggggtttcatcatcatggtcggccctttgcgagtgctggcatccggagacgttgccttcgaccctgtggggag

SEQ ID NO: 3099 - DNA, 4586 bp, Homo sapiens
  SIMILAR (4581)..(4450): 861254mologous to Homo sapiens Human secreted protein, SEQ ID NO: 6297,accession number G02216,Smith-Waterman Score=201.
atgatgtcctttgactccatgtctcacatccaggtcacacagatgcaagagatgggatatcatggctttgagaagctccactcctatggcttggcagggtacagcctcccttctggctgctttcacaggttggtgttgagtgcctgcagcttttcctgctccaccatacagaaatgcagagatgctgccaaatggagtggtcaacctttgatggggcctgtgcattttggaaccaatctgggggacactactggtgatgagcagagggtgtcagggctttctaagacagcaagggcaggtaccactgcattggcagtggcagttggctgtcatttgcctctgggagctccatcacaggataacacagagccactggcaatagaaatgttcagcttggggtcatctcatccagtcgtacggcttctattatcatccatagcagaaattatgaacccagagtccatggataaacttttgggcctacccagattggagagcaggcccaggggcatgttcctctcatggcatggaaggcaagctgcacctgatgagctctttgggagccactggttggacacggtgtactggaagtctgctcatgtgtcattgcccaaagcaagtcagaaggctaagctcagagtcagtgagggaggagcccaatgtgaggaaatgattgtcaatgagtgctgggagtaccacactgttgtactttttgacagagtaggcggctctggaacctgtatcggtctggctgcctgcctttataatggtgtttggctgcaagtttacgtacacagtgcactgcggaaagagcctttgctttccacccacacacacaaggagcaaatcccatcttcacttcctatttcttgccaggccagcagcatcacctcagctggggattcatctgtggcctcatcctggatctgtgactgctatgatggtccagagtccagggatctgagttccaccaagccttctgggcattctccctcagtggcccttaacccagggtccagggatctgagttccgccaagccttctgggcattctcgctctgtggtccttaacccagggcccaaggatctgagttccgccaagccttctgggcattctcgctctgtggtccttaaccctggtgcaggcagcgcccagggctacagcatggtccagcccagtccatggaaacaggagtcctgggcacagtgcaatgggcagacgctggcggtgacttcaaactcacagtcctgcctctggggtgtgtcctttcctcctgcctcagcacctggccttgagaacattatgaagtcacctgagacacaattagatctggtgacaatgaacagtgtgagatgctctgctgttggcttgcactgtgtggcccctgcagacttcaggctggtttcctttgtgccctttctcacaaagctcatgcatggatttccagcagggaggattaagaatattgtcctcaacccagttagaatgttgctgctaagtttcaatgtgtcagaggctttttcattttcccagagccagtgctggctggcgtggcgagtgacaacattgcagcatttgcaaagtgactacgtcgtagcatttgcattatcttccttggtgtgcatatctttcaaccatgtcagggaagcggttggaaggaaaaatcacagagcacataagaaggacttctgggcctgctccggaggcttgcagaggacatgcccgaagggacttcaaagctccttgctaggtctccactcaaaggcttatcccatggcccgagcaaggaaggcctttgtgtgtgaaaacacctgccacccagcttcaggagcactgagcgctttcggcatggccgtccccactggcccacatggcatttcttacaagtcatacaacagaggcattgaaacacacaccctctggcaacccctgaggctgcgggattctgctcttggaggagaacgaccctcgggtgagagagcagcccaggggcacgcaggccgacccgtcctcgagatcacagacggcggcacgacttttggtgagactcaccccaaccaacaccgtccttgcaggcctggggctgggatcccgtgctgcttcccccgtctccgcctggggtttcatcatcatggtcggcccgttgcgattgctgtcatcaggagaggttccctttcgaccccgtggaaagagcagtggcctgccccgcttgtaaaagccgaggggttccggaaagccgaccatgctttacaggacaactgcaaagaggaacagaggcgaaatccagggggagaccatgtgaccacgcgtggcactggccaatcccacagcagttggtgttaacgtgtgacaccggaggcaaacggggcgacggcgaaacgaagggtggggtccatgcacgtgccggtggaagggggaaacgggtgacctttccgtcaatgccaaggaaaatcaaacaacacctgggacccggagggtgtaggggacgtctgtgcctgacccaagccacgttttcaaatgcctaccagaggaacaaagaggtttctgccaatttcgcaacacccccaatcctccaccgaactcgtagccctgatgcaacttcggctggaacaaacccacaaagagagaacgaccctcgggtgagagagcagcccaggggcacgcaggccgacccgtcctcgagatcacggacagcggcaaggcttttggagagactcaccccaaccaacaccgtccgtgcaggcctgaggctgggatcccgtgctgcttcccccgtctccgactggggtttcatcatcatggtcggccctttgcgactgctgtcatcaggagaggttcccttcgaccccgtggagaggggttccggaaagccgaacgcgctttacaggacaactgcaaagaggaacagaggcgaaacccagggggagaccatgagaccacgcgtggcactggctaatcccacagcagttggtgttaatgtgtgtcaccggaggcatacggggcgacggcgaaacgaagggtggggtccaggcatgtgccggtggaagggggaaacgggtgacatttccgtcagtgccaaggaaaatcaaaccacacctgggaaccgggaggcaacccctgaggatccggggttctgctctggaggagaacgaccctcgggtgagagagcagccgaggggcacgcaggccgacccgtcctcgaggtcacggacggcggcacgaattttgcagttggtgttaatgtgtgtcaccggaggcatacggggcgacggcaaaacgaagggtggggtccaggcatgtgccggtggaagggggaaacgggtgacatttccgtcagtgccaaggaaaatcaaaccacacctgggaaccgggagagattgggaaagaaacacacagagagtgagagacagagagagaagagagaatgggagacacacacacagacacacacgcacacacacgcagagtcatacagcagaggcattgaaacacacactcccaggcaacccctgaggatccggggttctgctctggaggagaacgaccctcgggtgagagagcggcccaggagcacgcaggccgaccagtcctcgagatcactgaccgcggcgcgacttttggcgagactcacccaaacaaacaccgtccgtgcaggcctgaggctgggatcccgtgctgcttccccggtctccacctggggtttcatcttcatagtcggcccattgcgactgctggcatcaggagagtttcccttcgagcccgtggagagagcagtggcctgccccgcttgtaaaagcccagggcttccggaaagccgaacgcgctttacaggacaactgcaaagaggaaaagaggcgaaacccagggggagaccatgtgaccacgcgtggcactggccaatcccacagcagttggtgttaatgtgtgtcaccggaggcatacggggcgacggcgaaacgaagggtggggtccaggcatatgccggtggaagggggaaacgggtgacatttccgtcaaagcaaaggaaaatcaaacaacacctgggaaccgtggggcaccccctgaggctccggggttctgctctggaggagaacgaccctcgggtgagagagcagcccaggggcacgcagcccgacacgtcctcgagatcacggacggcggcaaggcttttggcgagactcaccccaaccaacaccgtccgtgcaggcctgaggctgggctcccgtgctgcttccaggtctccgcctggggtttcatcatcatggtcggccctttgcgagtgctggcatccggagacgttgccttcgaccctgtggggaggcaccccctgaggctccggggttctgctctggaggagaacgaccctcgggtgagagagcagcccaggggcacgcagcccgacacgtcctcgagatcacggacggcggcaaggcttttggcgagactcaccccaaccaacaccgtccgtgcaggcctgaggctgggctcccgtgctgcttccaggtctccgcctggggtttcatcatcatggtcggccctttgcgagtgctggcatccggagacgttgccttcgaccctgtggggag

SEQ ID NO: 3100 - DNA, 5659 bp, Homo sapiens
  SIMILAR (3199)..(3423): 771254mologous to Homo sapiens Human secreted protein, SEQ ID NO: 6297,accession number G02216,Smith-Waterman Score=287.
atgggagacacacaaacagacacaaacacacacgcagagtcatacaacagaggcattgaaacacacaccctctggcaacccctgaggctgcgggattctgctctggaggagaacgaccctcgggtgagagagcagccgaggggcacgcaggccgacccgtcctcgagatcacagacagcggtaaggcttttggtgagactcaccccaaccaacaccgtccgtgcaggcctgaggctgggatcccgtgctgcttcccccgtctccgcctggggtttcatcatcatggtcggccctttgcgactgctgtcatcaggagaggttcccttcgaccccgtggaaaggcaacccctgaggatccggggttctgctctggaggagaacgaccctcgggtgagagagcggcccaggagcacgcaggccgaccagtcctcgagatcactgaccgcggcgcgacttttggcgagactcaccccaacaaacaccgaccgtgcaggcctgaggctgggatcccgtgctgcttccccggtctccacctggggtttcatcttcatagtcggccctttgcgactgctggcatcaggagagtttcccttcgagcccgtggagagtcggccctttgcgactgctggcatcaggagagtttcccttcgagcccgtggagagagtcatatatcggaggcattgaacactgagaaccctgaggcaacccctgaggatccggggttctgctctggaggagaacgaccctcgggtgagagagcagcccaggagcacgcaggccgacccgtcctcgagatcacggacagcggcctgaggctgggatcccgtgctgcttcccccgtctccgcctggggtttcatcatcatggtcggccctttgcgactgctgtcatcaggagaggttcccttcgaccccgtggagaggcaacccctgaggatccggggttctgctctggaggagaacgaccctcgggtgagagagcagcccaggagcacgcaggccgacccgtcctcgagatcactgaccgcggcgcgacgtttggcgacactcaccccaaccaacaccgtccgtgcaggcctgaggctgggatcccgtgctgcttcccccgtctccacctggggtttcatcttcatagtcggccctttgcgactgctggcatcaggagagtttcccttcgagcccgtggagaggcaacccctgaggatccggggttctgctctggaggagaacgaccctcgggtgagagagcagcccaggagcacgcaggccgacccgtcctcgagatcactgaccgcggcgcgacttttggcgagactcaccccaaccaacaccgtccgtgcaggcctgaggctgggatcccgtgctgcttcccccgtctccgcctggggtttcatcttcatagtcggccctttgcgactgctggcatcaggagagtttcccttcgagcccgtgaagagaggagcaaagaggtttctgccaatttcgcaacacccccaatcctccaccgacctggtagccctgacgcaacttcggctgagtcatacagcagaggcattgaaccctgagaaccctgaggcaacccctgaggatccggggttctgctctggaggagaacgaccctcgggtgagagagcagcccaggagcacgcaggccgacccgtcctcgagatcacggacagcggcctgaggctgggatcccgtgctgcttcccccgtctccgcctggggtttcatcatcatggtcgaccctttgcgactgctgtcatcaggagaggttcccttcgaccccgtggagaggcagcccctgaggctccggggttctgctctggaggagaacgaccctcgggtgagggagcagcccaggggcacgcagcccgacacgtcctcgagatcacggacagcggcaaggcttttggcgagactcaccccaaccaacaccgtccgtgcaggcctgaggctgggatcccgtgctgcttcccccgtctccgccgggggtttcatcatcatggtcgaccctttgcgactgctgtcatcaggagaggttcccttcgaccctgtggagaaatcacggacagcggcgcgacttttggcgagactcacccgaaccaacaccgtccgtgcaggcctgaggctgggatcccgtgctgcttccccggtctccacctggggtttcatcttcatagtcggccctttgcgactgctggcatcaggagagtttcccttcgagcccgtggagaggcagcccctgaggctccggggttctgctctggaggagaacgaccctcgggtgagagagcagcccaggggcacgcagcccgacacgtcctcgagatcacggacagcggcaaggcttttggcgagactcaccccaaccaacaccgtccgtgcaggcctgaggctgggatcccgtgctgcttcccccgtctccgcctggggtttcatcatcatggtcgaccctttgcgactgctgtcatcaggagaggttcccttcgaccccgtggagaggaaattttgtcgagtgaataaaagtcaattatatacattatgtacaacagtacaagtaggccttgagacctatgggatcattctgtgctgcagcgaggccctgcctgcctcaccagatgtgtctctgtgtgtttccttcccactctctgtgggtttgtgccagccgaagttgcgtcagggctacgagatcggtggaggattgagggtgttgcgaaattggcagagacctctttgttcctctgggtcgaaggcaacgtctccggatgccagcactcgcaaagggcctgaccatgatgatgaaaccccaggcggagacgtggaagcagcacgggatcccagcctcaggcctgcacggacggtgttggttggggacccaggacacagccgccgccgcggcggcagcaggagcatcgcggccgccgcgcggcgatggcgatatttaaaggtgacgcagcctatctgtcaggagtggagctcggctcaagcaggtcctgaggacaggagccctgggggtttgggcctgggacaggacgagacacccgcggtccactctcccatgccgccccaaacaggacccaggacacagccgccgccgcggcggcagcaggagcatcgcggccgccgcgcggcggtggcgatatttaaaggggacgcagcctatctctcaggagtggagcgtgagtcggctcagccaatgcgcatgcgcgaggccccagcggtttctccggtcacagtggttcccacggttgtcttagaaaccagtccccgaggctttgcagagcaggagccctccgtggcagtgcttgggtatcgaggctctgaggctccggtctcacctctccacgggctcgaagggaaactctcctgatgccagcagtcgcaaagggccgactatgaagatgaaaccccaggtggagaccggggaagcagcacgggatcccagcctcaggcctgcacggacggtgtttgttggggtgagtctcgccaaaagtcgcgccgctgtccgtgatctcgaggacgggtcggcctgcgtagccctgggctgctctctcacccgagggtcgttctcctccagagcagaaccccggagcctccaggggttgcctccgggtcccaggtgttgtttgattttccttggcattgacggaaaggtcacccgtttcccccttccaccggcacgtgcatggaccccacccttcgtttcgccgtcgccccgtatgcctccggtgacacacattaacaccaactgctgtgggattggccagtgccacgcgtggtcacatggtctccccctgggtttcgcctctgttcctctttgcagttgtcctgtacagcgcgttcggctttccggaaaccctgggcttttacaagcggggcaggccactgcactctccacggactcgaagggaaactctcctgatgccagcagtcgcaaagggccgactatgaagatgaaaccccaggtgtagacgggggaagcagcacgggatcccagcctcaggcctgcacggacggtgttggttggggtgagtctcgccaaaagccttaccgccatccgtgatctcgaggacgggtcggcctgcgttcccctcggctgctctctcacccgaggttcgttctcctccagagcagaaccccggatcctcaggggttgcctgggggtgtgtgtttcaatgcctctgctgtatgactctgcgtgtgtgtgcgtgtgtgtctgtgtgtgtgtctcccattctctcttctctctctgtctctcactctctgtgtgtttctttcccactctctgtgggtttgtaccagccgaagttgcgtcagggctaccaggtcggtggaggattgggggtgttgcgcataattgggcagaaaccttctttgctcctggttcccaggtgttgtttgtttttccttggcgttgacggaaatgtcacccgtttcccccttccaccggcatatccctggaccccacccttcgtttcgccgtcgccccgtttgcctccggtgtcacacgttaacaccaactgctgtgggattggccagtgccacgcgtggtcacgtggtctccccctggatttcgcctctcttcctctttgcagttgtcctgttaagcacggtcggctttccggaacccctgggcttttacaagcggggtaggccactgctctttccacggggtagaagtgaacctctcctgatgacagcagtcgcaaagggccgaccatgatgatgaaaccccaggcggagacgggggaagcagcacgggatcccagcctcaggcctgcacggacggtgttggttggggtgagtctcaccaaaagtcgtgccggcgtccgtgatctcgaggacgggtcggcctgcgtgcccctcggctgctctctcacccgagggtcattctcctccagagcagaaccccggatcctcaggggttgcctggtgttgtgtgtttcaatgcctctgctgtatgactctgcgtgtgtgtgcgtgtgtgtctgtgtgtgtgtctcccattctctcttctctctctgtctctcactctctgtgtgtttctttcccactctctgtgggtttgtaccagccgaagttgcgtcagggctaccaggtcggtggaggattgggggtgttgcgaaattggcagaaacctctttgctcctcccacggttcccaggtgttgtttgtttttccttgacgttgacgaaaatgtcacctgtttcccccttccaccggcatatccctggaccccacccttcgttttgccgtcgccccgtatgcctccggtgacacacattaacaccaactgcagagaaacaaagaggtttctgccaatttcgcaacacccccaatcctccaccggcctcgtagccctgacgcaacttcgctggcacaaacccacagagagtgggaaagaaacacacagagaccccaggcaccccctgaggctccggggttctgctcccaaccaacaccgtccgtgcaggcctgaggctgggatcccgtgttgcttccaggtctccgcctggggtttcatcatcatggtcggccctttgcgagtgctggcatccggagacgttgccttcgaccctgcttgagccgacttccaccgagggaggtggagcttcaggacgcctgctgtgttctccggactcccgttgagatcccat

SEQ ID NO: 3101 - DNA, 416 bp, Homo sapiens
  SIMILAR (3)..(341): 891254mologous to Homo sapiens Neuron-associated protein,accession number B01386,Smith-Waterman Score=507.
  misc_feature (1)...(416): n = a,t,c or g
cgaacccatctctgcggagtcctgaggagtccccttagtctacagacagccagaaacgacgctcgggaaggcaagtaaagcgcagaaaatccaatgaggacctggacttcaaagtggtggatgatgatggggaaaccattgctgttcttggagctggtcgaacatttgccctctcagcctctacactggcctggcaggcggaggagcctccagaagatgatgccaacatcattgagaagatcctggcatctaagactgtccaggaggttcccccaggagaccccccgttcgacttggagctgttttacgttaagtataaaaatttgtacgtctatttaaaggattctctggatttgggttttatatgaataaaactttttttctcttgtgnnnnnnnnnnnnnnnnnnnnnnnnnn

SEQ ID NO: 3102 - DNA, 427 bp, Homo sapiens
  SIMILAR (31)..(111): 601254mologous to Homo sapiens mucin,accession number Z34283,Smith-Waterman Score=64.
atggagtcctcactgccggcccggcctgcgctgcctgctctcggcctccctggtgggatgccgctcctgctctgcatcaacttgccctgcctgctcctcctaccagctcttcccagggtggcctccaagcaggtgttcagccagaatatggctaagtggtgtgtgcagctgtatccaccagcagggcctggcttgaggacccagaaccctggccccacacctaggcggacatctgacaagcgggccaatgaggatgacatctcggacggtagtcactgctacaacgaaagtcagtgccccaccttgcccagccgcagggtggaccctaagcagctcgccccacccagccggtcctgcctgctctgtccctcccaaccctgcaatgggcagatttctggggggcagtctctgacccactgtggcccag

SEQ ID NO: 3103 - DNA, 1695 bp, Homo sapiens
  SIMILAR (817)..(1626): 981254mologous to Escherichia coli parB (aa 1-343),accession number X02954,Smith-Waterman Score=1316.
atgtctgatgcctctgtcaattttgactacaaatctccatccccatttgactgcagcactgatcaagaagagaaaattgaagatgttgctagtcactgtctgcctcagaaggacctgtatactgctgaagaggaagctgctaccctttttcctaggaaaatgacatcccataatgggatggaggacagtggaggaggaggtactggagtgaagaagaaacggaagaaaaaggagccaggagaccaagagggtgcagcaaagggaagcaaggacagagagcccaagccaaagaggaaacgagaaccgaaagagccaaaggaacccagaaaggccaaggagccgaagaaggccaaggagcacaaggagccgaagcaaaaagatggggcaaagaaggcacggaagccccgggaggcctcgggcaccaaggaggccaaagagaagaggagctgcactgactctgcagccaggacgaagtccaggaaggccagcaaggagcaaggaccaaccccagtggagaaaaagaagaaaggaaaaaggaaaagtgaaactacagtggagagtttagagctggatcagggcctgacgaacccatctctgcggagtcctgaggagtccactgagtctacagacagccagagagcttctctgacgggtgtgtttgccctacagaaacgacgctcgggaaggcaagtaaagcgcagaaaatacaatgaggacctggacttcaaagtggtggatgatgatggggaaacaattgctgttcttggagctggtcgaacatctgcactctcagcctctacactggcctggcaggcggaggccacatttattgaagaggtaatacctccgaaccaggtagaaagcgatacctttgttgatcagcataacaacgggcgtgaccaggcatctcttacgccaaaatcattaaaaagtatccgaagcactattaagcatcagcaattttaccctgcaataggtgttagacgggctacagggaaaattgaaattttggatggttcccggcgtcgagcttctgccatcttagagaacgtagggttgcgggttttagtcacggaccaggagatcagcgttcaggaagcgcaaaatttagcgaaagacgttcagacagcattgcagcacagcattcgagaaataggtctgcgtttgatgcgaatgaaaaatgatgggatgagtcagaaggatattgcagccaaagaaaggctgtctcaggcgaaggtcacgcgtgctctccaggcagcgagtgctccggaagaattagtcgcccttttccctgtgcagtcggaattaaccttttcggactacaaaacgctttgtgctgttggcgacgaaatggggaacaagaatttagagtttgatcagcttattcaaaacatatccccggaaataaacgacatcttatccattgaagaaatggccgaagatgaagttaaaaataaaatcctgcgcttgataacaaaggaagcctcactactcacggataaaggttctaaagataagtccgtagttactgaattatggaaatttgaggacaaggatcgctttgcaaggaagcgcgtgaaaggccgtgcattttcttatgagtttaatcgactctcaaaagagttacaggaagaactcgacaggatgattgggcatatccttagaaagagcctcgataaaaagccgaagccttaa

SEQ ID NO: 3104 - DNA, 1195 bp, Homo sapiens
  SIMILAR (158)..(496): 881254mologous to Homo sapiens Neuron-associated protein,accession number B01386,Smith-Waterman Score=472.
tatacggctgcgagaagacgacagaagggaaggcaagtaaagcgcagaaaatacaatgaggacctggacttcaaagtggtggatgatgatggggaaacaattgctgttcttggagctggtcgaacatctgcactctcagcctctacactggcctggcaggcggagcaaggagcaaggaccaaccccagtggagaaaaagaagaaaggaaaaaggaaaagtgaaactacagtggagagtttagagctggatcagggcctgacgaacccatctctgcggagtcctgaggagtccactgagtctacagacagccagagagcttctctgacgggtgtgtttgccctacagaaacgacgctcgggaaggcaagtaaagcgcagaaaatacaatgaggacctggacttcaaagtggtggatgatgatggggaaacaattgctgttcttggagctggtcgaacatctgcactctcagcctctacactggcctggcaggcggagatctgtgcagtatcttctcagtgtgctcaacgcaattctgtgactgctggcccttgtcccagccccagatcacaacctcaggattggttaccaagtggtgagttgcgaaaacatctttacacaggattcgctttagctcaggactggcatgttatcacagctctgctttgcactccataccacaatcccaagcatgggattcaggggcaggaagagcctccagaagatgatgcaaacatcattgagaagatcctggcatctaagactgtccaggagggtgggatgccgctcctgctctgcatcaacttgccctgcctgctcctcctaccagctcttcccagggtggcctccaagcaggtgttcagccagaatatggctaagtggtgtgtgcagctgtatccaccagcagggcctggcttgaggacccagaaccctggccccacacctgtgagctggaacacctgcacagcagtgccacatgctactggggctgagggtgcagacactgtcaggctccccccaggtccttggacccctgttactgggttgaggcacgcatgtctccacagctgtgtgcactccaagcagcctacccctaagtgcaccccagcagcccacacctgtgccctgagcagcccacacctgtgccctgagcagctcacacctgtgtctccagcagccaccacccgtcacttctga

SEQ ID NO: 3105 - DNA, 576 bp, Homo sapiens
  SIMILAR (419)..(3): 321254mologous to Santalum album proline rich protein,accession number AF020261,Smith-Waterman Score=109.
tgtcgtgcgggagctgagcggagtggccttgccaccggaggggaagggctgctggcgttaggcctggttgtgtcgagcggctgaccgtgaggctagaaagaaaaagcgatcctccatgagtgagaacgggagatctgccgaggataacaacctcccttgtggccgaagggcgggggatccccacacgagggctccgcttcgagagacggcgacaaaggaaagttcgtagcgcgttccggaggcccggccacctctgagaagggagacgacgctgctgggtccgctgagcggggcgaccccaggttagtggagacggatgctggcttttgaaggccttattccctgccctggtgaagccgactgcgaggttccacagggcgtgcaggcagtccggagatcgttgcgaaggggggtgcgggctaacttatctgctgccgtttctagatgtgcagctgtggaggccctgtttacaagtgtgcataaggacagtgtattaagggagaactcaagagaatggaaaggtctttcgggtagtggttaaaataaagaagagtaggaactaggtttttaaatttt

SEQ ID NO: 3106 - DNA, 994 bp, Homo sapiens
  SIMILAR (186)..(4): 371254mologous to Homo sapiens p8 protein,accession number AF216972,Smith-Waterman Score=70.
tttcgtagctgagcggagtggccttgccaccggaggggaagggctgctggcgttaggcctggctgggtcgtgcggctgagcgtgaggctagaaagaaaaagcgatcctccaagagtgagaacgggagatctgccgaggataacaacctcccttgtggccgaagggcgggggatccccacacgagggctccgcttttaaaagacggcgacaaaggaaagttcgtagcgcgttccggaggcccggccacctctgagaagggagacgacgctgctgggtccgctgagcggggcgacccgagtcttctcattcacaggttaaggctacctttccagataatccaacagctaaatcaccagtttccaagggcatttgcatcacctatggaaagcatcggatccttatacaccagatgttcttgacagctcatcccgtcattcccccctgcacaaaagttgctataccagcggacaagcaagacaactactgagcttcttttgattgtcaagtagatataatatcactgccagcaaaacagcacaaaaagtgtctcttcacagtatcactaccagttgggactatgctaagtaaatcagcttgcctagatgaggaccccttctattcttgggtagccaggatttgaaggagatactctgacctgtgccagtggtaagtgactaatacttttacacactgaactggtcctggaaactgagatgtcttctttgtaagtgaagaatatacaacataatcttgaagaacggcacagtggtatgggccacaagcatactttatgtgtgtaacggactgaaagacaaattaatcttggtgaaaggatttttcatctcttatttctatttgccagtgttagtcagtgttctgctggcttagattattacctttttctggttccttactgtgttttattctgatgggtcctagaaatccctctcctgaccacttgtcagaatcagaaagtgagaaaaaaaaaaaaaaa

SEQ ID NO: 3107 - DNA, 222 bp, Homo sapiens
  SIMILAR (145)..(219): 881254mologous to Homo sapiens Human secreted protein, SEQ ID NO: 4847,accession number G00766,Smith-Waterman Score=111.
atccagagctcccctccccgccactgggacagccgccctcccagtgccaagcctggtcttggttccttcatctcagcggagcttaagattggggatgagcaaggccccttcctgcggaccctggcctgtgccacgcagggagaagaggctgttatcaaagaacagcttcaagagactcagggattgtgtgaatatgctatctatgtccaagatttgttgtaa

SEQ ID NO: 3108 - DNA, 633 bp, Homo sapiens
  SIMILAR (592)..(633): 921254mologous to Homo sapiens Human transferase TRNSFS- 3,accession number Y79211,Smith-Waterman Score=66.
tgcaggaattcggcacgaggctaaaatggctgaggagagagtcgcgacgagaactcaatttcctgtatctactgagtctcaaaagcgcgcggcagaaaaaagctccggagggtcctattttggagaagcagaactggttgattcatcttcattatatccggaaagattatgaagcctgcaaggctgttatcaaagaacagcttcaagagactcagggattgtgtgaatatgctatctatgtccaagcattgatatttcgcctacaatgaaatatccaagaatccctagaactctttcagacatgtgcagttcttagtcctcacagtgctgataacctcaagcaggtggccagatctttatttcttttgcgaaaacataaagctgtcattgaagtatataatgatgcagctaaactcaaccagaaagattggcctaggagatcagccataacctacgagtttgctacatatacctgaagcagttcaacaaggcacaagaaccagttggcacaatgccctgaattcttaatagggcacgatctgacttatataatgctggggaagatccacttgctggagggagacttggacaagggccattgaagtctacaagaaagcagtggagttctcacca

SEQ ID NO: 3109 - DNA, 422 bp, Homo sapiens
  SIMILAR (174)..(16): 351254mologous to Homo sapiens Human secreted protein sequence encoded by gene 19 SEQ ID NO:161,accession number B24535,Smith-Waterman Score=66.
tttcgtaagttgagttctaaaggttgtaaaagagttaatatgtgcatagggagagaatacgataagggaggggacagaacgggaaaggaagaacgtacaaagatcctggggaagaaagaaacatgggcttcatggaacagggaaacgccagagaggttggagcccagagagtgggggcatcgcagtgagagttcaggctggggagagaggagggaccagaccactcacacggagcctcatcaatgggccatgtaaacgattgtggcctttctctggagagcactgggaagccaatgacagacttttaaaatccaattttaattttatgaagtgctcaccattcacagtcaggaaaaagaattaattaggagatcgttctggctatcttgggtacagaaagcctgtgttgctggaattggaga

SEQ ID NO: 3110 - DNA, 508 bp, Homo sapiens
  SIMILAR (74)..(148): 561254mologous to Neurospora crassa hypothetical protein,accession number X01075,Smith-Waterman Score=64.
ccctgatccatgggctatgcatttcccattttccttggggatggtcatccaggcaaccagaatctccaggagtttgggagctggcactgctttatggatgatttccaccatgctgccacagttaaatccattctcttctgtcttggaattctgagtgatggttccatggagttagttcaacttatcccacagcttctcataaagaggtctctgtagctgctgccctggtgcaccccagcaccgccttcacaagcccgttccgaccacgggaggctcatgttgtcagcattttacttaatggagaaggactgctttcctcttcatatcaggaacacagcaaggacgtcttttctcaccagttccattgaacactgtactagaggtcttagctttactttggacgtgctctcaagttcttttgtgtggcgaagtcaagaccctgaaccggtccaccagcaacagttctttcggagtccctcaaccacaggccctgaaagccgctacgaaa

SEQ ID NO: 3111 - DNA, 1358 bp, Homo sapiens
  SIMILAR (1056)..(949): 411254mologous to Homo sapiens Human secreted protein encoded by gene 22 clone HOGCO71,accession number W74752,Smith-Waterman Score=69.
atgctgacaacatgagcctcccgtggtcggaacgggcttgtgaaggcggtgctggggtgcaccagggcagcagctacaggaagggctccatcctgtgctcaaccctggggatgctggacagctttgaggaggtcacagaaccaggccagtgttcgaactcaggagccgaatgtggagcctgtgctcggctgttcaacccgctagcagcaccaaccagcccgtcaaccccacacctagcctgctctcacaactgcttggggaacttttacaagagacaaattttctgctatgcagccatgatgaaaaaggaaatagatgtccacgtgctgatgtggaacagtttccaagatacatatggctataaagaaggacaagttgaaaaggacatggagcaaccagaagttctgtatgctgatggtgggagtggaaatcagtgcaaccactttggaaaactggcaatatcttctttgaggtttgtaagccacagaaaggcacagggttcctggagctcactggaaccagagaacttcaaaactcaggtactcagagataatccttgcatttctgagcatgctggggacttcctcacaggacaggctgtctgtggctttggtgacaagatcaggctgttgggggctttgcctgctttgacagcatcttcagcacctggaacagtgcctggtgcacagtgggtgctcactaaatattcagaggtacttacatgcacgtccaccttcttccaggaggaggaaaggaaagggaaggaagctttttctccattgcccaaagtctttgatatttgtattagtctgttctcacactgctataaagaactgcccaaggcttctgaggagctgtctggtacggaggcacctcagacccgccaggacgttctgtctgacttgacgtctgacttgacatctgccctttgttctgaggggccaagcccatttgcagctggcagaaaaaccctcccaatctgcagggaggagcttcacagggaccctggagagaatgttgtgcttcagcgagttcacataaaatcatctctgacggtgttgaggaaagtgccagggaactttggtctctcagtcactcatggattcagcagatacttcggagcagctgttatggaccaggtgctcatagctctcacatcactaggtactgaggagaaccctgtcaggaattatgattctcattgtgtagttggggaagctgagacatggaaggctgagctgtctgacgtgacgcagctggggagtggccgagctggaaatggagcccaggtctgtctgactctggagtctgtgcctttgactgatgcagaaattcagaacatccgtgctgaggcgtag

SEQ ID NO: 3112 - DNA, 1164 bp, Homo sapiens
  SIMILAR (182)..(334): 391254mologous to Homo sapiens Human secreted protein, SEQ ID NO: 7554,accession number G03473,Smith-Waterman Score=69.
ttttttttttttttttttcagatataagaggtttattaaggaaaggctcccagagacaccagtaaataaatgggagggtagggaaagggattaagcccagcaagggtgtgatttcatgtaatgtcccagcctcaggccgatctagaggaaagggagtgctagagcataaattactcctcagagaatgtccttccttgaggcaagggagctgggcttttgactcgtagcccagtcagtcagcggccttggcacagaggacggagaactcccagaccctgctggctctccatatgggctgactggctccaataccaggtcacaggtgccagcctttaacctcaaagcacttaattgggattgggcacacagagctggccagagacccttaggggatctgggtggccaccaacactgctggtcatggcacagcacctccattactaccctgcacacccaccggcaccagttacaggtctttcattacattctgctgcaagaggaaaatgagtaatatcctttgacagtcctgggtttggcttttcatcatccaaagatgtacttccttcctccagtgggtagaagtgggtgtccctggaatgcctctgtaagacggagcagccgtccccggttgaagatcacccgggcccatttgaaaactgcggagggcatacttttggctctccctggcctccttagttgagtgattttctgagacaggcacttgcagacagatgccagagagtgagtttgccagagccggccctgtgggatgcccaaaccttttcatagaatcgatgcagggagttccgaaggccatcatcctcttccttctgtgactggcctttcacagcagggtcaagccagaagttctcagcggtccaggagttattttgttctatatttaagttgctggtgtctggatccgcttcagaagaataaggaaaagaatggaattccaaagaactgaaagcctcgctgttggcttcttggctgggtccctgcagaacgtaatctcttatgtctcgcactgatggcaggtccaaagcactgctctcctctgacaggctgcctgaagtggcgtccctggctaccatagtactctcctccaaagcactccagaaaactgaggagaaaagccgccaagccccccgacacactcaccat

SEQ ID NO: 3113 - DNA, 306 bp, Homo sapiens
  SIMILAR (124)..(276): 361254mologous to Homo sapiens capping enzyme 1B,accession number AB009024,Smith-Waterman Score=73.
atgagagaaatttccagaagaatctacaaaggaaggaagatgtcaggggacttgcagacatccctgtctgaagtattcaggctagagactatattcccttggcagaaaatctgtttaaacccctcaagcgtgaccactatggtgtccttaccaagggcatacaaaggagagcaacactgggggtggcagggcaaccagaaggaaggagcccagccccctataactttagcaggcagaaatgccattctagctgactttaaacctaacaagatggccgacatcatcgtctttgactccaaaggatag

SEQ ID NO: 3114 - DNA, 771 bp, Homo sapiens
  SIMILAR (341)..(409): 391254mologous to Homo sapiens Human secreted protein encoded by gene 107,accession number Y36330,Smith-Waterman Score=66.
atggcctatgcagcaggacgaggttgtactaagattggtaatgtagtctcagtcattcctactggatttgagctcactggtaatttattccttgcaatttcaaaggatgcaggcaaagagcagaatgataattgcaagctaggctactcctctatggatagcagctgcttctggtcaccacaccctcctacgctgaagagggcctctcgttttggagggtgcaggaagaaaatgatggatgagatgtggtggcagtttaaatctcaggtcaggtctttttgccttcactggtatgcttggagtaagcctgcacctgtggttcaggggccatctagaaatttgggagtttttatattttctctctttagttctggcttgcctgaaatttctgccttactttccagtgactgtggctgtcctgaactctgtcctcttatttctgaaggcagccctcatgaagctgccatttgtcactctgctactcatatcagtgctttgcaaggttgcacctataatgatgaccccaaaactgccatgtttcatgtgtctcactcatccagaggcaataggctgagagcggcagttccagaaggtgcctatacttctgtcttcatagccagagttgctgaaacttggaaacgaatgcttcctgccctcaaacatcacactccaggttcttcaggttttggactcttggacctacaccagcggtttgccatggctctcgggccttcagccacagactggagattgcactgtcagcttctctaa

SEQ ID NO: 3115 - DNA, 651 bp, Homo sapiens
  SIMILAR (651)..(610): 851254mologous to Homo sapiens Human secreted protein, SEQ ID NO: 4484,accession number G00403,Smith-Waterman Score=70.
tttcgtggaataaggatccagaatgggacggatttggctcctccaggaagaaagcaaaacaaatgcaggtcgcgaacactttacattgcaggaagctgctcttccagtggccgcggctgggtccttccacaccacctctctgtcctaggccttcgtcccggttcagccctcacggattctaggctagcggtcaacaaccgcatccctccggaacctggaaactctaggtccgagatctcggtgaagaatgaaaggcacagcgccgctcaacccaggcttcaggcctgccccgctggatatcagacagttaatcatcagaataaaggagcggttcccacagagttacatcccgcagaagaggtacgggaccgagagagtggggggtcaggcctgaagtcgagattgtgggagtgggggggacactcacaagttgtgtggaagggaaccagcggcaatgggacccggcgagcacttgcccgcagcaaatgcctgcgctgctgcaaaaaaaacaacttttggcgcaaagaatgttgcggccagagagcatccgctgtcgctgacaaaggagtagcaatggcaatgagaaaccgccggcgccacggccgaccgcggcggctcacgcctatgatccttgcagtttgggaggccgag

SEQ ID NO: 3116 - DNA, 567 bp, Homo sapiens
  SIMILAR (97)..(510): 921254mologous to Homo sapiens B-cell lymphoma/leukaemia 11B,accession number AJ404614,Smith-Waterman Score=666.
atgcccagggggcacgacgttgctcctagagcctcagtgtgcccatctgtcctgtgggggatgctcaccagcccccaaccccggggaggacctgcagaggctgaccatgtggaggccgccatcctcgaagaagacgagggtctggagatagaggagccaagtggcctggggctgatggtgggtggccccgaccctgacctgctcacctgtggccagtgtcaaatgaacttccccttgggggacatcctggtttttatagagcacaaaaggaagcagtgtggcggcagcttgggtgcctgctatgacaaggccctggacaaggacagcccgccaccctcctcacgctccgagctcaggaaagtgtccgagccggtggagatcgggatccaagtcacccccgacgaagatgaccacctgctctcacccacgaaaggcatctgtcccaagcaggagaacattgcaggttgtgatactgcagcagcctacagtatctttattttatgtgtgacgaaagatattcttggcctttctgttcagcaacaggacgaatggatttcttcattctag

SEQ ID NO: 3117 - DNA, 345 bp, Homo sapiens
  SIMILAR (27)..(251): 361254mologous to Homo sapiens Human neurofilament-H mutant protein fragment 2,accession number Y20843,Smith-Waterman Score=67.
atgagtgggggtgcagctgatgcagaagttcttggccccttcctgggcccccttcactggagcagcaacctgtcccccagctgctgggaacatcggttggtgaaggctctcagctgcccccttcttcagaggacaccacttgccaacagcagggccatgggcacagagaagacaaggagagtcccggttaaggggctgttcccgaaggacagttttgtctccagcgtcatcggccggccattgctcacttgtgctgtggacgcatgtagggacgttagacaaaagcatggcaccttggaaaagcccaactcggaggtgcccctggtaaccccctgcttcgactaa

SEQ ID NO: 3118 - DNA, 1233 bp, Homo sapiens
  SIMILAR (645)..(187): 211254mologous to Vibrio mimicus OrfU,accession number AF207858,Smith-Waterman Score=91.
atgaatacagggaagctgcagcttagtgtgcacctggaagccttgggccagccccaccatctggggaccagtgatgtcagcttcccaggcctcaccacccacacagctaatgaaggtgtttcaaggctacctctggtgtcctcaaacgaccccctttacaggcccattgtcactgccaccaccccgatacatgggtacatgtggtgtaccaatatggagatgaatactctgaaggtcatggcatttgttgcccaaaattttttagacaacttccctagcagtgacaccctgtccttcattgcaaggatattcctgctgttccagatgatgactgtatacccactcttaggctacctggctcgtgtccagcttttgggccatatcttcggtgacatttatcctaggcgcctccagattggccgcttgcttaaagtttttcgtgtctttttctggactttgtcctccggtattttggggaattggcatacaggtcgaggggagtgtttcgcccatgggtttgcactccttgtaaacgcactacaagtcgcccgaaatcttgccaacattcgcgccgctcgtacgcgcgttcggaccatccgaacgtctgcaagtaccgttttcttggccccatacacacagggagatatacaaaagacaaaaatttgcatagatgccgtttcttccaaggtcgcgtccacttcgaaagttctaactgtgtctttcacactattgcgatcgcctgcgcccctggaacgtcatttggcaaattcccaggaaccgttgttttatgtagtccacggacaagtctttagcctattgtttctagagatcgtctataatgagtataatattaagttaatatggcctttctgtatagagcccacaaacatcgtgaatgtgaatcatgtcattcagagggttagtgaccatgcctctgccatgaacaagagaattcattactacagccggctcaccactcctgcagacaaggcactgtatacatacgtggcccgggacgcaatcggctgtcgtagtcgaatagccctgcgtaacagtccgccgaggcacgtcgtcgtcgtatgtcgctccgtgtggatggcccgtcgatttagctacttgtgttacgacgcgacgaactgcgtcgtcgcaagacgtccttcttgccacattaatgatgatcataaacacgaggttcaccctaggacgacttgcatgcatcgaccatatagatga

SEQ ID NO: 3119 - DNA, 773 bp, Homo sapiens
tttcgtgggaatctttatcttctcgtctagttctccgaggttgaaggctcggcctgctcagagaaggaaactgaggtccaccgagttggagaaacctactcaacaccaggactaacttcttcagtgcttagagtgtgagaaaaatggcaaatatgaatagtgattctaggcatcttggcacctctgaggtagatcatgaaagagatcctggacctatgaatatccagtttgagccatcggatctaagatccaaaaggcctttctgtatagagcccacaaacatcgtgaatgtgaatcatgtcattcagagggttagtgaccatgcctctgccatgaacaagagaattcattactacagccggctcaccactcctgcagacaaggcactgattaggaacttcatctttgtatccatagggtttagcaagttgccacagaaagaggttcttgccataaaactcatgcctgctgttggtcgctctagaggatccccctggaagaaaaggcaacagcagcaaactcacattgtgcctacagaacttcctcccatggttccaattcctcgttacatacaacaatcatctgcagaaacacgcaactctgggtctgacagtgtaacaccaccattcattcccagtgtgatttcattgactctgactcacgcttggctagatcttccagcagctcagtacaagaaggatgcgtccttgcatgtggatctggctgagggaccttcaggcccttctcacactgtacgtgaagttgagcagtga

SEQ ID NO: 3120 - DNA, 417 bp, Homo sapiens
  SIMILAR (136)..(225): 421254mologous to Caenorhabditis elegans glycine- rich,accession number U64837,Smith-Waterman Score=68.
atgaggaatctctggatgcaacttcagctgcattgttactgtgttttcacaggaggcgatcgagttcggatgacagcaaatcatgaaagctacctcctcatggcaagcacccagaatgatatggaagactgggtgaagtcaatccgccgagtcatatggggacctttcggaggaggatgtggatcatccaattgtccagtacatttacgctgcacacactacccgctgcccattagtagccatcttggtgatcagatagactgtcaaagtatcacagtgcttgtgctcaagaaagccttgttttacttaataattgccccaaagggcaagagtagtgatgctggcaatttggatatgccaaagagaagtcataaaatgtttcacttacgtgaaaaggtgatatctgagatattgtga

SEQ ID NO: 3121 - DNA, 525 bp, Homo sapiens
  SIMILAR (3)..(98): 751254mologous to Homo sapiens PAR3,accession number AF252293,Smith-Waterman Score=101.
atggaggtgatgacatcagtgccagctccatgcatacccagagcccggagagatttactagtgctagtgagcttggcaccaacaatgtctcagccttctcagtctgatcaagcagcaagtgaaattgaggtcacatcttcagtacttcatgcaagcagccagaaggggttgtccagccagcacctgggctttggtgctcctcaagcaggtggaggaagtttcaggcacctggctcctcagcgaaaagaggttttggaggaatattttaagtatgatcctgaacacaaattgatcttcagatttgttcgtactctgtttaaagccatgaggctaacagctgagtttgcaatcgaaataacacatggtggccgggatgtagagagagccacaggacttgtgaataaaatccacaggcaaggatgtggcgattccttttgcaatattggagggaatgccaaaccctatgtttgctgtggaaaagagtatgttagttcctcaaaacatcaaaatggtattgccatatga

SEQ ID NO: 3122 - DNA, 679 bp, Homo sapiens
  SIMILAR (490)..(558): 691254mologous to Homo sapiens Human secreted protein, SEQ ID NO: 5263,accession number G01182,Smith-Waterman Score=75.
cagagtgctgattggtgcgtttacaatcctttagctagacacagtgctgatggtcatttacaatcctttagctagacacagagtgctgattggtgtgtttacaatcctttagctagacacagagcactgattggtgcatttttacagagtgctgattggtgtgtttacaatcctttagctggaaacagagtgctgattggtgcgtttacaatcctttacctagacacagagcgctgattggtgcattgttatgagagtgctgcttggtgcatttacaattcctttagctagacacagagcgctgattggtgcgtttttacagagtgctgattggtatatttacaatcctttagctagacacagagcgctgattggtgcatttttacagagtgctgattggtgcatttacagtcctttagctacacacagagcgctaattggtgcgtttttacagagtgctgattggtgcatttgcagtcctctagctagacagaaaagttctccaagtccccacttgacccagaaagtccagctggcttcatctctcaatccaccctctaaacaggacacctcaactgctgctgggaatttggcgatgacggctctagctacttcctgctggataggggtgaagaaggggccctgcagttgtagtgtcctccagaggggaactctttag

SEQ ID NO: 3123 - DNA, 1185 bp, Homo sapiens
  SIMILAR (943)..(1023): 481254mologous to Homo sapiens ral guanine nucleotide dissociation stimulator,accession number AF295780,Smith-Waterman Score=79.
atgaagctgtggaccttcgcggtgagtgttacagctcttaagagtgctgactggtgcatttacaatcctttagctagacacagagcactgattggtgcatttttacagagtgctgattggtgcatttacaatcctttagctagacacagagcgctgattgaacaactaagactttggtacagcccattagctctccctgtggataccgtggactacacaatgccgtgggtgtctgtgagtcaagccattctgactgctgctttgacactgctttccactgtggtgaccacacccacctcatctttggtgattaaggacagcccatgttccctgccaccccaggattcaattatcctcattttacttaaagatcccagtccagtggctgcagttcctgctgtaacattttgcctactgagagcacaagctcaaagctcttccaggatactgggctcctctcacaatattctttctcatgatcggttgtgaggacaagatccaggcagatcacactggactcccagcactgaatctggctcgaggggacatcaaatttgactgggtcatggggctcaggagcatcaactctcaaaaaatagcagtacaggaagaggcgatggccctaaacagcatttccaggcagatcccatgttaatcatttatggggagacagagagaaagaggagacactccaggaagacctgcaggtgggagtaccaggttgaaaccaaggacacattcctggaggagctgctgtttgagccagctctgagaacaggtggggacaggactggagaggaggagggggtcccctatgagcaaagactggccaccaccccatctaacacccccacagggcccctgtggcatccctgtccagtccctgtcaccacccagtttttccctctggacccaggaattcaaagtaagcaaggaggtccactgctccagttgactgcaaataattacaaccttgagcccaagcagcactttgggtcctggtttgggaccatgaagcggctcggcagccagaaggggttgtccagccagcacctgggctttggccctcctcaagaaggtggaggaagtttcaggcacctggctcctcaggtgtctgccatccaggtgctcttcaggcctgcccagaagagctctcttgatccagctagaactggccagaactga

SEQ ID NO: 3124 - DNA, 729 bp, Homo sapiens
  SIMILAR (308)..(153): 401254mologous to Mus musculus T2,accession number X67863,Smith-Waterman Score=93.
ctccgcaattcccgggtcgacgatttcgtcttgtttacagtgacaacaaggtggtattggagtgttacagggtcacagagaagaccttcaattatcaattagaggttttaaatttaaatttaccctggcttttaaaggaacagggtacactgttttctctttactgcttctctctctgactctgtctctctctttctctctttgactccctctttgtctctctgcctctctctctttcctctgctgggctttccctgcctctgccagccacttatgccgctgttctcccctctccttgcccttcccctaggggaggaaccggcaggagtagtgctgggattacaggcgtgagccacagcgcccggcccttttttttttttttttttgtggttttaaggagagagtttaataggcagaaagaaagggagaagacggaagaagctcccccatattattttatttatttatttatttttttcttttttctttttaccaggaagtaagtaagccctgagaatattgggttggggtaaggttgggatggggagctttctgtttagagggaactaccagtggaaaggccctttgttaggagcattcttagtgtttccagctcctgaagccccagtggccgtgtgttacagtgtgctctttcagttttgtggtctacaggtggcttgtgccaatcagctgagttacactctctgccttatcgcaaggatagagggc

SEQ ID NO: 3125 - DNA, 552 bp, Homo sapiens
  SIMILAR (52)..(402): 291254mologous to Murine leukemia virus gag polyprotein,accession number U13766,Smith-Waterman Score=94.
atgaggaagaccatttctggcctagcttattccccacccacccacttcctgtgggaaagcagggcaattctgaaacccatatgggtgccgtcagctgggtccctgagggtacagccacccagtggcctgaaatacccacccaggcctgctacacgagagaagcagctttcagtccctccacctggcctctcaggacttcttccaaaccaggtctcaaaatgccacttggtgttcctgctcagttgtggtatcagcgatactgcggatccaggccctgggccaagaaagcagcatggctcagcttctggttctgaagctgtgtctttgtctctgaaacttccagaagcccattccttccaggacaccctggggaaccgccaaggtgcacaagacccacctgcctactcacaaagacccaatggtgtgggagtttggagccattccttttccctactgaggcctgcccacacctactccattcttgtcaaactgcagggggtagcgaacaagttccttataagtgagaaaataggcagcatgggagaaaaatga

SEQ ID NO: 3126 - DNA, 487 bp, Homo sapiens
  SIMILAR (379)..(278): 551254mologous to Homo sapiens Amino acid sequence of a human secreted protein,accession number Y10869,Smith-Waterman Score=96.
tcattctccaagtccgtgtgtgatccgatctttccagcacactagggcaagaacctgggatacagagagccctctatccttgcgataaggcagagagtgtaactcagctgattggcacaagccacgtctttgttcactgtcctccaaacactgtgctccaaaacactggtcaccttgctgttcttcaaattcactaagaatgctcctaacaaagggcctttccactggtagttccctcttccctccactattgtcctgtgaccctgccaaatccccctctggctggtatctgtggcaggtggggacttcctcttttggttttggagcccccctccttctgtctctgtatgggggagcttcttccgtcttctccctttctttctgcctattaaactctctcctccggtagtaaggaaaatattcagaactcccctttcctttcttctcaggggaagaaagagtagctccactcctgccggttcctccc

SEQ ID NO: 3127 - DNA, 581 bp, Homo sapiens
  SIMILAR (148)..(234): 431254mologous to Mus musculus Q300 protein (AA 1- 77),accession number X52164,Smith-Waterman Score=62.
tacacttagtttcttgggctgagtgggatttgcgtggctgcagtctgggccccgggcagtcactagcctagaggcttggcagatatgctgccgcaaattgcaagaattacgccttttcacctcctctgctctcctcccggagccggtgcccaccctctttttcacaaaccgcagggctggggagagggacttaacctttggcctgcctgcctggctgtttggctctgcgcttgccgatattggtctctttctcatctaatggtctttcctatgtctctgccagccacctatgctgctgttttctcctctgcttccctctcccctaggggaggaaccggcaggagtggaactactgtttctttccctgagaagaaagaaaaggggagttctgaatatttttcttactactggaggtttgtgtgaggttcaacccccccaacaatagggatttctcacctctaagtcatcctaaggaattctttaccacccctgcggtttttctctctttggtatgtcctaaccaaggaatgctttaccatcccggctttttccttagtcccgaccaccaaggaaatacttta

SEQ ID NO: 3128 - DNA, 635 bp, Homo sapiens
  SIMILAR (133)..(2): 481254mologous to Homo sapiens putative DNA binding protein= son,accession number S47241,Smith-Waterman Score=68.
  misc_feature (1)...(635): n = a,t,c or g
cgctccgcaattcccgggtcgacgatttcgtcccagcgtctctagatctcgtatttgaatttgtggcgcttggtgtccgcgagttgccgaatgaagctgagcgtctcagtggaaccagggatctcagggaggggaaggtataaaattttcaaatggaggagtatacctgaacctaatcatggatgtgattttatgtaagtaatatgtgagatacagataagctgattctaaaacttacaagaatggcaaagaaacaagaagagcttaaactgcaatcatcaacagagaagctttctgcaaccaaagtgaagactgaagccttaggctatggcagaagttgggcgcctgaagtacacgtggaaatatgccaactgaacattggactaccacgtcaannnnnnnnnnnnnnnnnnnnnnnnnnnnnnnnnnnnnnnnnnnnnnnnnnnnnnnnntagcaggagcgcctgcccctggctcagcgcccggtgccaacagaacacctttcaggatccacagcaacgcagacaacctcctctttaacttctgacatgaggggaagcagcctgaagcccttaccagaagtagatgctggtgccaagcctcttgtacagcctgcagaactgtgtgccaaataa

SEQ ID NO: 3129 - DNA, 524 bp, Homo sapiens
  SIMILAR (353)..(192): 411254mologous to Homo sapiens Human normal pancreas tissue derived protein 5,accession number Y59897,Smith-Waterman Score=89.
cggtgtgaacgtgtgtccgcagcgtgatgggcaaccaggtggagaaattgacccacctaagttacaaggaagttcccacggccgaacccgactggcgtggaccgggacgacgggccccgcattggggtctcctacattttctccaatgacgatgaggacgtggagccgcagccgccgcctcaggggccagatggcggcggcttgcccgacggtggggacgggctgccgccgccccagccgcagctcctacgatccgcggctgcacgaggtggaatgctccgtgttctaccgggacgaatgcatctaccagaagagcttcgcgccgggctcggcggcgctgagtacctacacgcccgagaacctgcctcaacaagtgcaagccgggcgatctggtggagttcgtgtcgcaggctcagtacccgcactgggccgtatatgtgggtaacttccaggtggtgcacctgcaccggctggaggtgattaacagcttcctgactgacgccagcctacggcgtcgcggccgc

SEQ ID NO: 3130 - DNA, 816 bp, Homo sapiens
  SIMILAR (163)..(444): 321254mologous to Arabidopsis thaliana contains similarity to HepA-related protein Harp~gene_id:MXM12.5,accession number AB005249,Smith-Waterman Score=149.
atggacaaagtgaagaatgttgggggccatgtccgtctgatcacaaaggagtccaggccacgggatcctttcacaaaaaaacttcttgaagatggagcctgtgtcccatttctaaatccatacacagtccaggcagatctcactgtgaagccctctacatccaaaggctatttgcaagctgtggataatgaaggaaatccactttgccttcgctgtcagcaacccacttgccagactaagcaagcatgtaaagcgaactcttgggattcacggttttgctctctgaaatgtcaggaagagttttggattcgatctaataacagttacctgagagccaaagtatttgaaactgaacatggtgtgtgtcagctctgtaatgtgaacgcacaagaactctttttacgtctgagagatgcccctaaaagtcagaggaagaatcttctgtatgctacctggacttcaaagctcccattagaacaggaacaaggaagtaaagagaaggtagaaagatcaattctagagaaattacttaaaaattggctcccccaaagcaatgtcacagtatcagtcaatgaggactgtctgccaatggtaccacctggagaccacacccagcagcctggatacagcatggaaaaggcttcaggcttttttgatcctgaggttggatccattcaagattggattttttcaacagcttatgatgcatggactgtgggacaagggaacttaaactatatttataagaacaaagacagatcagcgacacagaagattaacaaggatatccaggacttgaacacagtgcagacctaa

SEQ ID NO: 3131 - DNA, 348 bp, Homo sapiens
  SIMILAR (212)..(60): 491254mologous to Homo sapiens calcium channel alpha12.2 subunit,accession number AF238295,Smith-Waterman Score=89.
atggtgaggataaagcatgcagaagaatgtggaaggactagactggctgagtcttctggcctccatctttctcccatgatggatgcttccagccctcgaacatcagactccaagttcttcagcttttggactcttgaacttacaccagtggtttgccagaggctctcaggtcttcgaccacagactgaaggctacattgtcggcttccctacttttgagatttggggactcagactggcttccctgctcctcagcttggggatagcctattttgggacttcaccttgtgatcgtgtgagtcaatactccttaataaactacgcttcatgtatacatatatcctattag

SEQ ID NO: 3132 - DNA, 353 bp, Homo sapiens
  SIMILAR (198)..(76): 341254mologous to Homo sapiens colorectal tumor suppressor,accession number M32290,Smith-Waterman Score=62.
catgtatgaatcacttggcaaaacctgatgttaaaagaaatgcaaagagtggtaaagccaagaagcccttgtctgaccctgcctcaagtgggagagacgatgagagggtttacctcctaaggggcaggactaataaagagaaagagaggtttgaagatacagggaagaagggtttgaccagtgggcaaggaacccaggaagcaggagagaggtggactaactgcaaacaggacagggacacctgtcccctaaggcagaaggaaatagtaggactccaagttcttcagcttttggactcttggacttacaccagtgatttgccagtggctcttgggccttcagccacagactga

SEQ ID NO: 3133 - DNA, 405 bp, Homo sapiens; identical to SEQ ID NO: 285
  SIMILAR (252)..(338): 441254mologous to Mus musculus envelope protein,accession number M21800,Smith-Waterman Score=59.

SEQ ID NO: 3134 - DNA, 950 bp, Homo sapiens
  SIMILAR (2)..(178): 1001254mologous to Homo sapiens Protein sequence encoded by clone p199-7 (PL mutet.rsT4),accession number P93369,Smith-Waterman Score=321.
ttatgccggtactgccgggcctcttgcgggatatcgtccattccgacagcatcgccagtcactatggcgtgctgctagcgctatatgcgttgatgcaatttctatgcgcacccgttctcggagcactgtccgaccgctttggccgccgcccagtcctgctcgcttcgctacttggagccaatgatcacaaggtgaagtccccacaataggctgtctgcaagctaaggagcaaggaagccagtctgagttccaaaacctcaagagcagggaagccaactgtgcagccttcagtctatggccaaaggcccgagagcccctggcaaactactggtgtaactccaagagtccaaaagttgaagaacttggagtctgatgttcgagggcaggaagcatccagtgttctccagggccgatgtatgtttggagatggatttccccctctcacacttcaggcactcagttttttggcagtctcatggagttttcagtggcaagccgcttatttcaaatggtctgtgaattcttttggtttttctgatatgttcctgggatttggaaaggattccgtgatggttaatattgagtgtcaacttgattggattgaaggatgcaaagtattgttcctgggtgtgtctatgcttcctgacctcgaatatcagactccaagttctttagcttttggactcttggacctttggccacagacggaaggctgcacttttgaagttttgggacttggactggcttccttgctcctcagcttacagatggcctattgtgggacttcaccttgtgattgtttaccagaagttaggtttatcactgttgcaaagccactgagttctgatccagaatctcacaaactggtacatgcccacgcagatctagcctgtccagaagatgaacaggaggaaaaacgcaatgccaagaaggaagcaaccgggtcctaa

SEQ ID NO: 3135 - DNA, 810 bp, Homo sapiens
  SIMILAR (354)..(404): 641254mologous to Lycopersicon esculentum extensin (class II),accession number X55687,Smith-Waterman Score=68.
tcacacatccttgagtgacttcccatatgtgtgtggggctgaagcggcttctttccgctgaacttttatttccatttcagcctcgtggcttctcttattcaggtccaaggcccctggcctctcaggtggatggaggctgttctcatctggggctgtctcttgattaaggctgtcacctgtttgtatagggaccatgtttcccaatgcactttgagtgcagtttaggaggtatcctttggatgctgaagtgttgggattttgaggacatgcggatgatttatgagaatagaggggcagagtttgtgaagtctagggttttttgtccagtgggtttcaaatttgttggctgtttaaagaccctgtctcctcccccaccctccccttccttttcccatcaaatgcctacctactgaggcgccttctctttttattcttgagccaatgagatatcagtgtgtttattaataaggattgcaatagtatagtgcttaatatgtgccaggcatagtgctaagggtttacatacgttatcccttttaatccagaaaacagcctttgattaggtattgttgtctccattttatagatgaggaaactgaggcagtatgactgaggccgagagcagtggttaagacagactttgggatcaaatcaccctaggtgcgggcaggtttctaggctgctctaagcttctaccttgaaggcagttgggtctgataatagtaccttcttcctggggtggttgtgaggatataacgaggtaatgcatgtaagcatttagtaccatgcctggcacatagtaagcactca

SEQ ID NO: 3136 - DNA, 1449 bp, Homo sapiens
  SIMILAR (1)..(681): 1001254mologous to Homo sapiens 3-hydroxyacyl-CoA dehydrogenase,accession number AF001902,Smith-Waterman Score=1165.
gccggcgatgaatttgtggagaagaccctgagcaccatagcgaccagcacggatgcagcctccgttgtccacagcacagacttggtggtggaagccatcgtggagaatctgaaggtgaaaaacgagctcttcaaaaggctggacaagtttgctgctgaacatacaatctttgccagcaacacttcctccttgcagattacaagcatagctaatgccaccaccagacaagaccgattcgctggcctccatttcttcaacccagtgcctgtcatgaaacttgtggaggtcattaaaacaccaatgaccagccagaagacatttgaatctttggtagactttagcaaagccctaggaaagcatcctgtttcttgcaaggacactcctgggtttattgtgaaccgcctcctggttccatacctcatggaagcaatcaggctgtatgaacgaggtgacgcatccaaagaagacattgacactgctatgaaattaggagccggttaccccatgggcccatttgagcttctagattatgtcggactggatactacgaagttcatcgtggatgggtggcatgaaatggatgcagagaacccattacatcagcccagcccatccttaaataagctggtagcagagaacaagttcggcaagaagactggagaaggattttacaaatacaaagtccccataggatgcaggcccttgtcctggaaatggcagggttctttcttgaccactgaattccaggaaagatgtaactcagcaatgcaactatcagactgccgggatgagaagaatgggcataaggatggaacctatgccatagggttgctggggaccaagcgaagtaggtttcaggtgttgagcacactgcctagcatctataggccaattgtgaaggaagccccagtaacctatgttcatcgggttacagatgacagccctgaacatgtgacagcagcagggagtaggcttaagattcagagcaggcctgagtcttggaaaagcttcactggggggctgcggctgaagctgggccaggccaggcgagccccggcacagcccaacccaccagtgaagtctgcgcaatcaaagccagcaattactgctctccggctgcggctgggcttcaaagggatgaagataagaagctgctctacctcatcaggtgcgctgcgggatgtgggagacgtatgtgcagagccgggcgagtgcagggcagacgccctgaagcagcgtaacagaactgaaatctgtcccctccaccccacaatggggctgctacagaacgagaggaggcaacacatgcagaagcatctgttaaagcctccggaatgtggcaggtggtccatacaggttgggaccatttctgctgttccaacttcacacgacacattcggggcagcaagcaagattcatactattacagaacttctggtagaaaattaa

SEQ ID NO: 3137 - DNA, 738 bp, Homo sapiens
  SIMILAR (729)..(688): 421254mologous to Homo sapiens Fragment of human secreted protein encoded by gene 77,accession number Y41533,Smith-Waterman Score=43.
atggctaaaagcagctatggaaaaaagtcaggaaagcaaaagaaagaactgcatatggaagccgagggctctctctggagttccataaatggcatcaatctgactctctgggggcatgccggtgaactgacagctaggagttggaggtgtgccttttcaggtatcctccaaactgccagaggacaattagggaatgtgcaagcctcctgggagtccgcactgtcttctaggcttgttctcagctgccagtcagtcaatgacgaaagtgatattcagacaagtcaggcagctgggtctgcagtcgggctccaaatgttgccaccccgaatccagtgccccacctgggatacaaagctactaccagacccagtcacaaatgctcagaggctgtcctctggaagaaagggccaaggagacaagtctatggtgaagataagaagctgctctacctcatcaggtgcgctgcgggatgtgggagacgtatgtgcagagccgggcgagtgcagggcagacgccctgaagcagcgtaacagaactgaaatctgtcccctccaccccacaatggggctgctacagaacgagaggaggcaacacatgcagaagcatctgttaaagcctccggaatgtggcaggtggtccatacaggttgggaccatttctgctgttccaacttcacacgacacattcggggcagcaagcaagattcatactattacagaacttctggtagaaaattaa

SEQ ID NO: 3138 - DNA, 324 bp, Homo sapiens
  SIMILAR (8)..(124): 401254mologous to Caenorhabditis elegans Similarity to C.elegans reverse transcriptases,accession number Z69383,Smith- Waterman Score=65.
atggtccctatacaaacaggtgacagccttaatcaagagacagccccagatgagaacagcctccatccacctgagaggccaggtaaggccactgctggtcaacctgaaagggaagggcgcattcagatggcaacagcagccaggactcttctgagaatagggcccaccttctgcagggatgtggataaggagagtccaggcccaagagaaggggccttggacctgaataagagaagccacgaggctgaaatggaaataaaagttcagcggaaagaagccgcttcagccccacacacatatgggaagtcactcaaggatgtgtga

SEQ ID NO: 3139 - DNA, 1009 bp, Homo sapiens
  SIMILAR (955)..(1008): 721254mologous to Homo sapiens Human secreted protein, SEQ ID NO: 6812,accession number G02731,Smith-Waterman Score=73.
atggctgctctacaactctggtccattctaggacttctgttggcaactccccttgctccaggtactctagcctatgctggaaaactgctgttaccctctcctctgcattcccaatctaatggattacacttggtgggggttggaagaaccgaattccgagtacctactgctgagatgctttccacagtttgggctgtggaggcccctacccactcaaaagcaggtgatccaatctcttttcgaagactaaaatacctgtgtggccacactgccgagttccacgaatggctgacttcatatgtgcctggatttaaacggcatcctgctcttgattgttggtctggaacagcgtctgcaacattttctggtgtctttctctcacaacatctccaagcctttccccactttaactttaagatgcttcctgccctcaaacatcagactccaggctcttgtgtttttggactcttggacttacaccagtggtttaccaggggctcagctttggccaaagaatgaaggctgcattgtcagcttccctacttttgaggttttgggacttgggctgaaccactactggcttcctttcttctcaacttatagacagcctatcgtgggactttacgttgtgctcattgaattattcttagtttccgggaaccactccatctttgcctttaccatagttcaatccccagagcctaggagagataaatggttttgtgggccaggtccagggcaccctgctgtctgcagcctctgccttggtgcctgcattcaagctgctccagctatggctaaaaggggccaaggtacagctcaggctattgcatcagaggtcaagcccaagccttggcagcttccacgttgtgttgagcctgtgggtgcacagaagtcaagaattgaggtgtgggaactctgcctagatttcaaagaatgtaaggaaacacctgatgtccagacagaagtttgctgcagggacaatgccctcatggagaacctctgctag

SEQ ID NO: 3140 - DNA, 447 bp, Homo sapiens
atgaagcacaaggccagagacctgacagaagtaatggtttccagcaaggtgatgtggcaaccgctaaaaaccaaactaaaagatgtgcatgtcagaagtctggctgtcctcatagatgacaagagattagcattcagtacttctggtatagtttctgagaattctgagaatttagatactgcctggctccaagtcctgcaggttttggactcttgggcttacaccagtggtttgccaaggttgtcaggcctttggccacaaactgaaggatgcactgttggcttccctacttttaaggtttcgggacttggactgatccatcactggctttctgctcctcagctttcgatgtctgtctgggactgtgatctccggaatgggaaagaagaagcgaacgtgagcgaacaacaacatacaaaacgagaggaagagacgcacgatgactga

SEQ ID NO: 3141 - DNA, 570 bp, Homo sapiens
  SIMILAR (313)..(519): 291254mologous to Dromococcyx phasianellus cytochrome b,accession number AF072628,Smith-Waterman Score=73.
atggaggtttgggtggtgcacctggttgcccagtttgtgtggaaagagaatggcctgagggtagaatatgcacagactcttacttgggctgtggcaaatagccaccttttgatggtcctgggaggaggattggaagataggagaccaggggtagaggcctgtggatcaacatgggaatggccatgcagtgtgaaggtctttcccttgcttattaatgcccacaagaaagcatccaccatgggagatgcctatttgtctcaggtcttgagcttcagatcctatccccttcctggttctgcgccagagaaacgggtactgggtagaaagctgcagtccatactggctatactgctagttgcccacatcttcactgaagaaaccactcgagatggcttggcaggagccacgctctgtgccaggtgttgggcctgggtagtgcacagacagatggacaatggagtaatttacaggtcagtaaacactttcctggagatgccggagcagtttcattttggtacagataatatgggatttgttgtgactcagaatatcagtccagagtgggactga

SEQ ID NO: 3142 - DNA, 839 bp, Homo sapiens
  SIMILAR (298)..(624): 241254mologous to Ovis aries nuclear respiratory factor- 1,accession number AF233354,Smith-Waterman Score=76.
atggatgctctaagtagttgtgtcactcccaatgcctcttcctatgcacactgcaactacttccagaatccttcaatgcagtcctcctatccagttgaatttttgccttccaattggccctgcagtactactgatgaaaatacaaagacagaagtaaacctagaggctgtctttcagatagttgatgagttgcattcctcccctaaattggagatggtaaaggtggagcctgttgagaatcagtgcccaacatctccgtcttacagaggccaacacattttagctaattctaacaacagcaatccatgttctgcaagtcaggctagccagctggagccacttactcctgtaggctcagatattatgtcttttgtggttggaacagaacaagcagttgcctgctctctaccacagtcacctgagtacatctataccatccacacagctcagcctgttgaaaatagcacaatacaggaatctgcagccatccagcaagctcatgtcaaactgaaggagcacctaaatcataatccatctccatcttcagtagtatttgtgcaggaagggccaccattcagcacacaccaggtggatgccaacataaaatgccagaccagttcacgtgagaatatcttgccgtcagaacagatgggattcctcatttcagaaatggggcctgctagcaagcctagtgaagacacaggtttagccactccagccagatacagagagcacagaagcaactcacaacaaggaaagtcccctgatctttcatcttgttggtggacgtggcctgcaagcaggagcgctttccaaaggaggaagaattaaaagagtga

SEQ ID NO: 3143 - DNA, 744 bp, Homo sapiens
atgaccctcttcctgaatttgcctgtttgggcctgcagcctggtgactctttgtgtgatcccaacagctgtcatagagatgggttggacttttactgagacctgggtcctaggcccagcactgccaccagctagtggcgcaatgccccataaagaggccacttattctctctggcctctactattggtaaatgggtataataatatccacgctgccaatcctgagaaatttcaggaagacccactgacctattatttgtgtcaggcactttattcctcacaacaatgctggaagattggtataactattctcaaattacagatgaggaaactgaggtctggggatctgtctgtgtcggagatccccaacccccggggcatggacaggcttcctgagggctcctcagaaacatgtgttagaaaagaaaagctttccggtctgtccagtctcctccatgaccacagtttctcacccacataccattgtctggcttggaatggatcctggaaggaggactcaagagaaaccatagaaacagacaacaggaagttctcccagtccagggcccaatcctccatagaatgttcgggtattattagtacttcagccaaggctctaatgcagtatcaagatgcagatttgcttctgactgttagtacctgttataagaggaaaggaggcaaaagtgtgaaagagaaatggttggatcagtggtctgagaaagaggataaagtagtcatgtga

SEQ ID NO: 3144 - DNA, 396 bp, Homo sapiens
  SIMILAR (94)..(132): 921254mologous to Homo sapiens Human secreted protein, SEQ ID NO: 5480,accession number G01399,Smith-Waterman Score=61.
atgacgtcaggcccgtgcaggccgggagtggcgtgctgggcgtgcgcggctgcggtacggcgtgttggtcccagcggttcagctgaggccggaatgttaccggctgttggatctgcggatgaggaggaggatctgcggaggaggattgtcctgaattggttcccatggagacgaccaaagcgaggaggaggaaaagtctggcctcggcgccaagatcccagtcacaattatcaccgggtatttagccgggaaggaggaaggggaaaagagcaggaaggagcaagagagaaagcagggcagactcatcccttttatcagaaacctgctccattaataactaactcccatgataacaccattaatccattaatgaggacagagcccaataacccttaa

SEQ ID NO: 3145 - DNA, 514 bp, Homo sapiens
  SIMILAR (291)..(512): 571254mologous to Homo sapiens Human secreted protein, SEQ ID NO: 5480,accession number G01399,Smith-Waterman Score=172.
gctgcggtacggcgtgttggtcccagcttttcagctggggtagggacgtgctgtaggccggaatgttaccggctgttggatctgtggatgaggaagaggatcctgcggaggaggattgtcctgaattggttcccattgagacgacgcaaagcgaggcaggaggaaaagtctggcctcggcgccaagatcccagtcacaattatcaccgggtatttaggtgctgggaagacaacacttctgdaactatattttgacagagcaacatagtaaaagagtagcggtcattttaacatgaatttggggaaggaagtgccctggagaaatccttagctgtcagccaaggtggagagctctaatgaagagtggcctggaaccttagaaaccgggttgcctcctgcttgtttcagtgaaggacaatggccttagagctattgagaatttgatgcaaaagaaggggaaattttgattacatactgttagagaccactggatttgcagacccaggtgcagtggg

SEQ ID NO: 3146 - DNA, 582 bp, Homo sapiens
  SIMILAR (185)..(337): 981254mologous to Homo sapiens COBW-like protein,accession number AF257330,Smith-Waterman Score=257.
cccagctgttcagccccatcattcctcaggcctcagcttcaaggtccggtcagcatgctgtgtgcgctcacaagcttctagcttttttctcttgtacagtgcttcccacagctggaatcaacacatgcttaatgccactgtttgccagcggttcagctgaggtagggacgtgctgtaggccggaatgttaccggctgttggatctgcggatgaggaggaggatcctgcggaggaggattgtcctgaattggttcccattgagacgacgcaaagcgaggaggaggaaaagtctggcctcggcgccaagatcccagtcacaattatcaccgggtacttagttattcagaggctgctaaactgagaagaagaacaaatttcttgtccaaagcaatgtatttcaaacgtgccgctcgggcctttcccgtattgctcactggtgctgggaagacaacacttctgaactatattttgacagagcaacatagtaaaagagtagcggtcattttaaatgaatttggggaaggaagtgcgctggagaaatccttagctgtcagccaaggtggagagctctatgaagagtgg

SEQ ID NO: 3147 - DNA, 1680 bp, Homo sapiens
  SIMILAR (1033)..(1251): 301254mologous to Arabidopsis thaliana putative protein,accession number AL049876,Smith-Waterman Score=96.
atggtggaaaaaggacctggagagccaggaatgagaggaagagcacagagaatgagaaaaagccggcaaagtgatggaactcaaaggtggaaggtggctgattggctctgtgagagaggaaagtgtatccattgcagaggccgaacagtgcaagtgattaggttggcccgcactctaaatcctggtcaacattcctggcatgctgccccagtgatggacactggaggggtaggctcatcatcgcataaggaagtttcaagctgtggatggagagcagatgtgcgatatggtttaaacagccttcagccttatcctgtctctggtgttttactgcaatggcatattcttcatgaagctcatttagaatatgattgctttgctgatgccagttcagagggggctctggagagagcttggagagaaaagacaaggccaaaatcactttcagaggcatcatgctggatgctgagctttgttctcaaggcttctgctcacaatgaaggtgagtcggtatgtgactggcgtgtgaaaggacggccgacatacgaaacagacgatgccttcccgggctataactacatgtgtttaggatgtcacttgtgtagccctcagcctgagatgctgagactgagtgcggctttgtcaggcagtgagaatgtccacaaacgggctgaaaacgtagacctcttcacgggaccggcttctttcactttccgccatttggatgggtggatgtggaatagttatgccgtcccacttttagaggtgtatattcctcccaagttacaattggagaagcggctgacaaatgtgaagcagatggaaacacagatgatggccctctctaaggcagtactagcgaagaccgactcagatgctgccacagaatgctgtatgctacagaaacaaagcaaccagtgccactatccaaaaacaaacttccccatagatagaaccagaaccaactgcagaccaggtgcacctgtgagcaagcggtctaagtgcgtgctctgcgcctcagttccctcatctgcaaaagaacagcaagaacacctacatcataaggccgtcaagaaaaatgaggagttctcaaatggaaaacacttagaagagtgcctggaacatagccaagctaccgtaaaaatatcagacactatgcagaggatgaagaggagcaacaggatgaggaaagcacagctccaagagaggtgggagctcatccacctggggaagcatgagcaggagcaggaagggtcactctgggactgtgctcatgggaccctgagatgcagcagaaagagcagtgtgaggagcaaagtgacgctgcctgcaggtaggacatcaatcttccccgactctgctctggccatatttactgccagtcgctgtcccttagactgtctgcctctcctagccttgacagatgagtctcactccaccaggatctttacaattcaaggcacagtccagcctcttgtagatgggaatcttgctaatgtagccactctagcttatcctggctgcatcatgagaaaaatggagttcagctcaggactggcttcctcggtttgcagagtcagtgggcacctgcaaactaagagcttccatctgcaaggaagacctatcaccccaagcacttggcttggctgctggctgacatttgatcatcagtacctttag

SEQ ID NO: 3148 - DNA, 423 bp, Homo sapiens
  SIMILAR (34)..(186): 981254mologous to Homo sapiens FREAC-1,accession number U13219,Smith-Waterman Score=275.
atgagctctaaaaatagaagtcctgtgaggcatccgcggtatcactcgcagtcgcccagcatgtgtgaccgaaaggagtttgtcttctctttcaacgccatggcgtcctcttccatgcactcggccggcgggggctcctactaccaccagcaggtcacctaccaagacatcaagccttgcgtgataaagtcggtgcttccgattccctccaatacagaaagtgcccatgctggtgatttttccacgaatagttcagaagcccttcagctgtttagcaattcagtcaatcaggagtcccgaatgcttctaaattcagagataaaggatgttcaaaacaatggcttccaggcccagttggcacaggagagggaacccaggcagaacctgtggtgttccagaattgaggagctggagctgaaatag

SEQ ID NO: 3149 - DNA, 2512 bp, Homo sapiens
  SIMILAR (94)..(1152): 1001254mologous to Homo sapiens FREAC-1,accession number U13219,Smith-Waterman Score=1915.
ggcggcagcagccacccgatgtcttcggcgcccgagaagcagcagccaccgcacggcggcggcggcggcggcggcgggggaggcggcgcggccatggaccccgcgtcgtccggcccgtccaaggccaagaagaccaacgccggcatccggcgcccggagaagccgccctattcctacatcgcgctcatcgtcatggccatccagagttcacccaccaagcgcctgacgctgagcgagatctaccagttcctgcagagccgcttccccttcttccggggctcctaccagggctggaagaactccgtgcgccacaacctctcgctcaacgagtgcttcatcaagctacccaagggccttgggcggcccggcaagggccactactggaccatcgacccggccagcgagttcatgttcgaggagggctcctttcggcggcggccgcgcggcttccgaaggaaatgccaggcgctcaagcccatgtacagcatgatgaacgggctcggcttcaaccacctcccggacacctacggcttccagggctcggccggcggcctctcgtgcccgcccaacagcctggcgctggagggcggcctgggcatgatgaacggccacttgccgggcaacgtggacggcatggccctgcccagccactcggtgccccacctgccttccaacggcggccactcgtacatgggcggctgcggcggcgcggcggccggcgagtacccgcaccacgacagctcggtgcccgcctccccgctgctgcccaccggcgccggtggggtcatggagccgcacgccgtctactcgggctcggcggcggcctggccgccctcggcgtccgcggcgctcaacagcggcgcctcttatatcaagcagcagcccctgtccccctgtaaccccgcggccaaccccctgtccggcagcctctccacgcactccctggagcagccgtatctgcaccagaacagccacaacgccccagccgagctgcaaggcatcccgcggtatcactcgcagtcgcccagcatgtgtgaccgaaaggagtttgtcttctctttcaacgccatggcgtcctcttccatgcactcggccggcgggggctcctactaccaccagcaggtcacctaccaagacatcaagccttgcgtcgatgtgaggctgccgccgcaggccctcctggtgcaggcaaggcgggtcacagggaccctggaccggcacaagaaactgctttcttctcgaggtataaccgtcggcagaagaaaagggttccacctctccccaaccggagtttttggcaaggagtccccaatgcaaagacacagcgctgcggttggcacctccttcctcactccctcaaaattgttaagaaatgttagtggtgggtctgatctgactgcagccatcggtaaataaaagtttttgatcctgttgaacccgcctgagacggtgctgtgcaggggaaagccccgcacccacacaggaattctgctgaggtccccctccttccggccaatggcagaagtgggggaaaatttttagaagaaaagcaacatgtgagaccaatcattatcaaatacttttatttttgggtgagtattaaccttttaatttttaatttttttttgaaagaatgtcttggaatgcgcaagtctccctttagagccgtcttttgcagggagcgggaagtgacaagagctcagatctccctcccgatctccctccccacctccgaagtctcctccgtggaccacaggtggatctttgtgcgaacaacttgcatttcggaagccactgtccgtctttaaacagaaagtcaaaggagccacgaagcaagcggccgtccgggcgtccgcctccgtccccttccatgttcctcctcttccttcgcttcagcctcttctgttatgttttgtcttgaattttatttagactttttcagtgggtatttttctgtctcccaacctctactgtaaactttctggtccgagaacgagccgaacacagcgcgacgcagggactaggacggcccggtgaccgcgcggattcaggattgcggggacgcagaaaggttaaggcacttttaaaaactatagcaaggctcctgtttatttattctactttctttccctaataatcaaaacaccgcgtaggctcctccgtttatcagtattaatggtgtaactttgttggcaatatttgccgtgtagaattttttttagatatccattgtaaatttgaaacaaagaccgatctgtgtaaaaacaaatttccatatgttttatataaatatatatataatatgaaggactaccctcctttttttttttttgtattttggctgctagagtgcagcatttgtgacacgtatttgaaatttgaaatttccttctgcactgtataaaaggaccatttgaggatgttttgccttttgtgtattttttcctaaaaaaagaacaaaaataaaaatgtataacatttgtacatggcctttaaaattgtatcaactaga

SEQ ID NO: 3150 - DNA, 1085 bp, Homo sapiens
  SIMILAR (387)..(443): 841254mologous to Mus musculus FREAC-1,accession number U42556,Smith-Waterman Score=82.
atgatgcagtggccgagcctgtgccagaaatggaccaccaagccccccgaacgcgtgggcgagcgtgcaatcatgcggcacagctggcgggccacaggtggggatcctcctagcagtctgaactggcagtgcatgctacagcttggcgatgtggccggtcgtttttaccacatgtcggtagacttgggtacaaacctcaggctgttcacccccaactttaatcggcccttggcaggcactatcaccccttattctgcccagcgtgtgaccgtacatcatgcgagctcatggtcccagtggcaggacgtccgttatgcaggtccagcagtatggagttgctcctgctcctgcccctccacatccccagggaacagatgcttctggcagagtttgtcttctctttcaacgccatggcgtcctcttccatgcactcggcggcgggggctcctactaccaccagcaggtcacctaccaagacatcaagcttgcgtgatgtgaggctgccgccgcaggccctcctggtgcaggcaggcggtcacagggaccctggaccggcacaagaaactgctttcttctcgagttcccgctaccgagaaaaacaaacacagaacatgcaccggcccagaagccagccccagcaggggcaggatcgccggcccccacggaaccggcaacacccaggacagacaagacggcggaccaaacgggagacccgaggggcagggaacgcggccaagaacggaccggcagtgagcggcggcggagcaacagaggcacgacacgtcgaccagacatacaccgataacaaggcgcacaattacactccgcacaggagcataaaactaccatatgaccagcgtgcaaagccagcctgccgacggggcacccaccacatgagagaaacccacgtcaatgctcgtagagagctctccctgcattctagtgctgttctccgggccgcatggatccggcacttcaccgtcaccagcgtgagaggcggatgccaacggtgctcctatctccactccgcaaatgaaaagcaggcacagagacgttcagtgacgcccccggcctcacgcagctag

SEQ ID NO: 3151 - DNA, 429 bp, Homo sapiens
  SIMILAR (156)..(428): 1001254mologous to Homo sapiens Human cell proliferation protein APOP-3,accession number B13514,Smith-Waterman Score=457.
ggcacgagagtagatgaaattcccaatatgtgactgtaatttacctacaggaatggtaatgtcatgtgattcaacctaatctaacttaccactatatctataaaacagtagatacttaaaatacttagaatttttttcttcatttttctctttaagatcctgataacttaagtgactctctcttttccggtgatgaagaaaatgctgggactgaggaagtaaagaatgaaataaatggaaattggatttcagcatcctccattaacgaagctagaattaatgccaaggcaaaaaggcgactaaggaaaaactcatcccgggactctggcagaggcgattcggtcagcgacagtgggagtgacgcccttagaagtggattaactgtgccaaccagtccaaagggaaggttgctggataggcgatccagat

SEQ ID NO: 3152 - DNA, 869 bp, Homo sapiens
  SIMILAR (222)..(659): 941254mologous to Homo sapiens Human cell proliferation protein APOP-3,accession number B13514,Smith-Waterman Score=690.
aaggcagttaaagcttgacaaagtggatcaatgtctgatttatgcacagggaaaggtgtgcctatcctatcttctaaaacatgactgggtcttttgattatttccaaagagtgagacgtatagatatatatataaaagctcaatttttcaaaaataaaattttattgaactataggtagtgatacacttttaaaatgattctaaattattcttttgaacaggaaatgttaagagatttaaatcttggtgaaacgaaaagcggagtaccagtgctggcagtatccttagcattggaggggaaggctagtcatagagagatgacatctaagcttctttctgacctttgtgggacagtaatgagcacaactgatgtggaaaaatcatttgataaattgttgaaagatctacctgaattagcactggatactcctagagcaccacagttggtgggccactttattgctatagctgttggagatggaattttatgtaacacctatattgataggtacaaacgaactgttgattgtgtgcaggctaaagctgctctggataaggctaccgtgcttctgagtatgtctaaaggcggaaagcgcaaagatagtgtgtggggctctggatgtgggcagcaatctgtcaatcaccttgttaaagaggtaatgattgggtattgtttttaacttaatttatatgtattcctctgagtgaaagaaattgtggctactagctggtatttttatggacaaaaattaagttcggtcttacagctgcaattggaaaatgaaataatttttttaatatgtggctttataaccttttattataaattatatgattaaaaaatgagtctgttaaaatggctttcatgg

SEQ ID NO: 3153 - DNA, 999 bp, Homo sapiens
  SIMILAR (790)..(996): 971254mologous to Mus musculus apoptosis-inducible,accession number D50465,Smith-Waterman Score=357.
aggctagtattgaactccaggcctcaagtgaacctcccgcctttgcctcccaaagtgttgggattataggtatgagtctccttgcctggcctagattctatttttatatgcgatcaatgtatgtagcatgtctttgtcttgtgctaagtggggattattaaccacttagaatataaaattgtacaacaatttcacttgtttatttgcattttgttttttataactcttactcccttttcccctcaaaggagaactgtgtttatgaaactgtagttttgcctttggatgaaagggcatttgagaagactttaacaccaatcatacaggaatattttgagcatggagatactaatgaagttgcggaaatgttaagagatttaaatcttggtgaaatgaaaagtggagtaccagtgttggcagtatccttagcattggaggggaaggctagtcatagagagatgacatctaagcttctttctgacctttgtgggacagtaatgagcacaactgatgtggaaaaatcatttgataaattgttgaaagatctacctgaattagcactggatactcctagagcaccacagttggtgggcccagttaattgctagagctgttggagatggaattttatgtaatacctatattgatagttacaaaggaactgtagattgtgtgcaggctagagctgctctggataaggctaccgtgcttctgagtatgtctaaaggtggaaagcgtaaagatagtgtgtggggctctggaggtgggcagcaatctgtcaatcaccttgttaaagagggttatgagagaatttacaatgaaattccggacattaatctggatgtcccacattcatactctgtgctggagcggtttgtagaagaatgttttcaggctggaataatttccaaacaactcagagatctttgtccttcaaggggcagaaagcgttttgtaagcgaaggagatggaggtcgtcttaaaccagagagctactga

SEQ ID NO: 3154 - DNA, 2656 bp, Homo sapiens
  SIMILAR (889)..(1011): 1001254mologous to Homo sapiens Human cell proliferation protein APOP-3,accession number B13514,Smith-Waterman Score=197.
atggaggcagggaccatcaggaagctcaaaacctttgcttcagccgagtttgcagaacgccctctccggctccgccgccacgattggccagccgaccacccggcctcggccaataagcgccgccctctcgcccccgtgttactgggtagaagaaaacaaaaacaaacagagcgagaagggccagagactctccgaggcggcggcagagacagaagagcggggtcggggccggctgaccaggaacctgggcgagcagcggcggggggcccgagggattctgaaggaagatttccattaggtaatttgtttaatcagtgcaagcgaaattaagggaaaatggatgtagaaaatgagcagatactgaatgtaaaccctgcagatcctgataacttaagtgactctctcttttccggtgatgaagaaaatgctgggacatgaggaagtaaagaatgaaataaatggaaattggatttcagcatcctccattaacgaagctagaattaatggccaaggcaaaaaggcgactaaggaaaaactcatccccgggacctctggcagaggcgattcggtcagcgacagtgggagtgacgcccttagaagtggattaactgtgccaaccagtccaaagggaaggttgctggataggcgatccagatctgggaaaggaaggggactaccaaagaaaggtggtgcaggaggccaaaggtgtctggggtacacctggacaggtgtatgatgtggaggaggtggatgtgaaagatcctaactatggatgatgacccaggagaactgtgtttatgaaactgtagttttgcctttggatgaaagggcatttgagaagactttaacaccaatcatacaggaatattttggagcatggagatactaaatgaagttgcggaaatgttaagagatttaaatcttggtgaaatgaaaagtggagtaccagtgttggcagtatccttagcattggaggggaaggctagtcatagagagatgacatctaagctttctttctgacctttgtgggacagtaatgagcacaactgatgtggaaaaatcatttgataaattgttgaaagatctacctgaattagcactggatactcctagagcaccacagttggtgggccagtttattgctagagctgttggagatggaattttatgtaatacctatattgatagttacaaaggaactgtagattgtgtgcaggctagagctgctctggataaggctaccgtgcttctgagtatgtctaaaggtggaaagcgtaaagatagtgtgtggggctctggaggtgggcagcaatctgtcaatcaccttgttaaagagattgatatgctgctgaaagaatatttactctctggagacatatctgaagctgaacattgccttaaggaactggaagtacctcattttcaccatgagcttgtatatgaagctattataatggttttagagtcaactgggagaaagtacatttaagatgattttggatttattaaagtcccctttggaagcttctaccattactgtagaccaaatgaaaagagggtatgagagaaattttacaatgaaattccggacattaatctgggatgtcccacattcatactctgtggctgggagcggtttgtaggaagaatgttttccagggctgggaataattttcccaaacaactccagagatctttggtcccttcaaggggccagaaaagccgtttttgtaagcgaaggagatggaggtcgtcttaaaccagagagctactgaatataagaactcttcgcagtcttagatgttataaaaatatatatctgaattgtaagagttgttagccacaagtttttttttttttttttttaagcacttgttttgggtacaacggcatttctgacattttataaacctacatttaagggggaatttttaaagggaaatgtktttctctctttttttttgttttttcgaggggggcaagggagggaccagaaaagtacccctcttctaaagtggaatattctaataagctacccttttgtaaagtgcccatggtttattatcctaatccattcccaagttttgcattgatgtctggactgccactccctttcctttccaaggacagtgttttttgtagtaaaatcactgggtttatacaaaggctttatttagggggggaaagttaaggctggctaaaacccccatgttggcctgctgctgttgagatactgtgctttagaggagtaaaaaaaggaaagttatttctttgtcttaaagaatttttaaaaaaattagtcatgagacttattcatctttccagggcacatactgattgggtctttaaaagactaggacagttaagtaaaaggtggctggaacatctatttttctacaaaactggaaaaatgaacctggttctagaagaatgtacaccaaaataaaacatgtgaagcgagtattgattctttattgggagtacatttttttaggtctcttaaactttaatttcacacagtaaattttgaatctcataaggaagcatatttgaacctagtcaatttaatcttagtgttcccttgaaaactttttttccctacaaaattttaagtgaaaaatacaatagtaaatcaagattacactggggaaaaaaa

SEQ ID NO: 3155 - DNA, 1896 bp, Homo sapiens
  SIMILAR (1263)..(1337): 681254mologous to Homo sapiens Human secreted protein, SEQ ID NO: 6395,accession number G02314,Smith-Waterman Score=80.
atgccctgcagccttgagcttctgggctcaagtgattctggcacctttgcctttgcctcccaagtagctagtaccacagtggataaagtccacgggaacaggcaagttattttaaatctgtatcttctgttgtcaagatctgtaatcagttctgctcgctggactggggacaggaaccaagggaacatgagggtgaacgggttggcatggagtccaggaacacactgtgcctacatgcagaatgtttgtgccaggaaagccagtcggcaggcagatgctcacactctagccctttgttcccagtcaccaagagtgactacaaatgtgggggaacaggaggacctgaaacagtcatggaaattgagactgggacacagaagccatgctcagaggcagcctagcatgcagcaatggaagggctttaagtttgtcatcaagcagatcagagttcagatgccaactctgccaagttctagctttaggactttgtcagatcacttaatctctttgaatctctgtcttcccaaccctctgggaaaaagaagtgacttcgagtctatgggtcttggagggaccaccaacccaagagctagagcagaggaaggacttggatatcccagcttccagggttataggatctctccccaagcccacatatgcagacccagttacaggactagcttcagggataggagtgaaagagttgatctgattccaatcttagcctccctggggctcctgcaagcggacaccgctttccaggacaggtgcaaacagggacggtgtgaagccgaggtgaagacaatgcgatcacgcgtggcactggcatatcccacagcagatggtgtgaatgtgcgtcaccggaggcaaatgggaattgtatcgtggtgtggcttcattgctcagagaagagccgtgcaggggtacaaccatcttcttggaggtgggtctgctcctctcctgccggacaatgagctgctgttgggttttgtcctgggctggagtgtggtcctcttgatcctagaaaagaggccgctcaggatggggatgagacttcgattgctccgggaccgacgcgtctcctcacgtgatcgaggacttcaaaaacccaaagcagagaagcagaaagaggctcaacaaagactggccgacatggaaaaaatcgcattttggcgaacagagcacattcgtccaaagatacacacgcacacgggcatacacacacaaacacgcacacacacagaccgacagagagagggaaagaaacacacagagggcagagattggaacagattggagggctcagaagaacactggaaaatgtgggaaaatttggaacctcctagagacttgctgaatgactttgacaaaagtgctgatagtgtattgaacaataagttccaggccgaggtgttctcagatggagatgaggaacttcttgtgaactggaacaaagatatacatcccagggatgtttcagtgacagtagaggaagcggctcccacggtgctgagagaatcctgcaacgacagaacatttactgaagtccaggaggctgtgggcatccccatgagccaagtggaaccaccaaggtgtccagtgcatccccttgaaaccccattaactgaagctctaggagcggtggacatctccagccctaccgagatgacccccactgcgggctggggggcagatgtctggctaacaagccttgccctaattcactggtttgtcatttgtgatgcccaattacaacatctggaatgctcagatgcaatccctacgactaggcatctgcatgactgtgcatcttttgttcagcaaagaaagcctgctggagaacaatttcaaggaggtgggaaatgcataaagcctgaagggacagggttctcttaa

SEQ ID NO: 3156 - DNA, 573 bp, Homo sapiens
  SIMILAR (17)..(136): 771254mologous to Homo sapiens Human 5' EST secreted protein SEQ ID NO:490,accession number Y12900,Smith-Waterman Score=156.
ggcacccccagtttttccatcctcctcgattccgtctatggggcacccgaaatcccctactccttatttcccctatcactcaggcactggcagggtccttttcccactcctgttggccgccgcggctccaaagcgagctgggcagatgtgcctgagacaggtttgaccaggcaactgagaatatatccctaagagaagacaaaacaaagatatgaaaggaacacacttccctgactgactaggaggaacagagctgcctgctgactggaaccgcttcctcccagactaaggtttcccagaggaagagagagaatttggacaaatgaatgaggaacaacgctctcctgagggttttctttaaggggcaaggatcaaagcctctagatcctttgaaagcagagttaagaggcagtgcaggaaggcacagcaggaaggttcatggttagactacagagaaggaagcagccactgctggggacctaacctgtgctggtcactgacaagctgtctcattaaaccttcccggaccctcaacccctcctagtatcttatcctcattttacagatgagaag

SEQ ID NO: 3157 - DNA, 1449 bp, Homo sapiens
  SIMILAR (805)..(554): 301254mologous to Oryctolagus cuniculus c-myc,accession number AB019241,Smith-Waterman Score=77.
atgcaaatttttgcatatcggccagtctttgttgagcctctttctgtgtctctgcctgggtcccctggccggttgtccgtcattttcacggcggttccactttgggtttgtgaagtcctcgatcatgagaggagcagacccacctccaagaagatggttgtacccctgcacggctcttctctgagcaatgaagccacaccacgatacaattctgaggaggaagccgggaatgggagacggcaacaatccctgtccctggaatgctggcctctctggacaagtcacacatttcacacccctccccttatgcccgtggcagtggcaaggtgcacccgaatcccctattccttatttcccgtatcactcaggcactggcagcgtcctttgcccactcctgttggccgcggcggctccaaagcgagtctttatggcccattggcaaaaggaagccagagctgtggctcccagggtgacgatccttcagctgcctccttggcactgtcattccctcctcccatctcccgccaagggctacagccgagaataccacagacggtttgccatggatcaagatttctctcaatagagagctcacagaaaggctgctccctaatgactgtgggctatctgaggatgtgcatctccaagcgcttttccttccatgggtgtggagtaccaggggatactgtacatctttatcccactgtgacaatgcccccacttccacctacagcttgccatcctgtgagtataactcctgtatgggtgctggacacagtgttggggaagactgtgcaacagggcacattagccaaggcagaggaggaggaggaaggtatacaatcgcagaatgaggacgcgccagcgacgctcttgcccgaggccccgctgtttggcgagcccgggagtccctccctccgcagcgtctgccttccaggcgctctcaactcactcggctttgcgggaggctcaaagcctcagggcctgcaactcaacctctggctacacattatcaacctggggagttttaaaaatccagatgcccaggccctactacaggccaaccaaattggaatctctggaggtacagctgttgggagctgcatctcctaccctcagtctccctgtctgtggttccagagggaagaagaggggaaaaaaaggatgaagagaattgtttcagtgctgggggaggagcctacaaagcactttgaaatccgaagtttgtgggaagtggctgtattgcacaaatactctgaggtgcaacattacttgactggtaatgaggcaaccatcccacctagggcagagttcaaggactgccttcaagaggggctggcctcagtttgcctgttacagaagccaagggctaacagaggctcccctctgcctcacaaagaaggagataaatgggtccactggagagcaacggtcacaatcaagtcttaa

SEQ ID NO: 3158 - DNA, 663 bp, Homo sapiens
  SIMILAR (262)..(633): 271254mologous to Saccharomyces cerevisiae delayed anaerobic 1,accession number U69874,Smith-Waterman Score=96.
cggacgcgtgggcccggcaagcggcgctgcggggtaggctgctttcctgaggccggactcaacgggtctcggctgagccaccgggtgagctcaccgcccagcccaaaccaggagattgcgagggagcgatgcggtgcagcgcgtgttcttggggaagatcccgactaagccattttccagtggcacctcttccatcatgagttcctgaggcagtccgatggggctactttattccagaacaatcacaatttgcttgtaaatgcatcacgaagaggcagcccagtaatgaagaaagcaagcaggagtgttggctcagtgcctaaagtgtctgcaataagtaaaacgcaaacagcagaaaaaattaaacctgaaaacagctcttcagcatctacgggaggcaaacttgtaaaacctggaacagcagcatcattgtcaaagaccaagagcagtgatgaccttttagctggaatggccggaggggtaacggtgactaatggtgttaaaggaaagaaaagcacctgcccatctgcagcaccttcagcatctgcccctgccatgaccaccgtggagaacaaatccaagattagcacaggatcttggaccctcaacatcttggctgccttagaatccctcaattcaaattttagtcctgctactcagtga

SEQ ID NO: 3159 - DNA, 556 bp, Homo sapiens
  SIMILAR (98)..(235): 781254mologous to Homo sapiens GREB1c,accession number AF245390,Smith-Waterman Score=189.
tttcgtcggcactgggggtggggagaccagcccggccgagccgagggccaccccctggtcctctgccctcgcgccccgctagggccaggtgtagatcatggggaattcatatgctgggcaactgaaatctgctcgatttgaggaagctctccacaactccatagaagcctccctcagatgtagtagtgtggtaccacggccaattttttcccagctatacctggaccctgaccagcatcctttctcatctgcagatgtcaaacccaaggtggaggatctggacaaagatttggtaaaccgctacactcaaaatggaagtctggatttttctaacaatctaacagctaatgaaatggaagatgatgaagacgatgaagaaatgtctgattcaaacagcccaccaattccctattcacaaaaacctgccccagaaggatcttgcactacagatggttttcttcctgactgttggccaagagggactccaggcccaccaccagttactggctgcgcattcacagaggcagctacacgggggctaagcagctccccatag

SEQ ID NO: 3160 - DNA, 591 bp, Homo sapiens
  SIMILAR (333)..(455): 401254mologous to Homo sapiens SEQ ID NO 472 from WO9922243,accession number Y19754,Smith-Waterman Score=75.
gcccggaattctcgggtcgacgatttcgtggctttctgtcctctgtggccccttgcctccctcctggtcgtgtgtgcccccgagatggagcgggggcctgtgacttgcacacaggcacagactgtacgagggagaacaggacaccgtcggcgttttggaccaggcgcccacggcctgcgagaggagcccgagtttgtgacggcaagagctggggagagcgtggtcctgcgatgcgacgtgatccacccagtgacgggacagcccccaccctatgtcgtagagtggttcaagttcggggtccccatccctatcttcatcaagtttggctactacccgccgcacgtggaccctgagtatgcagagcagtcctgctttcaggcaccctccttccccagcccttccccggcggaggagctccgggttgtgagtgctagacatgggctgtgccaggccctggatgcctcatggttctgcacaggggtccaacggcagccctggactcagccacccactgggtaccacctggcccagagagcaggagatttgtaccctgtgggcttcccaaaagagacctattttgaaaaagtttaa

SEQ ID NO: 3161 - DNA, 476 bp, Homo sapiens
  SIMILAR (2)..(475): 981254mologous to Homo sapiens alpha-skeletal actin precursor,accession number M20543,Smith-Waterman Score=809.
cgagcatggtatcatcaccaactgggacgacatggagaagatctggcaccacaccttctacaatgagctccgtgtggctcccgaggagcaccccaccctgctcacagaggccccgctgaaccccaaggccaaccgggagaagatgactcagatcatgtttgagaccttcaatgtccctgccatgtacgtggccatccaggcagggctatccctgtatgcttctggccgtaccacaggcattgttctggactctggggatggtgtaactcacaatgtccccatctatgagggctacgctttgccccatgccatcatgcgtctggatctggctggtcgggacctcactgactacctcatgaagatcctcactgagcgtggctactcctttgtcaccactgctgaacgtgaaattggccgtgacattaaagagaagctgtgctatgtcgcccttggatttgagaatgagatggccacag

SEQ ID NO: 3162 - DNA, 455 bp, Homo sapiens
  SIMILAR (393)..(437): 531254mologous to Homo sapiens Polypeptide fragment encoded by gene 39,accession number W88790,Smith-Waterman Score=47.
tttcgtcgcgtgggtagaggccttatgcgggcgttgcttatggttgtttgctagagttcggaccttgttacggcgcgaagttccctccttggggcgggggaaaggtaccgcacccgctacctagtgtgaatgaactgtggcgtgggctgctaagggcaggctgcggagtacccgggccgtggccatgaactcacccgtggaccctggcgctaggcaggcgttgaggaagaagccacccgagcggactcccgaggtgaggctggttgacctttatgtgcgtctcacagtccagtagacagcatcctcctgtctgtccgaaatccgcggcgactgccctcttgccagagtctcgcacctgctactgcgaatctgttcgcttgagtctcttccctgacccaggcccttgtcgccagcagggtgccgaccgcccttcctgcctgtgatgcggtcttaac

SEQ ID NO: 3163 - DNA, 2862 bp, Homo sapiens
  SIMILAR (1152)..(1679): 201254mologous to Rattus norvegicus serine-arginine-rich splicing regulatory protein SRRP86,accession number AF234765,Smith- Waterman Score=123.
atggtgcttcttaacgacactcagaagcccccggcaaggacgggtacgcgggttaagccgcatcacaggcaggaagggcggtcggcaccctgctggcgacaagggctgggtcagggaagagactcaagcgaacagattcccagtagcaggtgcgaactctggcaagagggcagtcgccgcggatttcggacagacaggaggatgtgtctactggactgtgagacgcacataaaggtcaaccagcctcacctcggagtccgctcgggtggcttcttcctcaacgcctgcctagcgccagggtcacggcaacacaaaacagacaagacagtgcccaaggtgaaaatatatgtaaattccagtgcatggatgtctggtcagggtctagaaggaaaaagacaaaaagatcagggacaaggagggactaggaaaaatattaaaggagggtcactatctgtttctggcagacatgctctgtacttaattgtcattttggtctttgtttgtaaaccgggggaaggtgcccctgtcatctttgatcccctcaagaggacagctgcggtaaagagtcaacctgagcttggaggacagataaagtttgtgatatgtcttaatgctagcagagaagtcattggagaggctgcggaatgttgtgacagagttgagatgcctgctattccagttccaagtctggtagtggaggcagaaatcctagatccacaagcccagctgcctctccatggggcagagctggggacctgcagcccgccatgcccgagcccccccccacagtgggctcccacgcggcccgagcctccccaatgggtgccaccccctgctctgcggcgcctggtcccatcgaccacccaagggctgaggagtgcaggcgcgcagcttgggactgacgagcagctctgcccgcagcctggtgctgggtccactaggcaaagccagctgggctcctgagtcgggggcttgcaggtgcctggggaacaatacagccaaaggacaccccacgtgggctgggtcaggacgggctcgacacgacgaccgtaaggactacataggacgacccagactggcaaacgctgtatcccccgtacgtaaaaagaacacacacaggaataacacccaccgaggaaaacacaccaccgtccacaaacaaccacaacaaaaaacaaccacacaaaaaaacacaacacaaacaaaaaccaaaccagcacccccacaaaccacacaaaacacaacaccaccgcaacctaacaaaaaccaacccagcgccaaaaggcaccacacgaacccccaagaaggcaagaagacaacacgcaagcacggagggagagacgcgcagccgaaaaacacgagcagaagggcagaaaggaccgcacacgcagaaaacgagcggaacgcaaaggaaagagaatcagagagaagaggcaggaagcggaggatgagaacgggaaagagaagcaggagaggaagagggaacgcacgcacgacacatgaaaagaagaaagagagacgaaaaaaaagacagggacaaaacaagccaggcaacaaaagaccagaaggaaacgaaaggcgcaaagaagaagaaagaaaaacagagagcgacagaggggacatggatgaactggaaaccatcattctcagcaaaataacacaagaacagaaaaccagcatgcatgttctcactcataagtgggagttgtacagtgaaaacacatggtccagggagggaaacatcacacaccaggacctattgggggtttgttattacccagtagtcattccggagcaggttgttcagtttctaagtagtttcaggcccctccgctgcaggtctgctggtgtttgctggtggtccactccagtccctgtttgcctgggtatcaccactggaggctgcagaacagcaaagattcctgtctgtcccttcctctggaatgcgacaccccttcgcggtctcaacacacatgggcccttctaacgccggcacacgggacgcggagaaggcacacaaggccactaacagccctgtcccggaaaaagccgggtccacaaccgagtcgaacggaagccttacggacaaaaccccgggcctttacccccaaagggcaaccgggcacgggtgaaaaatggatgggtcggaggattcaagggaccacaaggcccagacaagagaggtatcatgaccctgaagtaccccatggagcatggcatcatcccaactgggatgacatggagaagatctggcaccacaccttctacaatgactgcatgtggctcccaaggagcaccaaggaaccagggggtgtttttcaacgccatggtttaaggcccaaccgaattgcgttccttcaaattcttcccttgtaccctttggtgaaattcccgggcttgggcctacgaggcccttccccaaaagttggcaaagaaatcccggttcagcttttcgcctggcttccgccgtggggtaagggcttccgggccgccatttgctttgtcgacccttgccgtggtgggggcgacgttctgttgtccccgcatccggggagctccacacccgcggacctcctttataaaccccctttaacggtttttcttagcaacggtggcgtttccaaccccaaaagggaaaagacgaggagaggagccgaagaaacccataaaacctgttcagacaaagcaaccagagctggacccccgggagagaacaccattactgcgaagatacgagcaccaccagtaaagcgtgatacactaaaagatgcacagaaaataagcggcaaaggggacacaattaaagatatacctgtaatagttatcagtactcacagaaatgcattactatttcaagagtaa

SEQ ID NO: 3164 - DNA, 833 bp, Homo sapiens
  SIMILAR (501)..(623): 271254mologous to Rattus norvegicus multidomain presynaptic cytomatrix protein Piccolo,accession number AF138789,Smith-Waterman Score=47.
gaattcccgggtcgacgatttcgtagcaatgtgactgaggctgcctggaggagggagagtcctaggagtggggccccatcccgtggagaggccagcctgagacttcaggcacacagccggctgcatgacgactactcccgccgcgtctccaggagcactgagcaggacagcaggcggggcggggcggtcatgcatgggaccactgcaacctgcaccgtggcccccggtttcggctcagccacctctaagggggccccacctagacgctgacactgacgtttttcctcttgaaaccaaaagttcctgggcggtggaaagcgacagttcctgcacttgcagctctttgccaagcccgattgtccaggatgtgttgagcaaagactcctgtgacccaaacgctggcagccagttgacatttgaccctgagcagcctcccacccctctaaggcccaccacacccaaaccccagagccctcagagcccccagagccccggggcaggaagtgccagctgtcacagcaaatcacagtgccctgtccgcgaattcagaggaaagtgaaggaagggcagaagagcctgctcagagagagccagggcctgtgtccttgcaggatcccctggaagccacacatggtgatgagggcagcaaggaccttctggtgaacattggtgtggcagccggcccagaagaaaaggagaaggaggagctgagagcagctgcctttggctctgctcctggcttgggccctgtggttcttggggagggacttcctctccaggatgaagtcatgggggcaggagccatggggagcctttgcggctgtgacccatga

SEQ ID NO: 3165 - DNA, 1275 bp, Homo sapiens; identical to SEQ ID NO: 2261
  SIMILAR (639)..(695): 551254mologous to Apis mellifera elongation factor-1alpha F2,accession number AF015267,Smith-Waterman Score=48.

SEQ ID NO: 3166 - DNA, 591 bp, Homo sapiens
  SIMILAR (286)..(176): 721254mologous to Homo sapiens calcium channel alpha12.2 subunit,accession number AF238295,Smith-Waterman Score=123.
atggcagcatctgtatctgggggtgtcaccttgggcctgcttagagtgaatgacacatcaccgaattggagagcacagagctgcctccccactgtggcagtgatccatgagactccacccaaagaatataagcaggcagaaaaatgtgaaaagagacactggcctagtcttctggcctatatctttctcccatggtggatgctggaacatcagactccaagttcttcagttttggaacctggactggctctccttgctcctcagcctgcagacggcctgttgtgggaccttgtgatcatcttggaaggaagggaggcgatgtcttcaagtggaaaatatgagccgaactgccagaaacaaatgggctccaagctcagatcccaaactccacagctgaaaacctgtgggaccagtgtaggcacactcagtcgtgtgtcggagccagtctccccgggctgccccaaccaatctgcagcagcgcagaggatggggaaactggggtggttcccaagcaccaatgggcatctcaggcttctggaagccggcacacttgctgggcaactctgctcgctgcgggtgtgggagctgtag

SEQ ID NO: 3167 - DNA, 291 bp, Homo sapiens
  SIMILAR (1)..(66): 951254mologous to Homo sapiens Human secreted protein, SEQ ID NO: 4702,accession number G00621,Smith-Waterman Score=123.
atggagagctggtggggacttccctgtcttgcgttcctgtgttttctaatgcacgcccgagtacaatgttcaataaattatgtgaggtatgcaacacctcattataaagttgactgtgtgctagatgatttgtccatccgttggctgatgaaaagtgttctgagcactctgaaggcaggccgtctgcaggctgaggagcaaggagagccagtccaggttccaaaactgaagaacttggagtctgatgttccagcatccaccatgggagaaagatgtaggccagaagactag

SEQ ID NO: 3168 - DNA, 744 bp, Homo sapiens
  SIMILAR (352)..(221): 841254mologous to Homo sapiens calcium channel alpha12.2 subunit,accession number AF238295,Smith-Waterman Score=170.
atgcatggagatgtctcctacgacatcgataccgtcttctcagaagatattattggctatcacgggtccaagcggcatgagcagctgtcctggtacctgggtgctggcctagtggctgggcagatccagcaggagcggcagctgctcatgtatgctacccagctgccagagcggctcaaatataagcaggcagaaacatatgaaaagagagactggcctagcctcccagcctacgtctttctcccatgctcaatgcttcctgccctcgaacatcggactccaagttcttcagttttggaactcggactggctctccttgctcctcagcctgtagatggcctattgtgggactttgtgatcatcatcattggagaaaatgtcctccgctcatcatcggcccagacttcccaaccagaggcaaagttttcattagcatctgcacgcttggaagctgattctaagaaagcaaaaaagagcagggagctggagaccagtgatgtatcatctccaagcagggcaggagcaggagctcatatgattccagctgtctttcgtcaatccagtgagatgccagcagccgtggagaagggagtgatgtgtgttttccatgttccaccttctagcagtccatcgtatttgcagatcccagttttctgccattgtcggttcagaggtttaaacatcatggtattagcagtcccgcagagctttacatctattgatatttaccagttccggaattaa

SEQ ID NO: 3169 - DNA, 709 bp, Homo sapiens
  SIMILAR (338)..(577): 771254mologous to Homo sapiens Human CSGP-1 protein,accession number W90961,Smith-Waterman Score=339.
tcgacgatttcgtgcccattggtgcttgggaaccaccccagtttccccatcgtctgtgctgctgcagattggttggggcagcccggggaggctggctccgacacacgactgagtgtgcctacactggtcccacaggttttcagctgtggagtttgggatctgagcttggagcccatttgtttctggcagttccgctcatattttccacttgaagacatcgcctcccttccttccaagctgggagaccagaagtcaacaacaggagggtggagaggccgggtctcacaatccgcttggctggggagtccactgaggttcttgcatcctgaagcaaaccatggagagctggtggggacttccctgtcttgcgttcctgtgttttctaatgcacgcccgaggtcaaagagactttgatttggcagatgcccttgatgaccctgaacccaccaagaagccaaactcagatatctacccaaagccaaaaccaccttacttacccacagcccgaggaatcccgacagcggtgggaaatattttacccaagggccaaaggccacgcccttcaaccccagctggggcaatttccgggcaacagtggaggttacttcaatgatgtggaccgtgatgacggacgctacccgcccaggcccaggccacgggcgcctgcaggaggtggcggcggtggctactccagttatgggaactcccg

SEQ ID NO: 3170 - DNA, 435 bp, Homo sapiens
  SIMILAR (6)..(299): 491254mologous to Homo sapiens hypothetical protein,accession number AL162044,Smith-Waterman Score=219.
atgcgcctgcactcctcagcccttgggtggtcgatgggactgggcgccgtggagcagggggtggcgctcgtcgaggaggctcgggcagcaaaggagcccacggagggggtgggaggctcaggcatggcggcctgcagatcccaagccctgccccgcgggaaggcagctaaggcccggcgagaaatagagcgcagcgccgctgagggagtgggctccggccttggccagcccagaaaggggctcccacagtgcagtggtggactgaagggctcctcaagtgccgccaaagtgggagcccaggcagaagaggctccgagagggagcgggggctgtgaggactgccagcacgctgtcacctctcaccaggagcctgctaaactcaaagatgatgagcataaaaacctttatgatgatctgtttccacttaatggatag

SEQ ID NO: 3171 - DNA, 477 bp, Homo sapiens
  SIMILAR (229)..(405): 491254mologous to Homo sapiens melanoma-associated chondroitin sulfate proteoglycan (MCSP),accession number X96753,Smith-Waterman Score=141.
atgcgcccgcactcctcagcccttgggtggtcgatgggagtgggtgctgtggagcagggggcggctctcatcgaggagtcttgggccgcacaggagcccatggagggggtgggaggctcaggcatggcgggctgcaggtcccgagccctgccccgcgggaaggcagctaaagcccgccactttcagcacgaagaccacggcagccaagggtatgatgaccatcagagggtggaaaatgaattgacttactatgctcatgatgacagcgagaagcttcatgacaatttcaccatctttgcgaatagctcagagcttggaaaacagagtctgccccaaactctttttgtgactgttgaatctgtaaatgatgaagctccattggtaacagccaataacatccttcagggactgatcctggtgaagaaagttgcctttcccaaggccttatctgcttcctggggtgacccagagatatga

SEQ ID NO: 3172 - DNA, 2943 bp, Homo sapiens
  SIMILAR (853)..(1404): 921254mologous to Homo sapiens myosin X,accession number AF234532,Smith-Waterman Score=896.
atggtggaaggcaaggagaagcaagtcacgtcttacatggatggaagcaggcaaagagacagtgaagaagatgcaaaggcagaaacccctgataaaaccattagatctcatgaaacccactcactactgcgagaacagcatggggaaaccaccctcatgattcagtcgtctcccaccagctgtgtcatctttgaacattcaattcaccagaaaaggaaattgcagccgaaaagaaaaccaccaatggaaatccagatctaccccctcgtgattgtgatcgcaggctgtggggaaaaggtcagtgtggcagttgttttccatatgaattttggcccaagagccaaactgaagctactggaacgtcacgtgtacgggcgcaagcactgttaccggttctacaccaagctggctcaacgaaggccacccggtggtccagtgccattcaaaagatattgttaccgctccacaaacggccatgatgatgccatgcagtttaagactgtggacacatgcagctcccaaacacgagctgccttcccgtggagcaaggctcgggacctgcagcccgccatgcctgagcctcccacccactccatgggctcctgtgcggccggagcctccctgacgagcaccgccccctgctccacggcgcccagtcccatcgaccacctaagggctaaggaatgcgagcgcacggcgcaggactggcaggcagctccacctgcagccctgctcaaggtttgtaaacacaccaatcagcaccctgtgtttagctcaaggtttgtgagtgcaccaatcgacactctgtatctagctgctctggtgaggacgtggagaacctttatgtctagctcaaggattgtaaatacaccaatcggcaccctgtgtttagctcaagtgctcaaagacaaaggctataccacccttcaggatgaggccatcaagatattcaattccctgcagcaactggagtccatgtctgacccgattcccataatccagggcatcctacagacagggcatgacctgcgacctctgcgggacgagctgtactgccagcttatcaaacagaccaacaaagtgccccaccccggcagtgtgggcaacctgtacagctggcagatcctgacatgcctgagctgcaccttcctgccgagtcgagggattctcaagtatctcaagttccatctgaaaaggatacgggaacagtttccaggaagcgagatggaaaaatacgctctcttcacttacgaatctcttaagaaaaccaaatgccgagagtttgtgccttcccgagatgaaatagaagctctgatccacaggcaggaaatgacatccacggtctattgccatggcggcggctcctgcaagatcaccatcaactcccacaccaccgctggggagtttgcggtcggggtccccacccttttcgggactggcccccccgacgccagtgccctctgccactgccgactggagacggccactggcaatcattcagtctccgtcgggctccaaaaacaaggaagagttcacagtgagcagtggaccgtgctcatgcgcacccgggcatctgccttggcacagcagctggctttgcccgcaaccacgcactacgccgagcgtaaattcaacgtatgtttgcagtacgacgatcggcggttctcacacactcgatctgcgcgcacgagcttgcagtctcgaagctccatgaccgtcacggtgatgccactccaccatcggacctccgtaaagctgcctggagattatctagaggatccccctttgatttctgctgaagaaaggaaagacgagaagaagaatatcaggtcttctggtgtggtgtcgctgcgcgggtggtctttcgtggtagcactactatcgtgtccgtctgacaagggtatcttcttctgtggacaaaagagaggaatggagacgactccattgtcttgtgatgactatttattaatgtaccggattcgaaatgtcgttgttaatttagatcgcgttcccaactcaagggagagaacatcggactccaagttcttcagttttgggactcagactggctctccttgctccttagcttgcacacagcctattgtgggaccttctgatcatgaccccttctgggacattggatgtaatcgtcatgctccttctttgatagccttgacggttttgagaaatgctggaactgtggggattaaagaggctaactctgagaaagaaggtgagtggataatcagaaatgcttcatggaaagcagaggtggccactgacgcatttaacaacacagatactgtgccagagatccagcgcaaagattatatgtacttcttgccacgttgcgcctacttacgcgtatcagtcgtagttgctcgacgcttcgttcgagtgcttcgtaggaccacgaatgctgtcgacctccatagtactgtaggaagaaatggtaccgagctcttattgcaagggagacccaacccggcaattagtcgagggcccaccaaccctcagggccgtgaaggaaatgtgtgtaccccacaaagtccccctggggtcgctaactgggccggaaaaaaggccaaggcctccatccgcagaatgggaaaacccctgacagctggaccgtgccactggaaaagcccatacagtcaacgccagcccatagttaagacaaataaaactagacgattaattatatgccaaatagcagaaaaatatgtgctttcacctaagcggtaccgagctcgattttccgccggcgtcaaaaagatggagcgtcccccgctgttttcacaaaggctgtgtgaattattttttctctatggtatttacttcatcttaaccattgcagataatgtcccgaacagggaacatccaaaattcagggagtggatgctgaagtctacactcgctggtgctacctccaaacatccatga

SEQ ID NO: 3173 - DNA, 1719 bp, Homo sapiens
  SIMILAR (965)..(1060): 961254mologous to Homo sapiens putative selenocysteine lyase,accession number AF175767,Smith-Waterman Score=167.
atggcaggctgcaggtcccgagccctgccccacggggaggcagctaaggcccggcgagaaatccagcgcagcgcagccgctggcccgggtgctaagcccctcattgcccggggccggcggggccggctggcaggccgctccgagtgcggggcccgccgagcccacgcccacccggaactccagctggcccagaagcgccccgcagccctggttcccgctcgcgcctctccctccacacctcgctgcaagctgagggagccggctccagccttggccagcccagaaaggggctcccacagtgcagcgcggtcacctttgtcccgtgtccaagtgagcgggcaggcagaggtggacgacatcctcgcggcagtccgcccgaccacacgcctcgtgaccatcatgctggccaacaatgagactggcattgtcatgcctgtccctgaaatcagtcagcgcattaaagccctgaaccaggaacgggtggcagctgggctacctcccatcctcgtgcacacggatgctgcacaggccttggggaagcagcgcgtggatgtggaggacctgggcgtggacttccttacaatcgtggggcacaaggtcccctatggagccgctccgactaacggacgcgcaggtccagcggacctgctcatcactgtccagggtggcctgcgggagactcccggggccctggctgtctgccgcggccccggcacttcccctcgagggttcgcggggaacaaggccgcgcggccccggctctcccggagtgcacggtcccgcgctcatgcggctagagggaggcacccgcaggactgcccagccgcctctgctcctcaggtccagctcgggccccgcctgctcttacgccgactaaccggccgcggcccgatggcggccctgccgcagacagcaaagcgctccgcgggaaggaggctggatgcccggcagcagtggggcggggatggaggcggccgtggcgccggggagggatgcgccggcacccgcggcgagtcagcccagcggctgcgggaaacacaactcgccggagaggaagctggtgcactggggcaggtgaaagggaatcaagggttctcccagactgctggcccagctgcaggaaacgggatggccaccgctgagaagcgcggagacccgaagcacgtggtatccctactagttaagtccgagaagagcaggaggcaggggaaagtttatatggactataatgcaacgactcccctggagccagaagttatccaggccatgaccaaggccatgtgggaagcctggggaaatcccagcagcccgtattcagcagatccttcccccatcctgggagcccaccttgtgcccgccctctctgggcgtgtggtgctgtctcagtctgaggtcagcacctctgccgctgacttggtgtacgggagcagggcgtgttcggacattgggaagctgacctctgccggcctcggaagaaaggccaaggatattataaatgcagctcgggaaagcctcgcgaagatgataggggggaaacctcaagatataatcttcacttccgggggcactgagcccagtgaaggggccaagccccatttcattacttcctcggtggaacacgactccatccggctgcccctggagcacctggtggaagaacaagtggcagaggccagctgccacaagggggttggcaagtgtggccaaactttcccttag

SEQ ID NO: 3174 - DNA, 376 bp, Homo sapiens
  SIMILAR (102)..(40): 1001254mologous to Homo sapiens Human secreted protein, SEQ ID NO: 7678,accession number G03597,Smith-Waterman Score=108.
gctgataaccatgtcccaagcactgctctaagttcccaatgtgtccggaattggtgggttcttggtctcactgacttcaagaatgaagccacggaccctcgcgttttagactatgctaaaaacagcctcaggaccttcagcactgatcaacaatcctgggcatgggctgaccgacagttttcacccagagagtgaagatcatggaggagccattttaaattccgcccagcgcaggctcccaggaatccttatgtcaccgatctcaattcagccaatgtgacaaacacagcagtaattaagtctagagagctaaacacacctcaaaaagaattgtctcttggtatgagtggaatggaataaaatacatggaaacccg

SEQ ID NO: 3175 - DNA, 1092 bp, Homo sapiens; identical to SEQ ID NO: 70
  SIMILAR (361)..(711): 291254mologous to Leishmania major L8453.1,accession number AC008054,Smith-Waterman Score=96.

SEQ ID NO: 3176 - DNA, 1470 bp, Homo sapiens
  SIMILAR (571)..(1467): 951254mologous to Homo sapiens unnamed protein product,accession number AK000702,Smith-Waterman Score=1459.
atgaggcagaccatggtcccgacctgcattggctggtgctggctgcagctgctgatggaggctacaaacagtgatagaagcatgcagaagctacacagcacaggccaagcccttgggtggtcgatgggactgggcgccatcgagcagggggcggcgctcgtcggggaggcttgggccgcacaggagcccacggagggggtgggaggctcaggcatggcgggctgcaggtcccgagccctgccccgcgggaaggcagctaaggcccggcgagaaatcgagcgcagcgctggagtcttcctggctgtgcccaccaacgggcaggcagtggcggcccccgtcggtcaaagctgtgtcatcgctcagaggcttgctaagctgcaagtcatgcaggtaagaaatggaggggctcctggagtcaccttcaaggcagatgaagaggagctatggaggccctttgaagcatggcccctgggcatgggatctgaaggcgatgggccgagagctgaggaactacaactcctagagtactccgcgccgccgggacgccgcgcggctgcggggctgggcgagcgcaaagatgtccgcgcccgctgccgggaggcgagggggctcgggggacccctgcgcagcagcgagccggtgcgcgcggtcccggcccgggcgccggccgtggaccttctggaggaggcggccgacctcctggtggtgcacctggacttccgggcggcgctggagacctgcgagcgggcctggcagagtctggccaaccacgccgtggcagaggaacccgcgggcacctcattggaggtgaagtgctccctgtgtgttgtggggatccaggccctggcagaaatggatcggtggcaagaagtcctctcctgggtccttcagtattaccaggtccctgaaaagctaccccccaaagtcctggagctgtgcaaaatgcaagagcctggagctgtgctggatgtggtgggtgcctggctccaagacccagccaatcaaaaccttccagaatatggagccttggcagaatttcacgtgcagcgggtgctgctgcctctgggctgcttatcggaggctgaggagctagtggtgggctctgcagcctttggtgaggagcggcgactggatgtacttcaggccattcacacagcgaggcagcagcagaaacaggaacactcaggctctgaggaggcccagaagccaaacctggaaggctctgtctcccacaagttcctgtcactaccgatgttggttcgccagctttgggactctgcggtgagccacttcttttctctgcccttcaaaaagagtctcctggctgccttgatcctctgtctcctggtggtgagatttgatccagcttccccttcctccctgcacttcctctacaagctggcccagctcttccgctggatccggaaggctgcattttctcgcctctaccagctccgcatccgtgactga

SEQ ID NO: 3177 - DNA, 426 bp, Homo sapiens
  SIMILAR (1)..(87): 1001254mologous to Homo sapiens protein disulfide isomerase- related protein,accession number J05016,Smith-Waterman Score=139.
atgaggccccggaaagccttcctgctcctgctgctcttggggctggtgcagctgctggccgtggcgggtgccgagggcccggacgaggggctcccactgtcttctggcatttgcttcctaaactacaacccagccagctccactgcttacttcttggacattgttgtccagccccttggaaaacagttggaacagccgttgggctctgagcaacaaggcccttttatttcagttagatgctgggctcgggacctgcagcccgccatgcctgagcttcccacccactccatgggctcctgtgcggcccgagcctccccgacgagcgccaccccctgctccacggcgcccagtcccatcgaccacccaagggctgaggagtgcgagcgcacggcgcgggactggcagcctgcagatggcctactgtga

SEQ ID NO: 3178 - DNA, 747 bp, Homo sapiens
  SIMILAR (252)..(410): 441254mologous to Helicoverpa armigera nuclear polyhedrosis virus basic DNA-binding protein BDBP,accession number AF197913,Smith-Waterman Score=88.
atgcactcaggtagaatcaaggttttcccagtaccctttggcaggtctgacggcacaggcatcttcagctcaacttgccacatatggttgttgaactccctcatgatgactaaagaaccaaacttgcctggtttttccaggcaaggcaacattttgatgttttttaatagtgtgaacacctgggctgcaggtggagctgcctgccagtcccgtgccgtgcgcccgcactcctcagcccttgggtggtcgatgggactgggcgccgtggagcagggggcggcgctcatcggggaggctcgggacgcccaggagcccatggagggggtgggaggctcaggcatggcgggctgcaggtcccgagccctgccccgcgggaaggcagctaaggcccggccagacacagttcaagaattatctggcaacacaaacacctttaagcacaaaggtagggatgaagctgctgtgaggcacattccactccctgatgatgagagagagagggaaaatgaaaagcaagatggaggcaaaatagaaagtcagggagaaaaagaaataaagagagcttccacaaacaaatggcccactctcagccaaacagaccacataccttcagaagagagtgaccctaagaggcagcaagagctggagatgatgtctgagagccatgcacttgaaagccggcagtgtcctggccgtggctggctgagctggtgtcctcaccacagtctccctgcaacatggtcttga

SEQ ID NO: 3179 - DNA, 2234 bp, Homo sapiens
  SIMILAR (852)..(1361): 451254mologous to Felis silvestris polyprotein,accession number X51929,Smith-Waterman Score=350.
gtaattggcttccatcagtatcacggtgtcaggaaacccataaaatcgcagctaaccagtcccttactcaaaggcagatgccactcacatctctgtactgtgatgttgttattctacctgtgagtgttggcttggaaagcttgcagtcgccctattacaggacttcaccttgtgatcctgtgagtcaattctgcctaataaagatatctgcatctagcctacctgttctgtccctctggaaaaccctgaagaatgcacaaagctaccaaagggattaccggcatgacaataaggctcattattttcagaagcttgtaactatgcaggagaatttatatgtacttctgtgtgatgaagaattggatgcagtctctttggaagctgtgcaccaacaaaagatgaagaatagacaagcccactcttcatcaggttgttgtcagaaagtagctaacgcccctaggaatgaagaatcaagtggacagtttagagttattggaaacgagaagtttgaaaaaggaccctgtggagttaggcagcaaatctttgagaaggtgttgctgccaaacagaacctgtgaatttgttaccccacgtttcaataggaactttgaagatttgatcaaggatcttaaggctgcagagaccttgattgattttctagtgtacgagcccaagaaccaaagaaggcttgtcaatagattcaggctgccatgcaagctgctccacaatttgggccatccactgaagactgatgctgcccaatcacctcggaagccccctgggccatcatggatgccaagcttcggttcaaagcctccctcacatcctccccttgtatctccccaccttaacccacaagtatgggatacctctagtccctccttggcaactgaacatgcatcccttaccatctcattaaaacctaatcacccttaccctgctcaatcccaatattccatcccacagcatgctttaaaaggatcaaaacctgttatcactcgcctgttagagcatggccttttaaagcctataaactctccttacaattctcccattttacctgtccaaaaactggataagtcttacaggttagttcagcatctgtgccttatctaccaaattgttttgcctatccaccccatggtgccaaacccatatactctcttatcctcaatacccttcacaacccattattctgttctggatctcaaacatgctttctttactattcctttgtacccttcatcacagcctctcttcgctttcacttggactgaccctgacacccaccaggctcagcaaattaccttggctgtactgccgcagtgcttcatagatagcccccattacttcagtcaagcccaaatttcttcctcatctgttacctaccttggcataattctcatgaaaacacacataggactgggcgccgtggagcagggggtggtgctcgtcggggaggctcgggccgcacaggagcccatggagtgggtgggaggctcaggcatggtgggctgcaggtcccgagccctgccccgtgggaaggcagctaaggcccggcgagaaatcgagcgcagcgccgttaccattgttcctgtcctggacttcaatccggccttccacattattccggataccacacctgaccaccatgactgtatctctctgatccacttgacattcactccatttccccatatttccttctttcctgttcctcaccttgaacacacttggtttattgatggcagttccaccagacctaactgccactcaccagcaaaggcaggctatgctatagtatcttccacatctatcattgaggctactgctctgccccgctccactacctctcaacaagccaaactcattgcctatactgactctaaatgtgccttccatatcctgcaccaccatgctgttatatgggaagaaagaaatttcctcactatgcaaggggcctccatcattaatgcttttttaataaaaactcttctcaaagacattttacttccaaaagaagctggagtcattcactgcaagggccatcaaaaggcatcagatcctatcactcaggacaatgcttatgctgataaggtagctaaaaagcagctagcgttccaacttctgtccctcacggccgtttttctccttctcatccggccactctcacctacttccccactaaaacttccacttatcaatctcttcccacacaaggcaaatgattcttag

SEQ ID NO: 3180 - DNA, 3394 bp, Homo sapiens
  SIMILAR (1)..(1125): 971254mologous to Homo sapiens putative p150,accession number U93563,Smith-Waterman Score=1951.
atgagtgaactcccattcacaattgcttcaaagagaataaaatacctaggaatccaacttacaagggatgtgaaggacctcttcaaggagaactacaaaccactgctcaaggaaataaaagaggatacaaacaaatggaagaacattccatgctcatgggtaggaagaatcaatatcgtgaaaatggccatactgcccaaggtaatttacagattcaatgccatccccataaagctaccaatgactttcttcaaagaattggaaaaaactactttaaagttcatatggaaccaaaaaagagcctgcattgccaaggcaatcctaagccaaaagaacaaagctggaggcatcacactacctgacttcaaactatactacaaggctacagtaaccgaaacagcatggtactggtaccaaaacagagatatagatcaatgcaacagaacagagccctcagaaataacgccacatatctacaactatctgatctttgacaaacctgagaaaaacaagcaatggggaaaggatttcctatttaataaatggtgttgggaaaactggctagccgtatgtagaaagctgaaactggatcccttccttacaccttatacaaaaatcaattcgagatggattaaagacttaaacgttagacctaaaaccataaaaaccctagaagaaaacctaggcattaccattcaggacataggcatgggcaaggacttcatgtccaaaacaccaaaagcaatggcaacaaaagacaaaattgacaaatgggatctaattaaactaaagagcttctgcacagcaaaagaaactaccatcagagtgaacaggcaacctacaaaatgggagaaaattttcacaacctactcatctgacaaagggctaatatccagaatctacaatgaactcaaacaaatttacaagaaaaaaacaaacaaccccatcaaaaagtgggcgaaggacatgaacagacacttctcaaaagaagacatttatgcagccaaaaaacacatgaaaaaatgctcatcatcactggccatcagagaaatgcaaatcaaaaccacaatgagataccatctcacaccagttagaatggcaatcattaaaaagtcaggaaacaacagccctgtttcaagtttcggtttggatgtcacttcccccatctggctgttcctccatgatcccccacagaacccactgtatcctatccaagcaattaccactctgcaatttcaccatgaattccttcatctgcttccctcctggactatgggaccatctagttgcaggaaaacaagctcagggctcccactgattcgacattatgatgagttgtatgattatttcattatatatttcaatgtaacaataatagaaataaagtgtacgataaatgtaatgtgcttgaatcatcccaaaaccatcccccgacagccatccatggaaaaattgtcttccgtgaaaccagtccctggtgctgaaaagatcagggaccactgctgtagagctttggcaatgcttcgtgcattgggagagaaaagaaatgagcaccccaccctgagatgtgcagaaccaagatatgctctaatgagcttgcctggaaacacagctagcctagcaacaaggctcagaaccattgcattcttaaagagacatagagctttccgttttgagtgcctgttgcccttgtgttacaagcctctacaatcctgtggtctctggtcatatggaggggactctgtcttctctgcttggaaagaggacatttccatgtcattgcccaagcaccctggtctaggcgacttagatgcttctctgagagactctgcctctggctgttttgggttgttcaggaaattccagattcggcagaacaattacaacagacacagttgcaacatggcaccaagccttcctcccggatacaatgttattgatatattgtggtatagcgaaaaaaaatcatcaatgggctgctgcaatttgctaggggttcacttcaggcactattcatctggtttgctcccaagcccagagatattacttgaggaggctggagaacagcaaaggcaggtgcctgctcctttttctgggatctctgacctcgaggggcaccaacctgatgccagcaggattgttcctgtacagggtatcttacaacccctgttggagggtctcgtccagttgggtggcagagggaacaggacctgtttaacaaagtactttgactgtccctttgcggaggggggtgggctgccacgctcttccttcctctccgtggatcaggccagcctcctagtccgttgtgatgacggaacctggataccttggttagtgggaggtgtggagggagaggcccgagcaggaaccagggctgtgtgccgtgcttgcgggccagctagagttccaggtggtcgtgggcttggcgggccctgcactcagagcagccggccggccctgttggctccaggcaatgagggacttagcacccgggccaatggctgcggagagtgtactgggtcccccagcagtgccagcccaccggcactgcgctggatttctcgctgggccttagctgccttcccgtggggcagggctcgggacctgcagcccgccatgcctgagcctcccaacccctccgtgggctcctgtgcccccgagcctcctccacgagcgccaccccttgctccacggcacccagtcccatcgaccacccaagggctgaggagtgcaggcgcagggcgcgggactgccaggcagctccacctgcagcccccgtgcgagatccactgggtgaagccagctgggctcctgagtctggtggggccttggagaacctttatgtctagctcagggattgtaaatacaccaatgggcactctgtatctagctcaagcgcgaaagtcggcagcttcactcctgagccagctagaccacgaacccaccagaaggaagaaactccgaacacatccgaacatcagaaggaacaaactccagacgcgctcccttaagaactgtaacactcaccacgagggtccgcggcttcattcttgaagtcagtgagaccaagaacccaccaacgccggacacacactttttgagatgtcttggcagagtagtcttccagattctctggattcagtcctggttccaccacttgctagatctgtgtcattagaccaatcaattgacctctctgtgcctccgtttttgttccatcagagctgacacagctccagtccacgggcttctccgcggggtctaggatccacagtccctgggggctgaagacccaatggaagtaactgatggatcgcaaattggaaatcgtaacgtggccgacagacctgatcaggaaaactcgcgtccttatatgaaacagccccgaggc

SEQ ID NO: 3181 - DNA, 537 bp, Homo sapiens
  SIMILAR (22)..(141): 771254mologous to Homo sapiens Human secreted protein, SEQ ID NO: 6395,accession number G02314,Smith-Waterman Score=144.
atggacagacgttgggacaatttggagatctcagaagatgaaaggaagatatgggaaagtctggaacttctgagagacttgttgaacggttttgaccaaaatgctgatagtgatatggacaatgaagtccaggctgaggtcttctggaatgcagatgctaatgtgtccggaattggtgggttcttggtctcactgacttcaagaatgaagccgcggaccctcgcagctgcaggtggagttgcctgccagtcccgcgccgtgcgcccgcactcctcagcccttgggtggtcgatgggactgggcgctgtggagcagggggtggcgctcgtcgaggaggctcgggccgcacaggagcccacggagcgggtgggaggctcacgcatggcgggctgcaggtcccgagccttgccccacgggaaggcagctaaggcccggcgagaaatcgagcgcagcgccgatgaatacggcagtaatgatgacatgatcaaggaagagctgacaaccagctggaatatttgtaaaaaaaagactgcctag

SEQ ID NO: 3182 - DNA, 2496 bp, Homo sapiens; identical to SEQ ID NO: 1611
  SIMILAR (1245)..(1499): 501254mologous to Homo sapiens BC85722_1,accession number AC006486,Smith-Waterman Score=153.

SEQ ID NO: 3183 - DNA, 309 bp, Homo sapiens
  SIMILAR (306)..(25): 581254mologous to Homo sapiens BC85722_1,accession number AC006486,Smith-Waterman Score=271.
cttggaggggaagatgtgtacatagtgggcctggagggcggctgtggcctggaaggccagttcatggtatttctgcctctcattgggccccagggtgtaccaccacttgctcagcatctggctgacggtccagttatcctggttggggtgaccctggtgtgccctgccagggcctggtgccgcttgctgaagatcatgaccgccactcatgggacaccggatgtggtccttgtcccatttgttggggctgcgtccatccttctcagaagatgagccctgttccttgtgcagggcactgaggaactgggc

SEQ ID NO: 3184 - DNA, 1478 bp, Homo sapiens
  SIMILAR (368)..(463): 781254mologous to Homo sapiens bA476I15.3 (novel protein similar to septin),accession number AL137028,Smith-Waterman Score= 120.
atgcacaggcccgactccggcctcccaacaacgtctttggactcagctcctgcccagctcccaggggccctggtaggcccacaactttccgaagccaagctccccaggcccagctcaggcctcacggtggcctcttcaggctcagctcctaccctccaatggcatctgcaggccccaaacagcctccggttggtgggctcctctaggcccagcttgggcctcctggtagcctctgaaggcccaaatcgtcccgaagttggcctctccaggaccagctccagcctcctggctgcctctgcaggcccaagtcttcctcaagtcggcctggaagtgggcctggaagagctgcaagtcagcctccctgggcccagctccgtcctctcggtggcctctccagcctcatgtgactctcaggcagaggcagtggtggggcagccagggcagcgtcaagagtctgagccagagttgtccccactctcagtcggtcacccactccttgaacttgagatcagtgtcagtggtgctaaagccatcatcagcaatgacatcatcacaccctattcctcatggatgaccccattctgccccacagaagctgctccttggtatccgagctctggagtgtttgggctgcaactgacaggagttcagaggacaccccaggggcagtggcagtgccagtctctgacatgctccactcccacgagcctttgttacactcctgctagcccctggcttgtgggcttggcctctgagctgaacttctttcagtccttattgcaagtgggccaccttcacctggaaggccagttcatggtatttctgcctctcattgggccccagggtgtaccaccacttgctcagcatctggctgacggtccagttatcctggttggggtgaccctgctgcaggacaagttcgagcatcttaaaatgattcagcaggaggagataaggaagctcgaggaagagaaaaaacaactggaaggagaaatcatagatttttataaaatgaaagctgcctctgaagcactgcagactcagctgagcactgatacaaagaaagacaaacatcctgtgccgggggaaagctgggcagtttccctcctccgagcccctgtacataccatgaattgtgggaccttcagagcttttcacttttcggaaaatagctcctgctggggctacaagatggagtgtgaagagggccttgggccacagggaggcgcctgtggactagggggagttcatgcaccccttctttccccagaggggctggactcaggaaccagagttccaggccccaagcaggaaaggcaagaacaagaaaggacaggggagctggaccgaggctacaggagcctctgtactgggcttccactggtcaatcagggacaatctgagcatccaaagaaggctttcagcccatggggtaaaacaggaaacaacgagtctatagagatatccatcaaagttaa

SEQ ID NO: 3185 - DNA, 1657 bp, Homo sapiens
  SIMILAR (1120)..(1302): 431254mologous to Homo sapiens BC85722_1,accession number AC006486,Smith-Waterman Score=70.
gcctgcgttcagtgaggcctcccgtggcgtcagcatgttcgtgtggaggaatgtggaaggtcactctgcggccgtgttctcctggtactccatccccttcctgacccctccctgcagccacacgaggcccagcaacctgccagtcactcagtggcctccaaccagagaaaacaacctgccaagttggcagccgttgctcatgagcgtccaccaggcccagtccctcagtgccctgcgcaaggaacaggactcatcttctgagaaggatggacgcagccccaacaaatcagacaaggaccacatccggtggcccatgagtggcgctcatgatcttcagcaggcggcaccaggccctggcggggcgcaccagggtcatcccaaccaggataaccggaccgtcagccagatgctgagcgagcggtggtacaccctggggcccaatgagatgcagaaataccacgacctggccttccaggtgaaggtggcccacttgcaacaaggaccgaaagaagtccagctcagaggccaagcccacaagccaggggctagcaggagtgtaacaagggctcgtgggagcggagaatatcagagacgggcactgccactgcccctggggtgtcctctgaactccagtcagttgcagcccaaacacttcagagctcggataccaaggagcagcctctgtggggcagaatggctgcacacagtccagggaacctggctcagcctggcccaagccttctcccacagcggggtacacagcctggacggcagggaaatagaccgtcaggcactacgggaactgacacaggtggtgtctggcactgcatcatactctggcccaaagccttctactcagcatggagctccaggccactttgcagcccctggtgagggaggtgacccgtgggcagccctgctgccgcccacgagccttcaaagcccaggagtctggtcaacgcagcagagcgggccccctacggccccaacccctggggatgggggcccagggacgccttccaaggtggcctgtttcctcccaatggatcctgccaccttctggtgcaagagacctgaaagtgtgggcgacctggagctaccaggctcctcagtcatcagggtggagaagccgaggacaggctcagggaaccggagaccgagaaggcgctgtcctcttcactgcacgtaccctggaccagtgccggccctgatcatgcagctcttccaggcccactgcttcttcctgtccactaggccacagccgccctccaggcccactatgcacacatcttcccctccaagagcttttcacttttcggaaaatagctcctgctggggctacaagatggagtgtgaagagggccttgggccacagggaggcgcctgtggactagggggagttcatgcaccccttctttccccagaggggctggactcagctagctttgactcctctgtcacttgtccgctttggcatcacctcctcatagaagacttctatgactcccgagattctcaggagcatggcaggaatcaaggttccctagagaaacggctgactccatgtatggtgcagtatattgatcctggaacatctgttttgccagaaagcaagaaagccatcaaagtccaacaggatcacgtcaaaaagacatga

SEQ ID NO: 3186 - DNA, 1197 bp, Homo sapiens
  SIMILAR (898)..(963): 811254mologous to Homo sapiens BC85722_1,accession number AC006486,Smith-Waterman Score=91.
catgttcgtgtggaggaatgtggaaggtcactctgcggctgtgttcccctggtactccatccccttcctgacccctccctgcagccacacgaggcccagcaacctgccagtcactcagtggcctgcaaccagagaaaacaacctgccaagttgccagctgttgctcatgagcgtccaccaggtgggacagggagtgttgaccctgggcggccccctggagccacctgccctgaaagcccagggcccgcaaccccacacactttgggggtggtggaacctggtaaaagctcacctcccaccacggaggaggaggcctccggccccccaggagagccccggctggacagcccagtccctcagtgccctgcgcaaggaacaggactcatcttctgagaaggatggacgcagccccaacaaatgggacaaggaccacatctggtggcccatgagtggcgctcatgatcttcagcaagcggcaccaggccctggcggggcgcaccagggtcaccccaaccaggataaccggaccgtcagccagatgctgagcgagcggtggtacaccctggggcccagtgagatgcagaaataccacgacctggccttccaggtgaaggtggcccacttgcaacaaggaccgaaagaagtccagctcagaggccaagctcacaagccaggggctagcaggagtgtaacaagggctcgtgggagtggagcatatcagagacgggcactgccactgcccctggggtgtcctctgaattcctgtcagttgcagcccaaacactccagagctcggataccaaggagcagcttctgtggggcagaacggctgcacacacacatggccagtgaggacatagcgagtgatgaggcgcacacgatcatccatgaggaggagggggtgatgatgtcattgctgatgatggctttagcaccactgacaccgatctcaagttcaaggagtggcttttggcaaagtctatggtcccaccttgtcctcctcctacacatactcggatgcttcctcctcaaccttggcacccacctccttcttactgggcccaggagccttcaatgcccaggagtctggtcaacgcagcagagcgggccccctacggccccaacccctggggatgggggcccagggacgccttccaaggtggcctgtttcctcccaatggatcctgccaccttctg

SEQ ID NO: 3187 - DNA, 1479 bp, Homo sapiens
  SIMILAR (638)..(811): 411254mologous to Homo sapiens BC85722_1,accession number AC006486,Smith-Waterman Score=77.
atggttgctatactaagtaatagtgcacgtggacatttcaaaattgccaaaaatgtcaggatcatttttaaccatcacacaatgataacctgcgtcaatgggcttcctgggttaaacagtccgttgaagaattggaaggtcctttcggccgtgttctcctgttactccatccctgtcctgacccttcgtgcaagcaacacgaggcccagcaacctgccagtcactcagtggcctccaaccagagaaaacaacctgccaagttggcagccgttgctcatgagcgtccaccaggcccagtccctcagtgccctgcgcaaggaacaggactcatcttctgagaaggatggacgcagccccaacaaatcagacaaggaccacatccggtggcccatgagtggcgctcatgatcttcagcaggcggcaccaggccctggcggggcgcaccagggtcatcccaaccaggataaccggaccgtcagccagatgctgagcgagcggtggtacaccctggggcccaatgagatgcagaaatacaacctggccttccagcacatggccagcgaggtcatagcgagtgacgaagagcacacggtcatccatgaggaggagggggtgatgaatgtcattgctgatgatggctttagcaccaccgacaccgatctcaagttcaaggagtgggagccttcaaagcccaggagtctggtcaacgcagcagagcgggccccctacggccccaacccctggggatgggggcccaggacgccttccaaggtggcctgtttcctcccaatggatcctgccaccttctggtgcaagagacctgaaagtgtgggcgacctggagctaccaggctcctcagtcatcagggtggagaagccgaggacaggctcagggaaccggagaccgagaaggcgctgtcctcttcactgcacgtacactggaccagtgccggccctgatcatgcagctcttccaggcccactgcttcttcctgtccactaggccacagccgccctccaggcccactatgcacacatcttcccctccaagagcttttcacttttcggaaaatagctcctgctggggctacaagatggagtgtgaagagggccttgggccacagggaggcgcctgtggactagggggagttcatgcaccccttctttccccagaggggctggactcagatcagtactgccacatggagggtccagcactggacgtgaatgagtgtgcagagaaccctggcgtctgcactaacggcgtctgtgtcaacaccgatggatccttccgctgtgagtgtccctttggctacagcctggacttcactggcatcaactgtgtggcctcaggttcttttgacgtttccctcaaagtcgtcgacctgtttcttcaggttgatggtttgctgtccgttttaatgtgcagtccctctcaagtctattacccagcagaggtagtggaagagaaaagctattag

SEQ ID NO: 3188 - DNA, 455 bp, Homo sapiens
  SIMILAR (231)..(455): 981254mologous to Homo sapiens Human chaperone protein 6 (HCHP-6),accession number Y91945,Smith-Waterman Score=377.
  misc_feature (1)...(455): n = a,t,c or g
ctccgtaannnncccgcaatttccgtgtcgacgattccgtgccttgagcgaggaggagctggacaatgaagactattactcgttgctgaacgtgcgcagggaggcctcttctgaagagctgaaagctgcctaccggaggctctgtatgctctaccatccagacaagcacagagtcccagagctcaagtcacaggcggaacgactgtttaaccttgttcaccaggcttatgaaggttgtggaaaggaggagaacccctgctgaaattcgagaggagtttgagcggctgcagagagagagagaagagaggagattgcagcagcgaaccaatcccaagggaacgatcagcgttggagtagatgccaccgacctttttgatcgctatgatgaggagtatgaagatgtgtccggcagtagctttccgcagattgaaattaataaaatgcacatatcccag

SEQ ID NO: 3189 - DNA, 593 bp, Homo sapiens
  SIMILAR (328)..(429): 1001254mologous to Homo sapiens Human chaperone protein 6 (HCHP-6),accession number Y91945,Smith-Waterman Score=170.
ctcactctgtcatccaggctgttgtttgtaagatttctgcagcctcagagataagttgctaaaataaagaatgtttaagtcactctggagagctgagtgaaaactcatttcaaccttgggaagggccaggagggcagtgagctctccctcacccaggcctgagccatcggatggtggaactcatggtttggggtccttcctgaggaaaggctgtggccggaccccaggcagcatgcacacaccaaaatcaatggctgcagctctttgtgtacgtttcccttacctcctgggtcctcaactgtcttcccatcttgattctgtgcataggttgtggaaaggaggagaacccctgctgaaattcgagaggagtttgagcggctgcagagagagagagaagagaggagattgcagcagcgaaccaatcccaaggtaagccaggggccacgtttcatgaggacacttcatgaaaaggcctcataactagaagccaggtctgaaataatgaggtgctggtggattgttaaagtaaaaacatacaagctggtgggacaaaatttagcttatattatgtcaaagcctgatctttctggaag

SEQ ID NO: 3190 - DNA, 1098 bp, Homo sapiens
  SIMILAR (331)..(843): 991254mologous to Homo sapiens Human chaperone protein 6 (HCHP-6),accession number Y91945,Smith-Waterman Score=876.
gtttggcggggtgaaaggttgcgaagatggcgacggccttgagcgaggaggagctggacaatgaagactattactcgttgctgaacgtgcgcagggaggcctcttctgaagagctgaaagctgcctaccggaggctctgtatgctctaccatccagacaagcacagagacccagagctcaagtcacaggcggaacgactgtttaaccttgttcaccaggcttatgaagtgcttagtgacccccaaaccagggccatctatgatatatatgggaagagaggactggaaatggaaggatgggaggttgtggaaaggaggagaacccctgcttgaaattcgagaggagtttgagcggctgctgagagagagagaagagaggagattgcagcagcgaaccaatcccaagggaacgatcagcgttggagtagatgccaccgacctttttgatcgctatgatgaggagtatgaagatgtgtccggcagtagctttccgcagattgaaattaataaaatgcacatatcccagtccattgaggcacccttgacagcgacagacacagccatcctctctggaagcctctcaacccagaatggaaatggaggaggttccattaactttgcgctcagacgagtaacttcggcaaagggatggggagagttggaatttggagctggagacctacaggggcctttgttcggtctcaagctgttccgtaatctcacaccaagatgctttgtgacaacaaactgtgctctgcagttttcatcccgtggaatccgacccggcctgaccactgtcctagctcggaacctagacaagaacaccgtgggctacctgcagtggcactgcagctccccgctcctgcaggtccagcgtcctcacaggaacaccagggcctgtgctccggagccttccttcagacccttcctccacgtgcccacttgggatgcagaatgcagcggagctaggaccccctccacggcctggacctcggctgcagtaaagttacgtgaggcctgtctctcggggcctggaagtggcagccatcagttgctcttgctgacccctcggagcaagcgccgcacaggtggtggctga

SEQ ID NO: 3191 - DNA, 1990 bp, Homo sapiens
  SIMILAR (655)..(837): 621254mologous to Homo sapiens Human chaperone protein 6 (HCHP-6),accession number Y91945,Smith-Waterman Score=173.
tttccatcccgggattccattagaagctctgaaggtgatgtctgaacttgatatgacccagagctcaagtcacaggcggaacgactgtttaaccttgttcaccaggcttatgaaggtcagtggagggccggactttgtagaaacatcctggtaacagatattcgatttttaggaggtgcgatttgggaggtaagagaaactgtgcgtctggtgttccagaaaagtcattaaacagttacagaacatctccccaaaaccgagaggagattgcagcagcgaaccaatcccaaggtaagccaggggccacgtttcatgaggacacttcatgaaaaggcctcataactagaagccaggtctgaaaaggagaaaagggaccagagcctggttaatcaggtctgggaaagcactgtgataatgaaactgaaaccctggagaagaagagtggtcttggcaatcgggatagaaggcatagagggattcaaaggtaaaacagctgtttgtcttgaaatgagtatccgtcggagggctgttttcaccccctcatgtcagcatatcaacgagtacaaatacatcatttcctacctggtaagaagtttctcattgtgggagaaaggctgtaactcaggctcagaatttctgagtgatgtcagtgaatccggcagtagctttccgcagattgaaattaataaaatgcacatatcccagtccattgaggtaaagcacacaaccacctctccgagtacagcaagggctcgagttaatgaggcacagcacaccaagcagggttccattaactttgcgctcagacgagtaacttcggccaaagggatggggaaaggtaagaatgtctattggctgagttgtgttgtctgtgcaaagccttatttctgaacatttacactctcaacagaaattctggttccataggtctggggtgtcctctaggtaagtgattctcaaactctactgcacattggaatcattgggacacttagcactccaagcccacactgaagctcggaacctagacaagaacaccgtgggctacctgcagtggcgatggggtatccagtcagccatgaacactagcatcgtccgagacactaaaaccagccacttcactgtggccctgcaggtgagccgagcagccatcatctcctgcagacagagctctgggaggacccctcctcccaagcactcagtggtgaaaggatccctcaagtaagtcctggcctggctaaaatggaagcacactggtactgcatgcgggtcttcacagtggaaccagtttgcagctgtcagcgttggagttccacagggtgtttctctcaaagtcaagtaagttgaacttaggcctttcgggtcaaggaatgcctgtcaccttcactcaaccaggctttacccaaggttctatgccaccgtggggcctctagtggtctactttgccatgcaccgtctgatcatcaaaccatacctcagggctcagaaagagaagtgagttgacacgtcatgggcatgtcactagccagccctgtgcctcagtttcctcacccttaaaatggatgtgagtgctgccccaccgttcccaagcgagggctgtaggggacacactccacaccccacatgttggtcttgtcctctcttggtccagggtgggcgctgggggtctctaagccacacaaggaggtgccaggtgattgacgtgactgtgcccctgcagtgcctggtgaaggactcgaagctcatcctcacggaggcctccaaggtacagcagcaccagccaccacatgctatgtgctcacagatttgaacaggctgggcgcggtgactcaggcggggcgtcctgcatcaggtgatggtgctggacagtgaggccctccggataccaaagcagtgtgagtagccgtcccttcgcagtcaccagctaacgggggcggggacctcgaagcggctgctcagtgtgtcctgggagtctacaaatttggaaatg

SEQ ID NO: 3192 - DNA, 321 bp, Homo sapiens
  SIMILAR (75)..(230): 351254mologous to Homo sapiens Human glial fibrillary acidic protein GFAP mutant fragment 31,accession number Y21022,Smith- Waterman Score=69.
atgatgaaggaagaaaagaagaaccatgaaaagagtaaacagccatccatcctcacagcagagtctgccagggaaggcagagagagggcgaacagggtggaggaagtcagtgttgctacccggagagagggagcggcctggatccgctcgaatcccagaaggggcccgattcccctaatccgggggcttaaccgggacgaccccttccacttgcgaggtgctggcatcaggaccgagaaaggaacggaagctctctcctattttcggggttcagaggagcttccgaccgggagttggcgaggttacttcaaattttcctaa

SEQ ID NO: 3193 - DNA, 470 bp, Homo sapiens
  SIMILAR (385)..(212): 371254mologous to Homo sapiens alpha-1 type I collagen,accession number J00113,Smith-Waterman Score=75.
  misc_feature (1)...(470): n = a,t,c or g
cacaaacgagtcgcaggaggcggggaccaatgaaanccaggacgtgcgtgttctctggcacaattggaagagaaaccgtgcttccttgggtcccaaggttggcacgagcatcgacccgcagccttcctgggagtacccagaaatagtgttccccttccccggggctcgggacaggggacaggggaccccacacccgaccgggcctctagcgggggctgccctgggcccctcgacagttcaatccctccagggagcggcctggatccgctcggaatcccagaaggggcccgattcccctatccgggggcttatccgcgactgaccccttccacttgcgaggtgctgcatcaggaccgagagaggacgggagctctctcctatttcggggttcagaggagcttccgaccgcgagttggtgaggttacctcaaattctcctcacgaaaccgtttccccaccccgcaggaggcg

SEQ ID NO: 3194 - DNA, 1197 bp, Homo sapiens
  SIMILAR (149)..(45): 741254mologous to Homo sapiens Protein of clone CI480_9,accession number W57899,Smith-Waterman Score=137.
ttgccaaatgattggggcttcagagcagccggcagggatttgtccactttgtcagatgaggcgccaaggtcagggttgtaagggaagtcccagtcctcaaggaaaatggcttccagttggctccgcaggccgcccttcccattttgcgtgggttcacattthattgtaacttggaagcccacccttctatcctactcctggagctgtcgtccccamagggctcagagadttagccttgctccacagcaaacagcccagaggccccacctgggcaaaagcaaacaaaacagdtwacgttcctttaccggcaggtggcagatgctctgcccaggcctgcggaagccagctccggtctgtgtgttaattccttcccaggaacttccggcccaccagctccattccagcctccactcggctcagctccgcggcttccthcgagccaggggtgggtcctgcatcgccatctgctgggccgcgcggcacggccggttttcctggagccaagaagaagtcggaggcttgcagggcttgaaggcctcttcaccgtgccctccagggagcctagctggccgaagtattcctgctggaacttctggaagtcttcctcggtgaacgacggtgccctcagccttcttcttcttggtcttggccacaggccggtcacaggccttgcggccccggttctggcgcaaaatctggcgagggtgcgggaccgagggcccatcatttcaagagcagaggaggcccgcaaaggtcacagggtggtctcgacactctcgcttccggtactcgtctgtgggtagcaggcagggagcaccatttcagattcactccccctggaaccattctcagtccctggcgcttctctccccactagggccgtagtccacgaggaccaggacggtggcgtgttctgtcaccttcgtatgtccagggccccgctccgcgcctggcacacagtaggtctagcaataccgggcgaacgcttcaagccctgcctcaagcgccacctcctccttccggggccgtttcaccggagcccctctcggcttggcctgacctggagggtcccggggggctgtaggggaagagagaggaagagacccaggtcagagggcgcgcagcgttcccatgccactggggctcgcccacgagcctcacactacttccgacctggcagtccctgtcgtctcggcg

SEQ ID NO: 3195 - DNA, 732 bp, Homo sapiens
  SIMILAR (262)..(417): 1001254mologous to Homo sapiens Human secreted protein, SEQ ID NO: 5918,accession number G01837,Smith-Waterman Score=284.
atggcggcgcggccgcggcgaggtccctcagaggcggtaccagcgcatgcgcagcgcggagtcccggcccgggacacaagatggcggcagcggcgctggggagggcgaggcggaggcggcaaaacgggcggtcgagcagaactgcgcagttctgtggacgagcttgttggcattgactattccctcatgaaggatcctgtggcttccaccagcaacctggacatggacttccggcccctagtgtgggttgtgggggcggccatggagctgggcagctgcttcaagacctatgaggacttcaaggagtgcttcagcgcctacaaaagggagaacaggtgctccttcattctcagggactgcgtctccgtccgcttccacaacctcaaccatggcacctccatccgcgaagacatcctgtaagggcgggcggggcggggcgggccaagagggtggggaggaggctggacctccggagggctgcctggaggaggaggggtgcataggcacgcattgggctgcgtggccattcattcaacaggcactcattgagcacctgctgtgtgccttgtgaagagagctaagcctccacggccattggtttttgaccacccactccactttcactccattcacaggcttttctggaatttataactgcagtttctcccattgttttgagcagctgcagcaacccaaatacaaagtatggctttcataaacggataaaaacaa

SEQ ID NO: 3196 - DNA, 1481 bp, Homo sapiens
  SIMILAR (630)..(1232): 301254mologous to Homo sapiens Human pp392_3 secreted protein,accession number Y28682,Smith-Waterman Score=239.
  misc_feature (1)...(1481): n = a,t,c or g
ccggggaggcggcggccagtccagaggccgagcagtttccggagagctcagagctggaggacgacgacgccgagggcctgtcctcccgactcagcggcaccctcagcttcaccagcgccgaggacgacgaggacgacgaggacgaggacgacgaggaggctggccctgaccagctgcccctcggggatgggacttctgtggacgagcttgttggcattgactattccctcatgaaggatcctgtggcttccaccagcaacctggacatggacttccggtgcctgatctgtggcctgacatgcagcaagtactcaataacttgtggggggctggcctgtgtttgggaccataccacgatcctggagctccccattgggcccaaggaggtactggtacttcttctgccaccggcggcacaccatggcttcaccaaccggctgctggctggtgtgcagcagagccaaaatgtgtcggcatggcaggtggtaccattgttgaaaggaacagctgcagctacagccatctttgctaacctgcgtggccgtcaggcagaagaagaatgtgcccatcgagaaggcccccttcctanaaaggaatttgccgatttcggacccaccatcaaacaggattttcgcctgttggggcaaaccagcgtggaccgcttgctgcaactctctcagggccaggcggtgaagggcaatcagctgttgcccgtctcactggttggcatgctggacaccttgcaccagagtggctctgaactagcctacaagctgtgccacaatgagtgggaggtggtacagaactccacccacctggtggacatggctggctcttcagtggacgttcagctgctagaggactctcaccaggttagcaaagatggctgtagctgcagctgttcctttcaacaatggtaccacctgccatgccgacacattttggctctgctgcacaccagccagcagccggttggtgaagccatggtgtgccgccggtggcagaagaagtaccagtacctccttgggcccaatggggagctccaggatcgtggtatggtcccaaacacaggccagcctgagaagcaaggacggaacgacatgattcaggacctaagcagggagttagcaaacctgctcatgcagaccgaggggccagagctggaggaacgctactccaccctgcgcaagattgtggatatctgggctggcccctcccagccatctgagctctttcagcagccaggagactttaaggacgtgggccgcctccctttcctctggggaaagcaagaagaaggggagggattccctcctgctacagctgtgatgcattattgaagcactttagctgaagcattggaccacaaacacttctccttggaagtgtgagagtttaaagtgggcaggacatactagggtttagcattttagccaatgtcttcctaggtggggctaggaatattgttacagtagagaggg

SEQ ID NO: 3197 - DNA, 2104 bp, Homo sapiens
  SIMILAR (557)..(1114): 291254mologous to Homo sapiens Human pp392_3 secreted protein,accession number Y28682,Smith-Waterman Score=233.
gacccctggtgtgatcttgggcccgggctgggaccagcccctagtgtgggttgtgggggcggccatggagctgggcagctgcttcaagacctatgaggacttcaaggagtgcttcagcgcctacaaaagggagaacaggtgctccttcattctcacttatctttataaggggtggggggtggtcagcacctttctcattgttacctctaccttccctaggtatgtgcaggtgaaatttgtctgcattcggacccaatcaaacaggaagagaacgcgggaggcagacatgtgcccagcgtacttgctcctaaggtacaacgagagactagatagactatttatcagtgaactaaacacacagcacatacatggtgactctaaagtggctagtcctggaggagacaccactggcaaatctcaaaagacaatgtgcctgcagagactccagcctgtgcagcccacaaccaaaaaagaccttgacactgccgagaagtccctggttgagccatcgttttgcctagataaggtacaagtgtcctcaaagccagagcaggaaggcatcactccttctgacctggccaagatagcaaaagtgatgaagaactttcttaaggtagatgagggttccatggcttccttcagtgtgggtgacagccagcacctggaccggctcagcttccagagcagtaagatgaccgacctgttcatccgcttcccagagaatctcttgctacaccgggtggagaacacccagggccacatcctctatgctttcttggtggagaacaaggaacgagaaagtcgagtggtgcactttgctgtgctcaaggcggagacagtcacctctgtggccaagatgctgagcatcttcacagagttcaactccgattggcccaaggtcaaggtggtctttgtggacccttcattccattaccgggctatcctgcaggagatctttcctgctgcccgcatcctcctttccatctaccacacaacccgactcttggagaagaagttgcatcgtagttcagcaaatccatcctttaaaaggctcatgaaggaagccctgcgggaggccgtgtttgtcacttctgaagccagcctgaaaaatctctgccagatgtcccaggccgtactggatgaggatctcttcaacttcctgcagggcccactggttcacctgtgaactgctgtggtacatgcatgttaggaagggcctgcttgcgtgtaacacctacatggacagcctagacattgtcaccagcaaggtgtcaagcctctttcgggaacagcagtcgctgctggactgcatcctctgctttgtggattacatagacttctttaataccaaaggcttgaagaacttgcccacacctcctcccaaattaaagagagctcggccggcaagcattgccactgaagtccaagaagggttttgggaatctgtggagagagccttaccagcctccctgcagaagagacccaagccagacgcacagcaggtacaggtacagcagcagttcacaagtgccgccctcgcaggttggcatgctggacaccttgcaccagagtggctctgaactaggcctacaagctgtgccacaatgagtgggaggtggtacagaacttccacccacctggtggacatggctggctctttcagtggacgtttcagctgctagaggactctcaccaggttagcaaagatgggctgtaagctgcaagctggttcctttcaacaatggtaccacctgccatgccgacacattttggctctgctgcacaccagccagcagccggttggtgaagccatggtgtgccgccggtggcagaagaagtaccagtacctccttgggcccaatggggagctccaggatcgtggtatggtcccaaacacaggccagcctgagaagcaaggacggaacgacatgattcaggacctaagcagggagttagcaaacctgctcatgcagaccgaggggccagagctggaggaacgctactccaccctgcgcaagattgtggatatctgggctggcccctcccagccatctgagctctttcagcagccaggagactttaaggacgtgggccgcctcccttt

SEQ ID NO: 3198 - DNA, 1149 bp, Homo sapiens
  SIMILAR (78)..(25): 501254mologous to Homo sapiens Amino acid sequence of salivary protein CON-2,accession number W50193,Smith-Waterman Score =44.
atgcggtgcttctcccacggcttagctgctgtgtgccttgccaccttcctgtggacccgggcactcctgcagccctggtcggagatcggcacgccagtcagcatgaggacagtcagcgaaccgatatatgggtggacgtcctctgaggttgtagaggtctatagcggcccacgagtcagcgcgcccgtggtcgtatctgtcgtcactgctagtcgtgctggtgcttcctcgcgctacagacacatccgacgcgtacgagtgcgctgcggcccggcagctctgctcaccatcctccatcctgtcacattagactgtgccagcatcagtagcatcgtctgtcttattgaattctggcagcgatggtctaggggtgcttgtgtgccccacggtgcagatgagaagtctgatcctgggggtgctggcaagtggaagtgccggccccgtctcctgctgcctgctcatggggccctcgaagcagatgtgggtttgctgagtgaggagaggaggagtgtctcaggatctggcctgcacggtctccttgccccctgccaggcccgcgtgtctctctctgatgacagctcggagggcttccctcgggccgacaccttcctggagaccctggatgtatccggcaatcgtggcaataattcctccctatactaccccatcccagaagcccaagtacccagagttctcaatgttttaagggaagaggcaggtccactctccacctgtgactgcctgaactggagcataatgctggcattgattgagcaacagtcctgttccaagcaccatggcagggcaggatccacgggccgctactttcatctgggcatgtcccagcagcacaggaaactgatatccagggctgcacaggtggcgcagaaatgcgagatccgaggggagagatccctgggcttcagctgcctgggagtccttctggaagaacttgattctgagctgggcctgcagcaccctcatggctgtgaagtggcacctcatggtggtttcgatgtttggatcctgacggcggatgaccttgagcgtttttccccgggcttgttggccatctgcaaatcttctgccctggatgtgtgccaccgtgtgttcctcaaagcaggcctgtgcttcctgtgtggaatttga

SEQ ID NO: 3199 - DNA, 108 bp, Homo sapiens
atgggatgcacctttcctgttcccaagaaaggaaaagaagaggcactcagcttcagccagctgattcaactccgcgttcagggccgagtgtggactggagctctgtga

SEQ ID NO: 3200 - DNA, 450 bp, Homo sapiens
  SIMILAR (319)..(191): 401254mologous to Homo sapiens PNAS-146,accession number AF279900,Smith-Waterman Score=71.
atgggcgatgtcagcctcagtgtgtttgctcagctgctgggctctcttgggaccatagaggactgcagcaccaatggtggaactccaggcgtggtgacaggatgtgaccaggttcccccacccaggtctgtggtcagcctggctgtgctgaatggtggaagcagggagaaagatgaaggtagaaacgcttacacactgaagatgctgctggaacaccgcagggactgggcggacggggacagcgttaacaagggcggctgctgcagtgtgggtgaagggccagaccttgtgtcaggtgcccctgcagatataattcctcgagtccacaaaacaatgcaaccaggtggatctgaacatccccacttcacagatgaggaactcgaggtcagggctgtcagtcttggctacctgcatggccttggggccctgcatggtctcacccctgcctaa

SEQ ID NO: 3201 - DNA, 419 bp, Homo sapiens
  SIMILAR (8)..(205): 371254mologous to Plasmodium falciparum merozoite surface protein 2,accession number AF217027,Smith-Waterman Score=77.
tttcgtggctggggtaggggctcattgggagcccacggagcgcggcggcggctcgggggccgagttccctacaacaaggatggcggcgacgggcgcagggagcggggcccggctctccttgcctcgaggctcctctgattccactcgcgtggctgcgcggccctggcagcggccttcgtcccggggctacagctcatcttccacggaccctttcatttcctcctttggaaattaaagacagcacatgctcatttatctcacactcttttatgaaggaacagaatgaaagtcccacagttgagagccaagaacaggacctggggggtacactgattcctagtacacagttgactacagaacaacaacaacaacaacaaaataaaccaagtacaatgggaaaaactgaagaaaatagttaa

SEQ ID NO: 3202 - DNA, 471 bp, Homo sapiens
  SIMILAR (160)..(414): 1001254mologous to Homo sapiens Human secreted protein clone rd232_5 protein sequence SEQ ID NO:58,accession number Y94926,Smith -Waterman Score=440.
atggtccacaagtggcccatctggaagacttcatatacgaaagatgctgtggctcttccatatcctctttctcccaaccaatatccgctccttgatgccgcttcaccacgattcaatggggcgccctattcctctccgtgcccccccgattttaacattatggcagggaggcatcagaatcgtagttttcctcttccaggagttcagtcaagtggtcaagtacatgcatttggaaattgttcagacagtgatattttggaggaggatgctgaagtgtatgagcttcgatccagaggaaaagagaaagtccgaagaagtacatcaagagatagacttgacgacattatagtattaacaaaagatatacaagaaggagatacattaaatgcaatagcccttcagtactgttgtacgtgtatcatggacaccctcatgaccatccctcaaagccttattaactcattattttaa

SEQ ID NO: 3203 - DNA, 436 bp, Homo sapiens
  SIMILAR (377)..(418): 781254mologous to Mus musculus B cell phosphoinositide 3- kinase adaptor,accession number AF293806,Smith-Waterman Score=52.
gggtgcccagaggatgcgacatcctcatcgtctacagcccggatgccgaggaatggtgccagtacctgcagaccctgttcctgtccagtcggcaggtccgcagccagaagatactgactcacaggctgggccccgaggcctccttctcggcagaggacctaagccttttcctcagcacccgctgtgtcgtggtgctgctgtccgcggagctggtgcagcacttccacaagcccgccttgctgcccctgctgcagagagctttccatcctccgcaccgcgtggtcaggctgctctgcggcgtgcgggacagcgaggagttcctagacttctttccagattgggcccattggcaggagctcacctgtgacgatgtatgccttagacctacgtggcagctgtgaaaaaagccatttccgaaggtaaggatttcttctaa

SEQ ID NO: 3204 - DNA, 888 bp, Homo sapiens
  SIMILAR (289)..(744): 371254mologous to Mus musculus testis-specific chromodomain Y -like protein,accession number AF081260,Smith-Waterman Score=234.
atgaggattcggcgatggagccttatgtttgacagtgtttggcccatgtgtgccttctacagctgggctaaagcttctagaacattcctgaaagcagatgggctccctagaaggaagcagtgggttcttgtagaggccttggcaggtggaggagttcttggggtcaaacaaattacaattcaggttctgtttgaggtgctcctgagaagaggaaaagagtcagaaacctacacaaagatgtatagaagattaggtcctgagagatgccggagatcaaagtatgctggggttgaaaggattgtagacaagaggaagaacaagaaaggaaaatgggagtatcttatccgatggaaaggctacgggagcaccgaggacacgtgggagccggagcaccacctcttgcactgtgaggagtttattgatgaattcaatgggttgcacatgtccaaggacaagaggatcaagtcagggaagcagtccagtacctccaagctgctgcgtgacagtcgaggcccgtcggttgagaaactgtcccacagaccttcagatcctggaaagagcaaggggacctcccataaacggaagcgaattaaccctcccctggccaagccaaaaaaagggtattcaggcaagccctcttcaggaggtgacagggccaccaagacggtgtcttacaggactacccccagtggtttgcaaataatgcccctgaaaaagtctcagaacgggatggaaaatggggacgccggctctgagaaggatgagaggcactttggaaatgggtcccatcagcctggcttggatttgaatgatcatgttggagagcaagatatgggtgaatgtgacgtgaatcacgctacactggcggagaacgggctcggtttgtag

SEQ ID NO: 3205 - DNA, 435 bp, Homo sapiens
  SIMILAR (174)..(434): 961254mologous to Homo sapiens dJ924G13.1 (KIAA1221 (putative zinc finger protein)),accession number AL136109,Smith-Waterman Score=448.
tttcgtgcgaaaagcggggagcggaggggggccgctggagccgagtagcgtacagagcggcgtgtgacgcggggacgccgcgtgctcccaacgtcgccccggtttgacgcacacggcaccaaactgtttgatttaattttggatgagatcgttcttgcagcaagatgttaataagacaaaatctagctatagagaagtctgaaaccacttctgaacacacttgtcagctctgtggtggttggtttgatactaaaattggattatcaaatcatgttagaggccacttgaaaagacttggaaagacgaaatgggatgctcacaaatctccaatctgcgttctgaatgagatgatgcaaaatgaagaaaaatatgaaaaaatcttaaaggcattgaacagtcgtcgtattattcccagaccatttgtagctcaaaaac

SEQ ID NO: 3206 - DNA, 606 bp, Homo sapiens
  SIMILAR (553)..(353): 361254mologous to Hordeum vulgare pZE40,accession number X68600,Smith-Waterman Score=89.
agaccatcattcgcccccaattatgtttatcccctcgttgagtttgatgatcacacaaaatctgaagtctaaatataaacgtttttatattcaaagtcaatattcaagaaaacttttccactaatgttgctaaaccatagatggatcccaacaagagttgtctgtagaagtctcgtaacaagtaacctttagctccaccacctaagtttccaatcactgagaagagtctgggacaactcatcttcaggttcacgggagaagtggagcacacctgctttcctctggcagagtaacttcccagggacacaaaggccagagaatcagacagtttggtgccgtgtgcgtcaaaccggggcgacgttgggagcacgcggcgtccccgcgtcacacgccgctctgtacgctactcggctccagcggcccccctccgctccccgcttttcgcctccagccccggttcccacggcgcaggcgcgctgctttcccgcctctgccgggctgcgggccgcgggggtggccagcgaggagctcccgggaagcttcgcgctggtggagcgtctgggccaattagacaaacgagggcagcggaaacagtgcaccactgtt

SEQ ID NO: 3207 - DNA, 5664 bp, Homo sapiens
  SIMILAR (1484)..(2776): 1001254mologous to Homo sapiens dJ924G13.1 (KIAA1221 (putative zinc finger protein)),accession number AL136109,Smith- Waterman Score=2274.
  misc_feature (1)...(5664): n = a,t,c or g
gagcggaggggggccgctggagccgagtagcgtacagagcggcgtgtgacgcggggacgccgcgtgctcccaacgtcgccccggtttgacgcacacggcaccaaactgtttgatttaattttggatgagatcgttcttgcagcaagatgttaataagacaaaatctagactaaatgtgttaaatgggcttgccaacaatatggatgatttgaagataaacaccgatattactggtgctaaagaagaactcctagatgacaacaattttatctcagacaaagaggagcggagttcataagcccaanaggattgtcaaacatcatttccagaaaaataatacggttgactctgccttgaagaactgtcaaaggacaaatctgaaaacgccttaagtggaggccagtctagtcgtatttatacatagctcggtgctcctactgtttcgtagtgaaaactttatcttgcctaaaggagctgctgttaatggaccagtttcacactcctccttaactaagacttccaatatgaataaaggcagtgtttcattaaccactggacagcctgtggatcagccaacaacagaatcttgttcaactttgaaggtagcagctgatctttcagctgtctacaccacaggaaggcaagtcaaccaccaaggttttatttttggttatcagatgtagcacatgcttaagaatcccacccattccaataaaaaactacctacctctgcttcagttggttgtgacattcagaattcagtagggagtaatataaagtcagatggcactttaataaatcaagtagaggtgggtgaggatggtgaagattttattggtgaaagatgattgtggtcaatacagtaacgggaatttcctcaggtacagatggatttaggtcagaaaatgattacaacctggattccccaaaaagagttcattcaatttcttatgactaatgaggaaacagtagataaagctccacctcattctaaaataggtctagaaaaaaaaagaaagcgaaaaatggatgtaagcaagataactcgttataccgaggattgctttagtgattctaattgtgtacccaataaatcaaaaatgcaagaagtagactttctagaacaaaatgaagagctacaagcagtagactcacagaaatatgcattatcaaaagtgaagcctgaatcaactgatgaagactttagaatctgtggatgccttccaacatctaatttataacccagatgagtgtggagaagagagttcacctgttcatactagcacttttctttcaaataccttaaaaaagaaatgtgaagagagtgattctgagtcacctgctactttcagtaccgaagagccatcattccacccctgtacaaagtgccatgtgaattttagggagaagaagcacctccacaggcatatgatgtatcatttagatgggaatagtcactttcgccatcttaatgtcccaaggcccatatgcttgtagagaatgtggacggacatttcgagatcgcaattcacttctaaaacatatgattattcaccaggagagaagacagaagttgatggaggaaattcgtgaattgaaagaacttcaggatgaaggaagaagtgcacgattacagtgtcctcagtgtgtgtttggtaccaattgccctaaaacatttgtgcaacatgctaaaacccatgaaaaagataaaaggtactactgctgtgaagagtgtaacttcatggcagtgacagaaaatgaattggaatgccatcgaggcattgcacatggggcagtggtaaaatgccctatggtcacttctgatattgcccagagaaaaacacaaaaaaagactttcatgaaagactctgtagtaggatcatccaaaaaatcagctacctacatatgtaagatgtgtccttttactacttcagccaaaagtgttttaaaaaagcacacggagtacttgcattcatcatcatgtgttgattcatttggtagtcctcttggacttgataaaagaaaaaatgacatccttgaagaacctgtagatagtgatagcactaaaacattaactaaacaacagtcaaccacatttccaaagaactctgctttaaaacaagatgtgaagcgaacatttggatcaacctcacaatcaagtagtttttcaaaaattcataagcggccacacagaatacagaaagctcggaaaagcattgcccaatcaggtgtaaacatgtgcaatcaaaacagctctcctcataagaatgttacaattaaaagcagcgttgaccaaaaacctaagtatttccatcaagcagcaaaagaaaagtctaatgccaaggcaaatagccactatttgtatagacacaaatatgaaaactataggatgatcaaaaaatcaggtgaatcatatcctgtgcatttcaaaaaagaagaagctagttcattaaattctttacacctgttttcatcatcaagtaattctcacaacaattttatttcagaccctcataagcctgacgccaaaaggcctgaaagcttcaaagatcacagacgtgtagctgtaaagagagtaattaaggaatctaagaaggaaagttctgttggaggggaagacttggatagctatccagattttttgcataaaatgactgttgtcgttttgcaaaaacttaattctgctgaaaagaaagatagttatgaaacagaagatgaaagttcctgggataatgttgagttaggagactacactacacaggccatagaagatgaaaacctatagtgatattaatccagagcatgtaaatttattccctttatttaagagcaaagtggaaggtcaggagcctggagaaaatgctactcttagttatgaccaaaacgatggcttttattttgaatactatgaagatactggaagtaacaactttttgcatgagatgcatgatcctcagcatttagaaactgcagatgcgtcattgtcaaagcatagttctgtttttcattggactgatttgtctcttgagaagaaatcgtgtccttactgcccagcaacatttgaaacaggtgttgggttatcaaatcatgtcagggggcatcttcacagagcaggattaagctatgaagcccgtcatgttgtatcaccagaacaaatagccacaagtgacaaaatgcagcatttcaaaagaactggcacaggaacacctgttaaacgagttagaaaagctatagagaagtctgaaaccacttctgaacacacttgtcagctctgtggtggttggtttgatactaaaattggattatcaaatcatgttagaggccacttgaaaagacttggaaagacgaaatgggatgctcacaaatctccaatctgtgttctgaatgagatgatgcaaaatgaagaaaaatatgaaaaaatcttaaaggcattgaacagtcgtcgtattattcccagaccatttgtagctcaaaaacttgcatcaagtgatgactttatatctcaaaatgttatacctcttgaagcataccgtaatggcctaaagactgaagctctgtcagtgtctgcatcagaagaagaagggctgaatttcttaaatgaatatgatgaaacaaaaccagaactgcccagtgggaaaaagaatcagtctcttacactcatagaacttcttaaaaataaaaggatgggagaagaaaggaattctgctatttctcctcaaaagatccataatcagacagcaagaaagagattcgttcagaaatgcgttcttccattaaatgaggatagtccgttgatgtatcagccacaaaaaatggacttgactatgcactcagccttagattgtaagcaaaagaaatcaaggtcaagatctggaagcaagaagaaaatgctaacattacctcatggtgctgacgaggtttacattctccgatgcaggttttgtggcctagtctttcgaggacccttgtctgttcaggaagactggattaagcacttacaacgacatattgtaaacgctaatcttccacggactggagctggcatggtggaagtcacgtcactacttaaaaagacctgccctccattatttgttttcttcattttctctacttaatggccgaagcagctttcataggaaccaggaaaccttttacatagccaggttgaattggatgtaaatttgaaattctttttttttaagccacattaaattatctgtttataaatactaaagcaggaaaatggggggaaagtgaattacagcgacatcagagcaaattgaatacttaaaacagtaaggagtctatatattttatatagggtgggaagatgtgtttttaaggtttatgaagttttgttggttaactgggttcactcagtaaaagagcagtacatgtaagcagccattaataaactgttgcacatggatacttatagacagacttattggacaattatgttttttgcagtgttaccagaatcaaggctcttgttaattcccacaagaacttgcatagaaaaataagatattatattttgtttgtatgtatttagtgttttgtataataccaagaaccgctgactaaatttactcaaattagggcattaaatatcatgtacttcatagtttgagactgttcactcaaataggggcagagtactattctatctaggatgtgtaaggtgtttttttttkaaaatcacatgggaacggttttttttatactaaaaagtgggaggggagatttgtttaaacaagtatttctaaaaggaaatatgtacatagttctggggaaattatttgtgggtaaggggaatattcctttactccagttgcatttctcagacaataaagtggtgcatccatgctacctcctactttgtccaacaaaggtgctatttaccctttacatttttgtatcataatagattttaaaaatctaatggttccttaattggcaagaccattcttttgttaacaggtttgtttctttttaatgttttaccctaaaatttgacatgcttacaggacaggtttgcctcttactttatttaacattgtagaaatgtaattaataaacaatgctcactacacagtttagaatagacgttctcatttatattatcttccaaatttgatcagttagcaaaacttaatacaccaattaaaatatttctacatatgagaatgtttacaatttaaattttagaacttgttttggatgtgattatatgtccgaaaaattgtggaaccctatgctcatgctaagaaccgacataacagaattactgaaataaatgtgctgtgaggaatggaaaatatggtgcaggtgtcttggtcatgataaattgtgattctttttaaaaattttttccaaaaacaattaggtattttaatctgaaatcagattcctttacaaacaacaagtttttgtatgcaagcaccattttatttcatgtagtatggctaatactatagttgaaccaaggatatgcattgattctttgcttcgtatgtaaataaagttaaaaacagttaaaataaggagtattttggtagagtatatacatacctcactgccagtgaaattgctttcctacggtatatctccttaccagaaaaatctctaaataaaaaaaggtttaaaaaaaaaaaaaaaaaa

SEQ ID NO: 3208 - DNA, 551 bp, Homo sapiens
  SIMILAR (17)..(97): 531254mologous to Homo sapiens Human secreted protein sequence encoded by gene 33 SEQ ID NO:199,accession number B24573,Smith-Waterman Score=79.
ggtcgacgatttcgtgccaaggggaagctgcggtgtgtggagggagtggcaggcttgtgcatggttttgggggccaccccactggagctctctgcctgttaggcaggtcccccagtgatacaggaccccagggcacccaatgctgccctgcaagtagacaccaccaggctgcggccctgggagtggccacagaccaaggatggtcaggtcagactggccttgtttgataggcaagacaaccctgcagagttcaggtccaacagttcccctagggctaaagtctcttatgggagcaagtcaagcctagagggatggccctcactggccatgctctgctgcggactctcccgcaccaaaccttctgggctccacatcagctggtgtgctgcccctaccacttctctaagcagctctccctgccaactgaagtgtccgtggtggttgaggggtctcctcctgctgggattccagagacccttcgggagagtggattgccccttgccagttcaactcacccattgccccccagagtcactgggggctatgaatga

SEQ ID NO: 3209 - DNA, 505 bp, Homo sapiens
  SIMILAR (437)..(469): 721254mologous to Homo sapiens Human Zneu1 partial polypeptide,accession number W88389,Smith-Waterman Score=39.
ttacattttcctcctcaaagctttattattattatttttcttctcaaaacactgttttgctttgggggagcgcgggtccttggccacatcttgagtcttgagatatgtcttcagcatctcctgctcctccttgggaaacgctccacccgccagtgggcctgcgccctcctctcctttttctgggttcgggtccacctcgtttcccccaccctctccagggctgactgcaaatcggagggcgactgcagaggcggaattctgggcagagcgggggtctccccagcgggccacgtcccaccagcaggtggcggtcgatctgcaaggcctgcaaggtgcccggacagaaacttgagcacatattggtgccgctgtccgagaagagctcagacgagtctccccgagcccagctatctgcatccgcgaaaaagcggggagagaagggcacgggctctccgctggagcgactctgtgattcagacaccgcaagctgctttcggaagggctt

SEQ ID NO: 3210 - DNA, 306 bp, Homo sapiens
  SIMILAR (94)..(29): 341254mologous to Apis mellifera=worker bees, venom glands, Peptide, 50 aa mast cell-degranulating peptide, MCD peptide, peptide 401,accession number S78459,Smith-Waterman Score=47.
atgagggctgccgtgaaggagcacccgagcacatgtgaggcgtacacgtgtgtccgagacagcccaccacgaagggtgatggggtcagaaaccacttcggtgctcaacaccgggaagaggcccccgtggcacacaggaccctacaccagctgtcatgaggcacagaggggtgagcaaggaaacagaagtcctacagttattccaaatctcacgtggtcaagtgagcaggagggctctgaaaagtcgaaagcaacaacgtacaagagaacactgacaccaggagaccagccacaaacgcaaacgtag

SEQ ID NO: 3211 - DNA, 684 bp, Homo sapiens
  SIMILAR (496)..(600): 681254mologous to Homo sapiens Human secreted protein fragment encoded from gene 42,accession number Y07785,Smith- Waterman Score=106.
atggctaccgccttgtgctgccgcccggaaccgctgggcgcgggtgaaaggtcactcagagcggcgcccggcgcgaccattcgctgcggcgcatcccggcagccaccgcggcgacttggcggcgggtgccatgcgtctggagcttcacattctctgccccccacccaccgcgccggcgctcccttgtcacgcctcgggaagcgcgcacctgccaagcagaatccaatctcagatgtcactgatgaagttgttgcagagaaatatgataacagctgtctagacctatcagttattgaattgagatgtcctgtagcctttgatacacactccttcaccttgctcaccctccacttgtccgcatacctcattcttcctggatgtgggacaaaaactcaggacccgctaaatggcggagctgaaagggctgtaacacaaacagggctgaaacacaccccttgtttgccccatggagggcaacgagagggaaagagaggaaagagaaggagagaagagctgtggcccttcaaggagcccagacctaggagctccctgagccagggctatggctcactctttggggctctgcagtccctggcgtctccaagcttccaggcaccaccacattccctggtgccaccaatggaagctgcttgcagtatgcctggtccagcagcagccttgtag

SEQ ID NO: 3212 - DNA, 973 bp, Homo sapiens
  SIMILAR (325)..(546): 981254mologous to Homo sapiens unnamed protein product,accession number AK001984,Smith-Waterman Score=390.
atgactactagagtgagaacttgggttcttggcaccatcactgatgcggctctgtggctcttcccatacgataggaatgaagacacacacgagcatggaaacatccatggtagttctacagaagtgatgaagtccacaaatgcatctgtgctaggtgctggggatagaattgtgagtaaagctaaacagtccctgcctcgtggatgtttacatgctattggaagagacagacaggaaacaattgtggctcctcagcactaccctgcaaccagccatacccagggacacacaggagggaagggagttaactggctccatccagctaagcctcccagtagcattggatgcaggaaaaaatacattgacggtgaaaaacaagccgaaccagttgtagttttagatcctgtttctacacatgaaccccaaaccaaagaccaggttgctgaaaaagatccaactcaacacaaggaggatgaaggcgaaattcaaccagaaaacaaagaagacagcattgaaaacgtgagagagacagacagctccaactgctgatccataavccagaagcctgacatgtttggaagtccttttcaatgaagcacatgattagtgttgttatattggcaagggctgtaaacattctgctctggtcactgtattcagaatacaggttcttttctggtgtcacttttgtaagtagcaactattaaacataagtaagctgtttagcaaaacacacattcctagtaggttttggttttttgatctttataaaggtggaggtttttttcccagttactgtatttaagtatggacttcttttaggaaggttacaaaaaaattcagatgttgatacctttttaggaaatgtgcataccactcatcaaatggaatgctgaaagtttgaggtgcttgtatataatcggataaacaaaactgatcaacccaatgtgattttaaaagcccccaaagaagc

SEQ ID NO: 3213 - DNA, 2605 bp, Homo sapiens
  SIMILAR (86)..(853): 941254mologous to Homo sapiens Tumour suppressor protein, p53,accession number R74272,Smith-Waterman Score=1287.
gtcgaccctttccacccctggaagatggaaataaacctgcgtgtgggtggagtgttaggacaaaaaaaaaaaaaaaaaagtctagagccaccgtccagggagcaggtagctgctgggctccggggacactttgcgttcgggctgggagcgtgctttccacgacggtgacacgcttccctggattggcagccagactgccttccgggtcactgccatggaggagccgcagtcagatcctagcgtcgagccccctctgagtcaggaaacattttcagacctatggaaactacttcctgaaaacaacgttctgtcccccttgccgtcccaagcaatggatgatttgatgctgtccccggacgatattgaacaatggttcactgaagacccaggtccagatgaagctcccagaatgccagaggctgctccccccgtggcccctgcaccagcagctcctacaccggcggcccctgcaccagccccctcctggcccctgtcatcttctgtcccttcccagaaaacctaccagggcagctacggtttccgtctgggcttcttgcattctgggacagccaagtctgtgacttgcacgtactcccctgccctcaacaagatgttttgccaactggccaagacctgccctgtgcagctgtgggttgattccacacccccgcccggcacccgcgtccgcgccatggccatctacaagcagtcacagcacatgacggaggttgtgaggcgctgcccccaccatgagcgctgctcagatagcgatggtctggcccctcctcagtcatcttatccgagtggaacggaaatttgcgctgtggagtatttggatgacagtaaacacttttcgacttattgtggtggtgccctatgagccgcctgaggttggctctgactgtaccaccatccactacaactacatgtgtaacagttcctgcttgggcggcatgaaccggaggcccatcctcaccatcatcacactggaagactccagtggtaatctactggtgacggaacagctttgaggtgcgtgtttgtgcctgtcctgggagagaccggcgcacagaggaagagaatctccgcaagaaaggggagcctcaccacgagctgcccccagggagcactaagcgagcactgcccaacaacaccagctcctctccccagccaaagaagaaaccactggatggagaatatttcacccttcagatccgtgggcgtgagcgcattcgagatgttccgcgagctgaatgagcgccttgtaactcaaggatgcccaggctggggaaggagccaggggggagcagggctcactccagccacctgaagtccaaaaagggtcagtctacctcccgccataaaaacctcatcgttcaagacagaagggcctgactcagactgacattctccacttcttgttccccactgacagcctcccacccccatctttccctcccctgccattttgggttttgggtctttgaacccttgcttgcaataggtgtgcgtcagaagcacccaggacttccatttgctttgtcccggggctccactgaacaagttggcctgcactggtgttttgttgtggggaggaggatggggagtaggacataccagcttagattttaaggtttttactgtgagggatgtttgggagatgtaagaaatgttcttgcagttaagggttagtttacaatcagccacattctaggtaggtaggggcccacttcaccgtactaaccagggaagctgtccctcactgttgaattttctctaacttcaaggcccatatctgtgaaatgctggcatttgcacctacctcacagagtgcattgtgagggttaatgaaataatgtacatctggccttgaaaccaccttttattacatggggtctagaacttgacccccttgagggtgcttgttccctctccctctccctgttggctggtgggttggtagtttctacagttgggcagctggttaggtagagggagttgtcaagtctctgctggcccagccaaaccctgtctgacaacctcttggtgaaccttagatcctaaaaggaaatgtcaccccatcccacaccctggaggatttcatctcttgtatatgatgatctggatccaccaagacttgttttatgctcagggtccaatttcttttttcttttttttttttttttttctttttctttgagactgggtctcgctttgttgccccaggctggagtggagtggcgtgatcttggcttactgcagcctttgcctccccggctcgagcagtcctgcctcagcctccggagtagctgggaccacaggttcatgccaccatggccagccaacttttgcatgttttgtagagatggggtctcacagtgttgcccaggctggtctcaaactcctgggctcaggcgatccacctgtctcagcctcccagagtgctgggattacaattgtgagccaccacgtggagctggaagggtcaacatcttttacattctgcaagcacatctgcattttcaccccacccttcccctccttctccctttttatatcccatttttatatcgatctcttattttacaataaaactttgctgcca

SEQ ID NO: 3214 - DNA, 445 bp, Homo sapiens
  SIMILAR (113)..(340): 331254mologous to Caenorhabditis elegans glycine- rich,accession number U41557,Smith-Waterman Score=83.
ctcacttggaactgagatccttgaatcatagaggcttggggagcaggaagaagacgagaaattgaaggtgatttgacttatgatcctcagtgcacaacacttttccaagaagagcaacctttctctctcccacacacagtggtggtctcccgtattgcgacttgcagacaggcagggagggagctgccggggcggggagcggggggggaatgcgtccggtccatttttggctggaggtgcgcttcctgctacccccacgttcccgggcggtgacaatgcagcaaaatccgagggctcaaacaatgtggcccctccatccccggctccagggcattctgattgctctgccgctttgacgtcccggccacttggctgatattcagagccatgatgcgcggtgtctctgtcttgcacacaggggcacgaaatcgtcgacccgggaatt

SEQ ID NO: 3215 - DNA, 646 bp, Homo sapiens
  SIMILAR (61)..(345): 251254mologous to Homo sapiens somatostatin receptor- interacting protein splice variant b,accession number AF226728,Smith-Waterman Score=81.
atgctctctggtgtcagcccaatgcagactgaggcgcgctgtgcccggaaccacaggaagccgggcatctctgcagcctgtgtccctgccagctccccctacgcgctgaaattcggcagggaagaagttatggtgcccagcctctgtgtgcaagacagagacaccgcgcatcatggctctgaaaatcagccaagtggccgggacgtcaaagcggcagagcaatcagaatgccctggagccggggatggaggggccacattgtttgagccctcggattttgctgcattgtcaccgcccgggaacgtgggggtagcaggaagcgcacctccagccaaaaatggaccggacgcattccccccccgctccccgccccggcagctccctccctgcctgtctgcaagtcgcaatacgagaggggcatcttctgaggagggacagaacgacccgggacctggtttttgtcttctctcatcacagggagaccaccactgtgtgtgggagagagaaaggttgctcttcttggaaaagtgttgtgcactgaggatcataagtcaaatcaccttcaatttctcgtcttcttcctgctccccaagcctctatgattcaaggatctcagttccaagtgaaagaactgaatagcagatct

SEQ ID NO: 3216 - DNA, 417 bp, Homo sapiens
  SIMILAR (40)..(177): 321254mologous to Triticum aestivum alpha-amylase 2/8,accession number X13576,Smith-Waterman Score=69.
  misc_feature (1)...(417): n = a,t,c or g
caggtttattttctccttttttgagatttctagaaaaaatgctgcttgcacatgttggttcttgaaaccttagctagaagaatttcaggtcataccaacatgtggataggctatagctgttcagaggtctcctgggggagcttaaaacgggggaaacactggttttcacagatgctccacatggctgtctttaaaagactcaaaacttttttttgtcctctttgttatgcttggaagctnnnnnnnnnnnnnnnnannnnnnnnnnntttttcaaaaaaaccctttaagggggggnnnnnnnnnnnnnnnnccctttttgggaaaaaannnnnnnnnncggggggaaaatttttaaaattttttggctnnnnnnnnnnggttccttcctttgttggnnnnnnnnnnnnnnnnnnnnt

SEQ ID NO: 3217 - DNA, 1197 bp, Homo sapiens
  SIMILAR (535)..(1191): 461254mologous to Macaca fascicularis unnamed protein product,accession number AB046024,Smith-Waterman Score=510.
atgggtatccgaagaaccaaagatctcccggtctaccgccgccagaagacccggattctgatacgcctcgtgctggagcatcacgccatcgatatggtgcatgggtgctttggcctctgccagcgacttgaggccaacgagtttttgcggcccgctggtactttggcgaatcgcatcttccacatcgctattcctgtgaccgagctttatacggtgcaggaagaggataaaaccgtggagcggaaacgaagttttatccatttttggttacctgagtcattgatggttgatggcaatcagaagcgggaggaccccccccatcaaaaattgagtgaaggatatgaacatacacttgctcaaagtgaagatattgatgcagccgacaaacatatggaaaatatgctcatcatgtcctttggtgggacgtggatgaagcttgaaaccatcattctcagcaaagtatcacaaggacaaaaaaccaaacatcgcatgttctcactcatagacaaagtcttgctctgtcacccaagtcgactttatcttaaagcccaccatgagtgtacagatcagaaagtctaccaagctgtgacagatgacctgccggccgcctttgtggatggcaccaccagtggtggggacagcgatgccaagagcctgcgtatcgtggaaagggagagtggccactatgtggagatgcacgcccgctatatagggaccacagtgtttgtgcggcaggtgggtcgctacctgacccttgccatccgtatgcctgaagacctggccatgtcctacgaggagagccaggacctgcagctgtgcgtgaacggctgccccctgagtgaacgcatcgatgacgggcagggccaggtgtctgccatcctgggacacagcctgcctcgcacctccttggtgcaggcctggcctggctacacactggagactgccaacactcaatgccatgagaagatgccagtgaaggacatctatttccagtcctgtgtcttcgacctgctcaccactggtgatgccaactttactgccgcagcccacagtgccttggaggatgtggaggccctgcacccaatgaaggaacgctggcacattttccccagcagtggcaatgggactccccgtggaggcagtgatttgtctgtcagtctaggactcacctgcttgatccttatcgtgtttttgtaa

SEQ ID NO: 3218 - DNA, 3597 bp, Homo sapiens
  SIMILAR (2994)..(3263): 321254mologous to Human herpesvirus 4 RPMS1 protein,accession number AJ251097,Smith-Waterman Score=78.
tttttttttttttttttttgcaagggatgtaactttatttttctagcataataatttaaagtatttacacactgcacactcactgttttacacagatacgtattcatatatttatgaaccacatttaaaggtttctttgcaaagactcgacaccactgtggtgatggggggggagcttccaagcataacaaagaggacaaaaaaaagttttggagtcttttaaagacagcccatgtggagcatcgtgtgaaaaccagtgtttcccccgttttaagcctcccccaggagacctctgaacagctatagccctatccacatgttggtatgacctgaaattcttctagctaaggtttcaagaaccaacatgtgcaagcagcattttttctaagaaatctcaaaaaaaggagaaaattaaaccctggcccttacggtagagaaatacatcttatttcctgaaagtaatctgtggggattgttttacagggacaccgattacaagggcagaatagcaaaatacactattactagtgatgccagggtgcttttaaatgtcacttccagctaaaatggatatggccaaaataaccccaatcttcttttcccaactatcaggtaagggtggttgttattttccctgaaaagagcaaaggtataattaataagtgatacacactctaaacccagatcctatagaaatttcttctattgcttttacttcactttcatactatttgcacaaaaatagtggttatcctccgtattttttcctcgcttgtactactcaattataaaacaaattattaacggatagcttctgaatttggtacatggcatcataggtgaacaaaaaaagccacagttcagagctgatggtcagtccgtctctagtccagcttctataaaaggaaggcgggtttaggtttcaactctctatagttgaatctcccatgagtaagaagggagatgccttccttaatttttcccagactgcccaaggattattctctcatcaacacaaggtagaggtttgccacctctacatgaattcacaactccactctgtgactgggtggcacatcagttcgctaagaagttaaactttacaaaatgacgtcctcttcctcttgccggtatgggcctctggcagtgtcactgatcaataggacatggcacaaagtaactacctggagaactaaaactaagcataatcttggcctgaactactacggtaaagatagtatcttttatttctgtttatgtaaacttatcaacaaattattaaagcagaaactctatcacttcttggaactaaagatttacatctagctataacaatagaaacctacctatcctggagttaactttctcagattactgctcctgacttttgctgttcttttccttttgcaagggggtgccaacaatggatggaagaggcaaggagatcttactttataggaatttctccaagttacaacgagcaactgaccaaatcatattcaactacaggtgttgagagagagagtacctgacttcagaccacctgggaagcacaatgcttagttaacaagaatatctggattaagcagtgccgaagtggcccgcacaccgagtcaggcccaaggaaagctcctcctgtccattgcccgccccaactctgttcccactttgccatggccagaccatatccaaagactgtgatggaaagatcatggtggacaaggaagaatgaaaaaactttgtgatgggatctgggccctcctacatttagagaaagaaccctaacaaacccccagttcctttggattccgtaaggtgaggctgaggagggccttactggagttggagacagggagagctgtgtttctgggctcaaagccaagaaacggttaagaagaggggcttgcatcagtcatatagattaaaaagagcaaggcatgataattactaaatttatagtttcatgttttaacacagaagagtcagagggaaaactgacaatttaaaacggggcatgggatgagaaaaagtctaggagttcctaataagattaagttcttatctccaaaacttccatccctagacccttttgacctacgagaatagcagtttctatggttcaacctaatacactgtatgggctcaaatatataacaattagaattgagagtaatcagaataccaataatacccccccttctgaaaaagtaacagctcttagatgaagagagcttcttaagatcagcgtttaagagtcaaagcacctgtaagggagagttaacgaccctttcaaatcaagtgagggcagaagggtgagggcatagttcaaaggaacgaggcagctccaccggaaggtggcgagtaaaagctgcacaccgtggcaaatcagtagcaatgggaaagggcaggaaggtacagccaagaatagctacaaacaactggtcaccttcaaaggaaacgctgcatatggatgtctgtgtatatgtactatacatatcaaccaagcacacacataaatatttaatatataaaaaataaagtgctttctaacaggtccctgggcagggacattataaaacatttcacagaactgcaaaacaaaattgatacaatcaaagaacactacatccaacatatgtgaaaacagccaaacacagtatgtacaatctggtgggtgtcccaggacaaacatcctgtcatatacatggtatatacatatatactcttttactcaatatattatgacaatatatattttaaaattttgttatagaccaaaaaataaaaaaccaaaacaaaagacaacccctacaaaaacacgataaggatcaagcaggtgagtcctagactgacagacaaatcactgcctccacggggagtcccattgccactgctggggaaaatgtgccagcgttccttccttgggtgcagggcctccacatcctccaaggcactgtgggctgcggcagtaaagttggcatcaccagtggtgagcaggtcgaagacacaggactggaaatagatgtccttcactggcatcttctcatggcattgagtgttggcagtctccagtgtgtagccaggccaggcctgcaccaaggaggtgcgaggcaggctgtgtcccaggatggcagacacctggccctgcccgtcatcgatgcgttcactcagggggcagccgttcacgcacagctgcaggtcctggctctcctcgtaggacatggccaggtcttcaggcatacggatggcaagggtcaggtagcgacccacctgccgcacaaacactgtggtccctatatagcgggcgtgcatctccacatagtggccactctccctttccacgatacgcaggctcttggcatcgctgtccccaccactggtggtgccatccacaaaggcggccggcaggtcatctgtcacagcttggtagactttctgatctgtacactcatggtgggctttgaagataatagtgatcttcacctccaacatatccaacatctctggtacaggtggtggagggaagacaactgtgcacaccatgaccaacaggaaaacaaaccctacctttcccaaggaaggggaggagagggccat

SEQ ID NO: 3219 - DNA, 609 bp, Homo sapiens
  SIMILAR (1)..(207): 911254mologous to Homo sapiens Gene product with similarity to Ubiquitin binding enzyme,accession number AC002400,Smith- Waterman Score=309.
atgcagaaagtcatgtataagggactcgtccccgaggataaaacattgagagaaataaaagtgaccagtggggccaagatcatggtggttggctccaccatcaatgatgttttagcagtaaacacacccaaagatgctgcgcagcaggatgcaaaggcgaggaacaagaaggagcctctctgcaggcagaaattaaaggagaaattagcattcttgaaaagggaatacagcaagacactagcccgccttcagtctggacgatacatagtcgaagtagggcccagcatccgaatcggtcccttcgccatacagattgtcgcgagacctgtcaatgagcagaatcggccgccgtgcattgcggtcatttctactccattcacgacagtcgttgtgcaggcatctgggaacaaagtcagtcgccagtcagtgttgtgtggaagccagaacatcgttctcaatggcaagacagggatagagaaatgtaagtggatgcccggctttggcaaaggcatccgtgacaaattccgaacaaaaccacgactttttgtctccttattcaccgaggaaatcaaaacggcgacctgtatgatgatttcgccaatgtgctga

SEQ ID NO: 3220 - DNA, 418 bp, Homo sapiens
  SIMILAR (167)..(87): 381254mologous to Homo sapiens Human secreted protein encoded by gene 100 clone HEONN58,accession number W74973,Smith-Waterman Score=61.
atttattgtacatgccggacagcggtaccgttggcaggcgctcctgaaggcacgagagaatgtattgttggtgtttttcttcttccagttaaaggagaaattagcattcttgaaaagggaatacagcaagacactagcccgccttcagcgtgcccaaagagctgaaaagattaagcattctattaagaaaacagtagaagaacaagattgcttgtctaaacacgatctctcaccgcagctaaaacactcagctggacttgtctgggttatgtctgtgggcaccatgtgctctagcttcctgctgggtttggataatggggacagggtgagatcagagtatgccctgctgtccttgtcacaaagtcctcacgggctggctgtgttcctctaccgaagccataatgactccaaattctga

SEQ ID NO: 3221 - DNA, 561 bp, Homo sapiens
  SIMILAR (123)..(91): 631254mologous to Sus scrofa lactoferrin,accession number AF044256,Smith-Waterman Score=42.
atgaggagcatacttctggagcatcagctgaattccacgccattctggggtgaattcatgtctttaaaaaccactcgactacaggctgttgcgtctgcttttgtcttgccaacacctacatctctctcaggccttgatcaaaacattagttcctcaaagaggccttccccaaccccaggactaggtgagatccctctagcatgggctgccacggacaggcgctcctccacgttggcttttggttatttatcctcagtgcacgaggacatgtgtggagtctgcttgtcctgcatcctcagtgcccaaaagtgtgactggcacatagtgggtgctaaatacatccaaaagaatatcaatcattctattataaagcaccaccagctctttccaggagagtctaaagagattctgagtgcaccagactatggcaaaatgggagaaagacactccaagctcgtgccacactttgcctccagagcaccaaagcccctcatggagcctcttgagagcaccttctggacctcactcatcaactacaccatctacccaccatcaggataa

SEQ ID NO: 3222 - DNA, 922 bp, Homo sapiens
  SIMILAR (624)..(695): 441254mologous to Arabidopsis thaliana F5D14.5,accession number AC007767,Smith-Waterman Score=68.
tctcacacaaaaatgagaatcagcaagcgtttagcaagcaggtgcacctaccataagctgctctctctcgcaattcatctgttgtcttgaaaccttaagattaagcatctaggttggtgccaatattgcgacattgcaagtacaataacaatggtggctcagtccaggtgtcctgttgtttccattcgacattctgtcttataattccacgcaggtatcgcagtctgctttgatatctgaatgctgagtccgatcaaggaagctgtaagttccactcgcatgagttcttagaccagtttcctagaactcccggcgagcccggctgcggtcacgttctcggccccagacccccgaattgccgtgcgctctttgcacccccagccacgctcaccataagctgcaggcggcggaagggggtgctggtttctcacgcactgtccgcaacttcgcgggcaggcaattaagcaacttggcaataaaagcaaccacatttttcctggagcagttcacggagaacacagaacagcacaggacagatgttgaaccaaaacgcaggaggctgacctggaccaacaacagctatgggcttcctggtttggacaatggagagcaccagcagagacggaggtgcttcctggtgggtttggacaatggagagcaccagcagagacggaggtgcttcctggtgggtttggacaatggagagcaccagcagagacggaggtgcttcctgcaccaccagctctttccaggagagtctaaagagattctgagtgcaccagactatggcaaaatgggagaaagacactccaagctcgtgccacactttgcctccagagcaccaaagcccctcatggagcctcttgagagcaccttctggacctcactcatcaactacaccatctacccaccatcaggataa

SEQ ID NO: 3223 - DNA, 643 bp, Homo sapiens
  SIMILAR (8)..(490): 971254mologous to Mus musculus Ten-m2,accession number AB025411,Smith-Waterman Score=836.
  misc_feature (1)...(643): n = a,t,c or g
gtacggctacacgcccccgccccgcctgctgcccaggaatactttctccaggaaggctttcatgctgaagaagccctccaaatactgcagctggaaatgtgctgccctctccgccattgccgcggccctcctcttggctattttgctggcgtatttcatagcaatgcatctgctcggactcaattggcaactccagcctgcagatgggcacacctttaacaatgggataaggaccggcttaccaggaaacgatgatgtggcaacaatgccatctggaggcaaagtgccctggtcgttgaaaaacagcagcatagacagtggtgaagcagaagttggtcggtgggtaacacaagaagtcccaccaggggtgttttggaggtcacaaattcacatcagtcagccccagttcttaaagttcaacatctccctcgggaaggacgctctctttggtgtttacataagaagaggacttccaccatctcatgcccaggtatgaccatgtttgatgtaatcaagcatttaaaaaannnnnnnnnnnnnnnnnnnnnnnnnnnnntatgccacttcacatgcactacaatgcctataattaaaagatggacaataaaaatgttggcgagaatttggagaaataagaaccctt

SEQ ID NO: 3224 - DNA, 537 bp, Homo sapiens
  SIMILAR (62)..(136): 611254mologous to Homo sapiens PRO0478,accession number AF090930,Smith-Waterman Score=74.
atgggaaacaggttgaaggaattgggagataaaaagaaatacacttcaaaactgaaggtgaggccaggcacagaggctcacacttgtaatcgctgcgctttgggaggccaagtcaggaggaaagggggaaactgtgctattgcctacaaaaagcaaaatttccctcagtcttcggtcctttacttgagaggaagcagctttcctttccatctgtggtcctgctatagaaggaggatggtagcagagtactggctgatgaaagaagactttccagaaatgagcagtttggacattgctcggccccctgacaagttcttccatagatccaggcccgtgggcgggtgtaaaagcagaatgccagccctgtgcaaactagatgacccaggtctttacgagctcagcagagatgcccagttcctacccacacagctggggtcagagaacttttatgatctgctcctccatcagaccctctctgtgccaaattctctcagcgtacaaacatcctggaataaattactctggaaagctgaataa

SEQ ID NO: 3225 - DNA, 2676 bp, Homo sapiens
  SIMILAR (610)..(1002): 951254mologous to Gallus gallus teneurin-2 protein,accession number AJ245711,Smith-Waterman Score=649.
ttcccgggtcgacgatttcgtacaaatcactagtaatactgctggatttacgattaatgggttaacacttaaggttggtacgaatacacctattgaaccaggttaccggatgctttctgtatatgctacatatacagaacgggcaacaggtaataaagcgattgttagtgcagatgctaagctaacaactacacagactgtaggagcaggattaacactggacttatactctattggcggagagattattattgataacattccagaaaaggtaaccgttgttggagatgtatatagaaatggtgaagttgtcaatgatgatagacggttcaagttatttgcgcaagaccccacagtatctgacactatcaattcaggttacgataaggatggtggtttgggctggcgcaagataactaaggattctaacggatatagcttgacagtagattttgacactgtggctaactcatctatcggaatttcgataaagccagaagtagttcttaacatccaaaactacaagctgcttgtatatacgaaatcgtcgactgtgaggccccctctcccacccccatcacaaccacacgctgtcccattaccactccgtccgccaactccctcaacaggaactcactgaccaatcgggggagtcagatccacgccccggccccagcgcccaatgacctggccaccacaccagagtccgttcagcttcaggacagctgggtgctaaacagcaacgtgccactggagacccggcacttcctcttcaagacctcctcggggagcacacccttgttcagcagctcttccccgggataccctttgacctcaggaacggtttacacgcccccgccccgcctgctgcccaggaatactttctccaggaaggctttcaagctgaagaagccctccaaatactgcagctggaaatgtgctgccctctccgccattgccgcgggcctcctcttggctattttgctggcgtatttcatagcaggaccacagatggaaaggaaagctgcttcctctcaagtaaaggaccgaagactgagggaaattttgctttttgtaggcaatagcacagtttccccctttcctcctgactggagacagacagtgcaggaaatgatgggaaaaagcaaatcatgctttatgtttgagaggcacctcatgactctgtggtggacagcaggcattattagctgcattttacaatggcagaaacaggcctgggcaggggaaagaacttgtccacgacacaaggctagcaaacagcaggatctcaggacaattaagaaaaaaatagttgatgctacatatgacttcatggaacgtctggacgggaaggagaagtggagtgtggttgagtctcccagggaacgccggagcatacagaccttggttcagaatgaagccgtgtttgtgcagtacctggatgtgggcctgtggcatctggccttctacaatgatggaaaagacaaagagatggtttccttcaatactgttgtcctagattcagtgcaggactgtccacgtaactgccatgggaatggtgaatgtgtgtccggggtgtgtcactgtttcccaggatttctaggagcagactgtgctaaaggcatctcttctgtcacacagtatggtgaaagcttcgataaacttaaaaagaaggcaagctgtgcccggaattccctggctctgccagtttctgtgactgcaggcagccggcagactcaggccctcctgccagggggagaatttgccacgttagcaagagagactcccatcacatccaagcaaccggatatgtgtccaagacagccccctgatacaggcctgtgcaacccaggccagaggcactggctagagctggagccagcggctggggagatgaggaggaggctacaacttgactcactccttcatcccccttcttgtttctcctccactctgaaatgtggaaaagctgcagctgcagcttgcgacagcagtgaccagatccaagaaagactgcagacaggccacctgccctgtgaagccagccataccatatgccctccgaaccaccacagccagtcgactctgaggccccctctcccaccccctcacaaccacacgctgtcccatcaccactcgtccgccaactccctcaacaggaactcactgaccaatcggcggagtcagatccacgccccggccccagcgcccaatgacctggccaccacaccagagtccgttcagcttcaggacagctgggtgctaaacagcaacgtgccactggagacccgcttctggtgttgccagagatttttggtgttccctggcctacagctgcaacacctcactctctctctgcctgtgtggtcacacggtgctctccctgtgtctctctgcatctttacgtggctgtcttctcataaggacaccagtcattttggattacgagtccacttgctcagtctgccgctggaagcaaaatattctttctatcctggatgtccagtcttggaaccagctccgaatccattgaaaggcccctggtgtctctggggggttggtaccttcagacgttattgtactacatttttgttcaatgagtcagagccaaaggacttggttggtgaaaaatttaaatcagatcgcctttgccgagaagcgcatctccaggagtag

SEQ ID NO: 3226 - DNA, 739 bp, Homo sapiens
  SIMILAR (39)..(737): 991254mologous to Homo sapiens unnamed protein product,accession number AK024782,Smith-Waterman Score=1214.
tctgtaccgtcccgcaattccctggtcgacgatttcgtatttgcagcagactcagcactctgactgcctgcatccacgggtctgcggcgatgctctaccccatgtactggcagcacgtgtacatccccgtgctgccgccgcatctgctggactactgctgtgctcccatgccctacctcataggaatccatttaagtttaatggagaaagtcagaaacatggccctggatgatgtcgtgatcctgaatgtggacaccaacaccctggaaacccccttcgatgacctccagagcctcccaaacgacgtgatctcttccctgaagaacaggctgaaaaaggtctccacaaccactggggatggtgtggccagagcgttcctcaaggcccaggctgctttcttcggtagctaccgaaacgctctgaaaatcgagccggaggagccgatcactttctgtgaggaagccttcgtgtcccactaccgctccggagccatgaggcagttcctgcagaacgccacacagctgcagctcttcaagcagtttattgatggtcgattagatcttctcaattccggcgaaggtttcagtgatgtttttgaagaggaaatcaacatgggcgagtacgctggcagtgacaaactgtaccatcagtggctctccactgtccggaaaggaagtggagcaattctgaatactgtaaagaccaaagcaaatccggccatgaagactgtctacaagtt

SEQ ID NO: 3227 - DNA, 1440 bp, Homo sapiens
  SIMILAR (607)..(840): 621254mologous to Homo sapiens unnamed protein product,accession number AK024782,Smith-Waterman Score=218.
atggtgggggtcatctggcagccaagggaggactggagcagcagcgacggcatggccccccagcatctctggaccaccatcggcatgccagcccctgctcttggggtagggattccaagggatgtcaaagtaaatgctcggtgtaatgtttctaatcaaaatcaattgttcaaaggtgcaaagatgctggaaaccatcaccaaagaggatcggaagcagcatgggaccagtggaaaaaccatcctgactgacacactgattaagctgctggacctagaggaccaagtagagcagcctgccgtcctgagctgggaaagccgaatggcggctcagctctgcgtctcaggaccacctgttggccccaaacctctgtctggccagacaagaaatgctttggaaaaacaatgtgctttcctgtttttgagattcccagtcatggaacggccacaggggcactcacagtacccgaccgtgccacatgctgtcaaggccgcttgcctctgcatgtgctacttcctgccccctgctcctggggagtcctattcctccgacgcacacattccctatgggactttagaaaaaagccttgatgcctactttatccagatctcttccctgaagaacaggctgaaaaaggtctccacaaccactggggatggtgtggccagagcgttcctcaaggcccaggctgctttcttcggtagctaccgaaacgctctgaaaatcgagccgcatcaaaatccatctagagtttcagtattctttttcaagcacatcggcgatgggttaatggtgacattatctgacagctcccagataacacaggcaaagagagatgggactcatcaagaaacaccgcctcagctagacttagcaaggaaatctccactgactgactcattggattctatgaccagggtcatctccaatgcctctatctccttctccttatttctgagaagttgcctacctcagatgaacctacctgtaaggtgtcgacaagacatctctgcctcctcatgccttgtcattcctctcctggacgagaaagctgtccccttcaaagacttggctcaaaaatacagagtaatgtcctatgactgcactgcccgccatggccccagcagtgcggcctgccctaaagtcagaaacatggccctggatgatgtcgtgatcctgaatgtggacaccaacaccctggaaacccccttcgatgacctccagagcctcccaaacgacgtggtagggttgttggaagaattcaacgccatcacagatgtaaaggagatggaccagtgttcaacagtggcagctatcttcatcacttatgttactgacagagcattttcccctccacagttccaggaatttcccctcatctccttcctcctctctgagtgtcagtgtctgcctctgcccagccctcaagctttcatttga

SEQ ID NO: 3228 - DNA, 752 bp, Homo sapiens
  SIMILAR (270)..(389): 901254mologous to Homo sapiens Human transmembrane protein HTMPN-47,accession number Y57923,Smith-Waterman Score=166.
cccgggtcgacgatttcgtcaggcggcggagcggccacaatcacagctccgggcattgcgggaacccgagccggctgcgccgggggaatccgtgcgggcgccttccgtcccagtcccatcctcgccgcgctccagcacctctgaagttttgcagcgcccacaaaggaggcgaggaaggaggggctgtggtgagaggagggagcaaaaagctcacccctaaaacatttatttcaaggagaaaagaaaaagggggggcgcaaaaatggcctggggcaattatagaaaacatgagcaccaagaagctgtgcattgttggtgggattctgctcgtgttccaaatcatcgcctttctggtgggaggcttgattgagccccgagagccggtgactgtgaatgtccccgtcctcttttggcgcttaggagagcgccctcagctcccaccacagccccccgcagttcctctggcagccctccctaaagatccctctgagacaaagtcagaaatggcttccctagggaccaagagagcccacaggctcttcctgctgctgctgcttctactcctgtattttgctcagctctctaagtttgtctcagctccaggtgaaacaggaatgctacagaggtctagagttggctcagtgctttcaccccaggtcaccaaactcgagaagcaaaatcagcacctgatggcaattgctgcccatcactcagagatcctggacttgaggctgaatgctgtgatgggatag

SEQ ID NO: 3229 - DNA, 804 bp, Homo sapiens
  SIMILAR (581)..(552): 701254mologous to Homo sapiens Human secreted protein, SEQ ID NO: 5217,accession number G01136,Smith-Waterman Score=45.
atggctggtgccaagcaagggctgaactgttccttgcaggcagatttcaaggaaggcgtcgacacctttcatgtgccgatgaggacaaatccctgtgcccagattagatttccagaaacacctgtgaatcttgcccacacacctgcaagaagctggtgtttctctctatggaattgtgacgatgacctgcctcctccattagttggctgtgctgcccaggctggggttgccgatggtccgctctgtgccagctggcagactggccggctggctcggcagagcaaagtgctaattgaaaggcgccctcatcacccaaggctctcagtcgtctccttggaatggctggtgcttctgacaatcttatcagccaaggctgtggcccacattggtgaaccggggacatgcaaacccccagcttcactttggcaagagaggcctggcatttgctgcaatgccaggaggggatctggatcttcctaccgccctgatggcagtgagcgtgctccggcggctggcatggagagacgacgaaatggatgtggagtgtctcagagccctggggaacagggagggcagcccaaacaaactaactcagcggcttatgtctggtttgcagagagagaatcaccagaccaacccagcaccccagacagatgggccatggtgactgccagctggcccctggtgctcgccggccatgcccaggagaaaaagcacctttgcttcccctttggtgtcttgcttgtgatggtgtgcaatgcttgctggttgaataagcacactgaccgaatgggccatgtctag

SEQ ID NO: 3230 - DNA, 451 bp, Homo sapiens
  SIMILAR (344)..(409): 771254mologous to Homo sapiens Human secreted protein, SEQ ID NO: 5784,accession number G01703,Smith-Waterman Score=74.
cgcgtcgacgatttcgtgtccgttacgactcagaggacggagagaaagtctaagtcaccttcctcagtatccaggccggaaggagactctcagctactcgccctgaacatgcagagcagcactggcttccctgtctctggatgccgcaggggcgtcctgtcaggagttgtagtgtcaagattccagttcttcttatgcgacttgctggagaagcaggaagttgctgtttattggagaagtcgggctagggagggaaacaatcccgcggagccatatggagagggcaggaggtgtctagatagtggctctattccgttcgctggttcgccacctcaggggaacgatggccatggagtccacagccactgccgccgtcgccgcggagctggttctgccgacaaaattgaagatgctcctgctccttctacatctgcagataaagtggagagtg

SEQ ID NO: 3231 - DNA, 1122 bp, Homo sapiens
  SIMILAR (97)..(759): 891254mologous to Homo sapiens histone-binding protein,accession number M97856,Smith-Waterman Score=1001.
atggccacggagtccacagccactgccgccatcgctgcggagctggtttctgccaacaaaattgaagatgttcctgctccttctacatctgcagataaagtggagagaatcgagaatggtgtattgggaaacaccttggatggtgtgcatgtggaagaggaagaaggagaaaaaacagaagatgaatctctggtagaaaataatgatagcatagatgaggaagcaaggaaagagttgagagaacaggtttatgactccatgggagaaaaagaagaagccaaaaaaacagaagacaagtctttcgcaaagcctgaaactgataaagaacaggactgtgaaatggagaagggtggaagagaagatatggatataagtgaatctgcagaggagccacaggaaaaagttgacttgactctaggttggttaactgaaatctctgaaggggcaaaaggaggaggagcaccagaaggaccaaatgaagctgaggtcacttctgggaagccagaacaggaagtaccagatgttgaggaagaaaaatcagtttctgaaactgatgtccaaaaagagtgcagagaaaaaggaggttgggagaagcacagagaggtaattgtgagcatagaggagaagccaaaagaagtttcagaagagcagcctgtggtgattctagaaaagcagggcactgcagtggaggtagcagcagagtctttagacccaacagtcaagccagtagatgtgggtggggacgagccagaggagaaggaacagtacctggaagcctacgaccatctccttgcagagacccactaccagctgggcttggcttatgggtacaactttcagtatgatgaggcagtggcacagttcagcaaatctattgaagtcattgagaagagaatggctgtactaaacgagcaggtgaaggaggctgaaggatcgtctgctgaatacaagaaagaaattgaggaactgaaggaactgctacccgaaattacagaaaagacagaagatgcaaaggagtctcagactactgggaatgtagctgaactggctctgaaagctactctggtggagagctctacttcaggtttcactcctagtggaggaggctcttcagtctcctga

SEQ ID NO: 3232 - DNA, 768 bp, Homo sapiens
  SIMILAR (487)..(750): 861254mologous to Homo sapiens histone-binding protein,accession number M97856,Smith-Waterman Score=398.
atggggagaaaccaaagcagagaagctgaaaattctaaaaatcagagtgcctcttcttctccaaaggaacgcagctcctcaccagcaatggaacaaagctggatagagaatgactttgacgaagaaggcttcagtcaatcagtaatagcaaacttctccgagctaaaggaggatgttcgaacccatcacaaagaagctaaaaaccttgaaaaaagattagatgaatggctatctagaataaacagcatagagaagaccttaaatgacctgatggagctgaaaaccatggcacgagaactacgtgatgcatgcacaagcttcagtagccaattcaatcaagtggaagaaagggctctattccattcactggtttgccacctcaagggaacgatggccacggagtccacagccactgccgccatcgctgcggagctggtttctgccaacaaaattgaagatgttcctgctccttctacatctgcagataaagtggagagaatcgagaatggtgtattgggaaacaccttggatggtgtgcatgtggaagaggaagaaggagaaaaaacagaagatgaatctctggtagaaaataatgatagcatagatgaggaagcaaggaaagagttgagagaacaggtttatgactccatgggagaaaaagaagaagccaaaaaaacagaagacaagtctttcgcaaagcctgaaactgataaagaacaggactgtgaaatggagaagggtggaagagacagatatggatataagtga

SEQ ID NO: 3233 - DNA, 2743 bp, Homo sapiens
  SIMILAR (380)..(2740): 991254mologous to Homo sapiens histone-binding protein,accession number M97856,Smith-Waterman Score=3927.
tcaggagttgtagtgtcaagattccagttcttcttatgcgacttgctggagaagcaggaagttgctgtttattggagaagtcgggctagggagggaaacaatcccgcgcacccatatggagagggcaggaggtgtctagatagtggtaggccggcgggggacggagggtatgggtggtgagtcctggccctttaaacccgagggggaggatccggaagtggatgggcggggcgaagggtcctcgtatataaaagggccccggccgcgcggggtctctaatctgccattttctgtccctgagtgagtctctggcgtcccaaattgcctgtttttctcgcaggctctattccgttcgctggttcgccacctcaggggaacgatggccatggagtccacagccactgccgccgtcgccgcggagctggtttctgccgacaaaattgaagatgtccctgctccttctacatctgcagataaagtggagagtctggatgtggatagtgaagctaagaaactattgggtttaggacagaaacatctggtgatgggggatattccagcagctgtcaatgcattccaggaagcagctagtcttttaggtaagaagtatggagagacagctaatgagtgtggagaagccttctttttctatgggaaatcacttctggagttggcaagaatggagaatggtgtgttgggaaacgccttggaaggtgtgcatgtggaagaggaagaaggagaaaaaacagaagatgaatctctggtagaaaataatgataacatagatgaggaagcaagggaagagttgagagaacaggtttatgacgccatgggagaaaaagaagaagccaaaaaaacagaagacaagtctttggcaaagcctgaaactgataaagaacaggacagtgaaatggagaagggtggaagagaagatatggatataagtaaatctgcagaggagccacaggaaaaagttgacttgactctagattggttaactgaaacctctgaagaggcaaaaggaggagcagcaccagaaggaccgaatgaagctgaggtcacttctgggaagccagaacaggaagtaccagatgctgaggaagaaaaatcagtttctggaactgatgtccaagaagagtgcagagaaaaaggaggtcaggagaagcagggagaggtaattgtgagcatagaggagaagccaaaagaagtttcagaagagcagcctgtggtgactctagaaaagcagggcactgcagtggaggtagaagcagagtctttagacccgacagtcaagccagtggatgtgggtggggacgagccagaggagaaggtagttacctctgaaaacgaggcaggaaaggcggttcttgaacaactggtaggtcaagaagtaccacctgctgaagagtcaccagaggtgcaaacagaggctgcagaggcctcagctgtagaggctggatcagaagtctctgaaaagcctgggcaggaggctccagttctccctaaggatggtgcagtcaatggaccgtcagttgtaggagatcagactcctattgaaccacagacttctatagaaagactgacagaaacaaaagatggctcaggactagaggagaaggtcagggcaaagctggttcctagtcaggaggagactaagctgtctgtagaagagtctgaggcagctggagatggggttgataccaaggtagcccagggagctactgagaaatcacctgaagacaaagttcagatagctgctaatgaagagacacaagagagagaagaacagatgaaagagggtgaagaaactgaaggctcggaagaggatgataaagaaaatgataagactgaagaaatgccaaatgattcagtccttgaaaacaagtctcttcaagaaaatgaggaggaggagattgggaacctagagcttgcctgggatatgctggatttagcaaagatcatttttaaaaggcaagaaacaaaagaagcacagctttatgctgcccaggcacatcttaaactcggagaagttagtgttgaatctgaaaactatgtgcaagctgtggaggagttccagtcctgccttaacctgcaggaacagtacctggaagcccacgaccgtctgcttgcagagacccactaccagctgggcttggcttatgggtacaactctcagtatgatgaggcagtggcacagttcagcaaatctattgaagtcattgagaacagaatggctgtactaaacgagcaggtgaaggaggctgaaggatcgtctgaatacaagaaagaaattgaggaactaaaggaactgctacccgaaattagagagaagatagaagatgcaaaggagtctcagcgtagtgggaatgtagctgaactggctctgaaagctactctggtggagagttctacttcaggtttcactcctggtggaggaggctcttcagtctccatgattgccagtagaaagccaacagacggtgcttcctcatcaaattgtgtgactgatatttcccaccttgtcagaaagaagaggaaaccagaggaagagagtccccggaaagatgatgcaaagaaagccaaacaagagccggaggtgaacggaggcagtggggatgctgtcccgagtggaaatgaagtttcggaaaacatggaggaggaggctgagaatcagctgaaacgcggagcagcagtggaggggacactggaggctggagctacagttgaaagcactgcatgttaa

SEQ ID NO: 3234 - DNA, 1714 bp, Homo sapiens
  SIMILAR (877)..(1290): 601254mologous to Homo sapiens p40,accession number U93570,Smith-Waterman Score=399.
atggtggcagcaagatgcttggaccgaaagccactctgtcttacatcattagcaaatcctggcagcttggccctgaaaccgtatctagaatctgcccatttttcccaacctctgggtcaagccactggtagctcacacctgggtgatcacagtgtcctacagtcacctgctcccaccttccccactgtggtccgttctcagcccaacaagagtgatcctgttaaggaagctgttcagaggactgtgagggtctggcacacacgggctccagcacgcgggccaagcgccgtggcccccggggaccccacacctgctgctccctctgcaggagagctcctccctgaccccacgtggctcctgaccccggttcctccgggttatgaggactatttccgaaggaaagaaagtgacttgcccaaggtcacctggcgagttccaacaagagcagaaccaagacccaagtgtcctgcccacctctcccgctctgagcagagtcactcctctcagaagtttctatctaactgtgtagttggggcttcgcttgaagaaattacagaggaagaggaagaggaagatgaaaataagtcagctatgctggaagcttcctcaaccaaagtgaaggaaggcacattccagattgtgggcacgctgtccaagcctgacagcccgcggcctgactttgcggtggagacgtactctcattctgaattcagaattccatcggatgaatttaacaaagagattgaaataatttttaaaaatcaagcagaaactccggagctgaaaaatgcaattgccatactgaagaatgaatcagagtcctttaataacaaaattgatcaaagaagaaagaatgagcttgaaaaccccctattaaaaaatacagtcagaggaaaaaaacagagcacctcttcttctccaaaggatcgcagctccttgccagcaacagaacaaagctggacggagaatgactttgacgagttgacagaagtaggcttcagaaggtcggtaataacaaacttctccgagctaaaggaggatgttcgaacacatcgcaaggaagctaaaaaccttgaaaaaagattagatgaatggctaactagaataaacagtgtagagaagaagaccttaaatgacctgatggagctgaaaaccatggcacgagaactacatgatgcatgcacaagcttcagtagccaattcgatcaagtggaagaaagggtatcagtgattgaagatcaaattaatgaaatgaagtgagaagagaagtttagagaaaaaaagagtaaaaataaatgaacaaagcctccaagaaatataggactatgtgaaaagaccaaatctacgtttgattggtgtacatgaaagtgacaaggagaatggaaccaagctggaaaacacttttcaggatattatccaggagaacttccccaacctagcaaggcaggccaacattcaaattcaggaaatacagagaacgccacaaagatactccttgagaagagcaactctaagacacacaattgtcggattcaccaaagttgaaatgaaggaaaaaatgttaagggcagccagagagaaaggtcgggttacccacaaagggaagcccatcagactaacagctgatctctcggcagaaactctacaagccagaagagagtgggggccaatattcaacattcttaaagaaaagaattttcaacccagaatttga

SEQ ID NO: 3235 - DNA, 631 bp, Homo sapiens
  SIMILAR (586)..(533): 941254mologous to Homo sapiens super cysteine rich protein; SCRP,accession number U63332,Smith-Waterman Score=148.
agcccaaacatcagtgtgccctctatgtcctttgttgaagatgtcaccataggagaaggggagtcaatacctccggatactcagtttgtaaaaacatggcggatccagaattctggtaagtacataatgggcaatcctcccttgcctagttttcaccaactcctccaactagtgccattgttcctgcgaccacagttcattgatgttatcaggggagatcaccccattgtttatattttcactaccacccaaggtctaaacttttactgccttttatattcatgtggtctcttcgggggagaccaatttggacatgtgaacatggtgatggtgagatcgctagagccccaagagattgcagatgtcagcgtccagatgtgcagccccagcagagcaggaatgtatcagggacagtggcggatgtgcactgctacaggactctactatggaggtgagtatgtccttgtgcagcccagggtaaaggaactaaggtaacatcttataacatccccagtgttgctcacagagcctaacaacaacaacaacagcagcagcagcagcagcagcaacaacaacagcaatgtgaaatgactgtactgttcagattaacctctaaaatgcatatatgtgg

SEQ ID NO: 3236 - DNA, 676 bp, Homo sapiens
  SIMILAR (214)..(399): 361254mologous to Homo sapiens Human HUPF-I mutant protein fragment 53,accession number Y21405,Smith-Waterman Score=71.
tttcgtggcagagtgagtttacccctatgagactgtaagaggcccggggcctacctcaaaggagcggggtcgcgaagctagctagcagcggcccccctccaggtccccgggcccggcggcgcggcggcggcttggttgtgaagaggcggggaagcgggtgtccggtccccgccatggagggcatggacgtagacctggacccggagctgatgcagaagttcagctgcctgggcaccaccgacaaggacgtgctcatctccgagttccagaggctgctcggcttccagctcaatcctgccggttgcgccttcttcctggacatgaccaactggaacctacaagcagcaattggcgcctattatgactttgagagcccaaacatcagtgtgccctctatgtcctttgttgaagatgtcaccataaggggaagggggagtcaatacctccggatactcagtttgtaaaaacatggcggatccagaattctgatgtcatctgggtgattctcagtgtggaggtgggtggacttttaggagtaacgcagcagctgtcatcttttgaaacggagttcaacacacagccgcatcgtaaggtagaaggaaacttcaacccttttgcctctccccaaaagaaccgacaatcagatgaaaacaactttaaaagacccttgtggctg

SEQ ID NO: 3237 - DNA, 384 bp, Homo sapiens
  SIMILAR (21)..(65): 531254mologous to Bovine immunodeficiency virus polymerase,accession number AF083920,Smith-Waterman Score=44.
atgactttgaagcctcctggcacagggatttcaccctctgttccttcctctctgttgtccctctacctggagctcccatcctggtctcactcgactttgcccttcacgagaatgtttcgcgagaatcccaagggtatccttcccacgcccatggccgtggtgttcctaaggcttctggaagcctggggccaggagaagggcagcactacgagaaagaaggggaatgggaaagccatttgcttccttaaagatggcgggaagctgtttgaattatatcggtcagccatcaccggagggggcagatttctaagagaaccagacaaactccattttggctctttcactggcagccccttcctcaaggacttaacttgtgcaagctga

SEQ ID NO: 3238 - DNA, 664 bp, Homo sapiens
cagattaccttgaaaacactgcatagcttctgtcaaacttatgtatcttaagactcaatatagacccccttgttataactgaggaatcaatgatttgattccccaaaaacacaagtggggaatgtagtgtccaacctggtttttactaaccctgtttttagactctccctctttcctttaatcacctagccttggttccacctgaattgactctcccttagctaagagaaccagacaaactcccaccttggctctttcactggcagccccttcctcaaggacttaacttgtgcaagctgactccccagcacatccaagaatgcaattaactgataagatactgtggcaagctatatctgcaattcccaggaattcgtcccattaataacgcccgattaataacgcccaaagccccgcgtctatcaccttgtaatagtcttaaagccactgcacctggaactgtttactttcctgtaaccatttatccttttaacttttttgactacttaacttctgtaaaattgttttaactagacccccccatccccttcctaaaccaagatataaaagttaatcaagccccttcctcggggccgagagaattttgagcgttagccatttcttaggcgccggctaaataaacagactcttaattcgtctcaaa

SEQ ID NO: 3239 - DNA, 485 bp, Homo sapiens
  SIMILAR (90)..(248): 941254mologous to Homo sapiens Human secreted protein sequence encoded by gene 16 SEQ ID NO:147,accession number Y91426,Smith-Waterman Score=288.
aggccaagagcctctgcaggatcttgaggcccatgatgttgtttgctcacagcccacttcactcactgtgggacctgcttggtgcctggcgtggagatgtgcacgggacactcggaggccggatgctcaacagagtggagtgccgcgacggtgtggccgcagcctggctgtgccttcacgacgcagctgcaatcagaggagctgtgggacgctgtcccacgtggacacagcccactcactggacggtcccttgcaaacccttgcagtccgccatatccatctttcccactggattccagttctccaaggaaaagccacggcctggagccagggccacgctgcccggtgtcccagcccagcaggcatcaagaccacagagctgcttccagatcctggccatcctggacacctggagaactaccagtcgggatctgcaggaaaacgtgggcattcccataaacgtcattcgttttgcagaaatctga

SEQ ID NO: 3240 - DNA, 205 bp, Homo sapiens
  SIMILAR (25)..(96): 301254mologous to Canis familiaris muscle segmentation homologue (MSX2),accession number AJ277753,Smith-Waterman Score=44.
tggcacccagaactaacacccgtgaccccaggacccacagcaaccccttaccgaagcgtctctcctcgaagcctctcttctcagaacaaatggctgataaaagagaggtgagttgatctagattccagctacctctaaaccacagctcagtatctctgaggacactgcagccacatgcacgaaatcgtcgacccggaaattccgg

SEQ ID NO: 3241 - DNA, 728 bp, Homo sapiens
  SIMILAR (304)..(116): 231254mologous to Danio rerio growth-associated protein,accession number L27645,Smith-Waterman Score=39.
  misc_feature (1)...(728): n = a,t,c or g
ttttttttttttttgaggacctacatttaataaatcaaactgtcctggcatcatcagaatattcacagtttgcaacaggatcagcgcgttttctcccttgcagactcggaggtatttcaggagaaggcgacgtgagcgcaccattccgatgcttcattcttgaccctctctggggctttcaatgtgtcattgtgtcagatccctctccccttcaggttttcacggtgctcctcatgcctccgccctctgggatccctttgccgtcttccggtgtggaagctttggctgctggccggctggcctcgaaggagtccaggtgagatttagggagctccccctgggatngccaggcctggcgggcctggccccgtctcactcctctgaccttatatggaaatctctcttctgacctcttccagttctgcagctgcctgttcctttgtcagtttaattatttccctcccaaggctgtttacttcttcctcagaaggtaactggggtaatgaaggatgaaagagcttgcattggttcccgcggctctgatttgctggggagttgacagcgggcctcccagcatcctcaggcgctgtcaacgcctcagcagcggcacaactttcatcttcttcttgcttctgagcctcccttgctttgtgatcaggataggactctctgatgccccttctggacctaaccagcaatgcttgctctgcatgagtggggagcagcat

SEQ ID NO: 3242 - DNA, 921 bp, Homo sapiens
  SIMILAR (198)..(902): 311254mologous to Xenopus laevis Proline rich protein,accession number X68249,Smith-Waterman Score=187.
atgcttaaggtcttcaaagagcttcagttctccatgttacaactaacaaagagagagagaaatgggagccacagggagagcgaggagaaggagaaagggcagcaggaggaggaggagaggagcagcagcagcacctaccacccggggagcgcgcttcagccgccccccgcgccgccgcggcgagacgagtcggcttcgctacggtgctcggttctcccgccggctcggcgagcggtggcggcggtggcggcggcactgggaaaatggcggccgagctccttttccctccccccctttaatctgaagcggagggagaatggagcgagcgagcaagcgggcgagcgccggggacacggggaggagggacagcagcgcctccgccggctgcggctgcggcggcgaagggccgctccaccccggcgcgccgccagggggcgcccgccgcgccgcccccgcgggccgccaggaggcgcggccgccgccgcctcagtcatggctcctcgccgtggccgatgtttttgtacctccatctgcggaggccgcggcgcccggccccagctgccccggacgtgcggcgacggcacgcagcactgcggcagggggaagccagccctcgctgcggccgagccccgccgcttccagggccctcggcggcgcccgctccccgggccccgcggccccccgcctcccagccgggccgctccctcgagctcgtcgggtcagggacacctcctctacctcaccatcaccctggcccactcgtgcccccacccccaggggcaccagtgccaaaggcagctcccccagccccggacctacctgcacggttcaaccaagcctagaagtgggggcggggaatcttccgccctcctctggcgcccattggcccttcaggggcacatcgtgagcgccattggctga

SEQ ID NO: 3243 - DNA, 535 bp, Homo sapiens
  SIMILAR (315)..(256): 501254mologous to Caenorhabditis elegans metallothionein- I,accession number X53244,Smith-Waterman Score=71.
gcggccgccgccgcctcagtcatggctcctcgttgttgccgatgtttttgtacctccatctgcggaggccgcggcgcccggccccagctgccccggacgtgcggcgacggcacgcagcactgcgacaggtgggaagccagccctcgctgcggccgaggaatggccatgagatgtgagtagaagccccctggacagccctccaaaagagaactgtgagaaaaggttcttcaatcctaaaaatgatggaggaaaaaaacagtccctcttcctcagacagtgacacctcaaactgctacagtcacctttgcagcaagcgctgaagatgccaccaacatcaaagggaatagagagttggtccttggtgatagcgattaagccactgtatcaaccaatcctgacagatttgtatgacttctggatttccagccacagtacaagcaatgtaacaataaacatttgttaattgcttaagccaatttgagtttaggttccttatataataaatgaagtcaaaaaccaaaaaaaaaaaaaaaaa

SEQ ID NO: 3244 - DNA, 922 bp, Homo sapiens
  SIMILAR (376)..(173): 381254mologous to Homo sapiens Similar to CAAX box 1,accession number BC000393,Smith-Waterman Score=77.
ggagttcccgggtcgacgatttcgtggccccgaatgacactttacccgcctttttccaatgttgcacttgtttttttagactggaatgggctaaacaatgatttgctgcagggggtatcacttttttatattttctgcctgcttctgtgtcagtcttcacgccccaggtcagggagaggcaagccaggcccggagatcgactgcgcccgttggaacatcctcttctcgggaggctggaaggccatggacaatcacctatccccagcaaggggggacctgccctggaagaagaaaccagaccaggtgttggctacgtttgaggatataagagagcctgagggcctgagaggcagcctcctgagaagccctttccgagggcattcggaaccttctcgtcctagaggtgaagctgaactgtcaccaggacttatgacccgcggcttcgctcccattctgcccgtcgagttccacaagatgggctccttccgcaggcctagaccgcgcttcatgagctcccccgtgctcagcgaccttccccgattccaagcaactcggcaggctctgcagctgagctccagctcagccagcagggccgccagcgaggtgagggaggaagacctgctggcttgcaagaaagcgggggctgcttttgagtcctttcgcctttggtcttcctttctctccaaggacactgcagcacttcttgcaagctgcctcatcgtctttaacctcatgtgggaagagagttgggacaagcagcgggattttgccaccttgggtctttctctgtgtgcaaggcagactgactccatccgaggtgatttccctctgtcacttccgcgcttgcccactctgctgccatcctgctgtccctgcgcctctccaccagcttgattccagcttttagtaatgcctcctttac

SEQ ID NO: 3245 - DNA, 477 bp, Homo sapiens
  SIMILAR (393)..(470): 461254mologous to Homo sapiens Human secreted protein sequence encoded by gene 31 SEQ ID NO:180,accession number B24554,Smith-Waterman Score=60.
  misc_feature (1)...(477): n = a,t,c or g
atgcggagtgntgataggctccggatgtatgagccctgtggctcaagggcgctgttctctctgctccgaaatagaaataatacctgtctcacagagctgttgaaaagctccactgaaataatgaccgcaagtgtgaactgtaaagcaatgagagacgtggccgatagaagccgagtggcagtaactctaagttggagttacacggtggagaaggaagcactgactcagactcgggaaatatttccatgcaaacgctgtcctcatgtggtcggaaccagttacttcaaagaagatattccagtggaatataaaataatttgtgttactatggaaagagaccaaggctcaacactcaagtttcaaggctgcctctccccaccgaagactggcttgctggcggcagtggaaggaaggggaaccgaagacaggaggacatggctggccaggccagctctggctgtaacaactgtcatgtga

SEQ ID NO: 3246 - DNA, 1062 bp, Homo sapiens
  SIMILAR (709)..(870): 921254mologous to Homo sapiens Human secreted protein clone,accession number W73633,Smith-Waterman Score=302.
tcccgggtcgacgatttcgtctggcacgttgggagtttccctagcgactcacttcgggtgggcgttgggcgcctgagtcagccaaacaggctactcggggttcttgggtagcctttggggtgaggggacttgggcggtcttggtctgtaagctctgcgttcccgggcgtggaatagactggccgcgcacatgcgtttctgtggttttcctggtttggggaaagcggctaaatggtggctggctgcggctaactgggccgcgctaaaaggtatcccaaggcaggtggattacctggggaaacagctggagcagtggtcctgggccgccagtccgcggtcatcccgggagcttaagatgcggagtggtgataggctccggatgtatgagccctgtggctcaagggcgctgttctctctgcttcgaaatacaaatattacctgtctcacagagctgttgaaaagctccactgaaataatgaccgcaagtgtgaactgtaaagcaatgagagacgtggccgatagaagccgagtggcagtaactctaagttggagttacacggtggagaaggaagcactgactcagactcggtgcgcaggacgaaagccatctggtagctttgcttgcaagaccagattaagaaagcaccagcacaaaaaccacaaaggagaagatgaagctgtatttccggaggaaagcaaagatttctacccaaagctgagaaattggaaagctggacagccggataactggggtcatggccatgggccaggagaagactgtgctgggttgatttatgctgggcagtggaacgatttccaatgtgaagacgtcaataacttcatttgcgaaaaagacagggagacaggtctgtttggctggggcagctttgttccaggtgtgttcactctagggccctggccacaggaacagaggcgaaggccaggggaactctgcacggtgatggcagatatgcaagagggcaagcccagtgaccctggtgctttccaaggctttggctgtatcacatccaccaacattggccaaagcaaggcgcgtgactga

SEQ ID NO: 3247 - DNA, 892 bp, Homo sapiens
  SIMILAR (281)..(430): 371254mologous to Homo sapiens T cell receptor beta chain variable region,accession number AJ389975,Smith-Waterman Score=78.
ctctcaggaacaggtccgagcagaacatccctatggagggaatgactgtcctcagctgacccaagaaggagaagagatcggtacttcatctacatgtgacccaggaaagccaaacatgtcttccagggcccatcaccaatgtgctcagactcagctgctgagcaaactgatgactcacattgagcctacaattgctgccttgactgggctccaccaaactaccatagcaataaagtatctccctaaaccaaggctcagcaagccagggcatctcctgccagatttctgctccatcccatatgacatctactttaacctgaggccttatgcacagatagcaacactgaagtgcccccagaagacccaaagagggcaagaccactacaaaagttttgaggatgatggaagtttcaccccggaggactggtttttcccactggtccctggccctgcctggggcagcccgtgtatcaagctggaaggagggcatggggaaagtcccaagaattggttgtcaagaattaccatctggcccacaccaactattgggcttttcgggcacccttcacctttactcgaacttcactgtcctgatgacctgtgtgcttcaagcttctgtaacaaaaccttcagggtggagacttttgcccatgcttttctggaagttttgggtgtccgctgcgctcctgatccagtgaggcacccattgccgctccagatcaggctagagattctcttatcaccagggaaaggcctgtacaactgctcagtaagccttggccgtaaggtatgctccctaatacagaataaagggcaggatgccacagtgcggccagcaggctcagtcccatggagagcagcccagtacggcttaagctgtaaagacaagtaa

SEQ ID NO: 3248 - DNA, 918 bp, Homo sapiens
  SIMILAR (1)..(159): 731254mologous to Homo sapiens Human secreted protein, SEQ ID NO: 7193,accession number G03112,Smith-Waterman Score=183.
atgaacagacacttcccaaaagaagacatacaagcagccaatgagtatatgaaaaaatacccattatcactaaacatcagagaaatgcacatcaaagccacaatgagacatcatctcacactagtcagaatggctatcattaaaaagtcaaaaaacaacatactggaactcctgcttgtgaatatgcctcagaactgcccatacctcaaagggagtctgtccagagaagaggccacggttggagagaaacacatgtcttccagggcccatcaccaatgtgctcagactcagctgctgagcaaactgatgactcacattgagcctacaattgctgccttgactgggctccaccaaactaccatagcaataaagtatctccctaaaccaaggctcagcaaggtagaattttcttcttttgtctatgatcgtggtctgaaggatgacttttcagcagcagaagggactggaatggaagcgctgagacgcaggcctttcctggcgcgaagcgactcgccccggagctcccctgcaccgtcctgggtgtcaggacgcgtcaacccagatgacccgacccggagatcctggatcctctgccctcttccccctaccaagtccttaaccggagagggaggagctaccaatgtcctccagacgttctccaaagcccgagctgccgggagaagcttgctcaaggcgggtgcgcccctcagacgtttgtttgcacgcaggggttttgacgtttcgctaagcaacagcgtttgccagggaatcagggctgtttcgaagagcttgcgtctatttgatgctcccatcttgaacaaatcgtttccattcgatttgtttaaccaaggcgagggcggactatgttgttacttaaaagttattcttcatccaagctgtcctcagattttcatctaa

SEQ ID NO: 3249 - DNA, 1122 bp, Homo sapiens
atgggcctgcagttcattgcacctgatatattcgaaaggcttatttgggcccatcctgctgcccaagaaggcccactctctgagtgcagtcattggccatgggccactgatagaggtcaatctgagaaccatctagggaatgaggaccagggaaaaggctcccctaaccctccatctggtgtgaactgcctgccagaacacatggagaaccctccctctgggagctgcagcactcgagcagcagcaaggaaagaaaaagccagctacccctggaacttgaaagtaattggacaatcttcccattctggaagaaatcttcatatttgggttgtagatcacagactctccaacagagaagtgggcctaagtcagaaaattgtactatggcctgatttagagttccctccacaggaactcctgcttgtgaatatgcctcagaactgcccatacctcaaagggagtctgtccagagaagaggccacggttggagagaaacacatgtcttccagggcccatcaccaatgtgctcagactcagctgctgagcaaactgatgactcacattgagcctacaattgctgccttgactgggctccaccaaactaccatagcaataaagtatctccctaaaccaaggctcagcaagccccgtgaagaagacagtggacaaagaaactgtgcgctgagacgcaggcctttcctggcgcgaagcgactcgccccggagctcccctgcaccgtcctgggtgtcaggacgcgtcaacccagatgacccgacccggagatcctggatcctctgccctcttccccctaccaagtccttaaccggagagggaggagctaccaatgtcctccagacgttctccaaagcccgagctgccgggagaagcttgctcaaggcgggtgcgcccctcagacgtttgtttgcacgcaggggttttgacgtttcgctaagcaacagcgtttgccagggaatcagggctgtttcgaagagcttgcgtctatttgatgctcccatcttgaacaaatcgtttccattcgatttgtttaaccaaggcgagggcggactatgttgttacttaaaagttattcttcatccaagctgtcctcagattttcatctaa

SEQ ID NO: 3250 - DNA, 342 bp, Homo sapiens
  SIMILAR (82)..(156): 401254mologous to Pan troglodytes putative,accession number M57946,Smith-Waterman Score=48.
atgcttttaactgggaacctcgacataaaagtcagggcactgatgctcaagggccctgaccagggtctgtgccacatccctgcacccggagaaacaactcaaggtagttgtccctatggcagtgggcagaaggaagggacggagagagcatctgggccagaagaatacatggcccaggtcccggaaaacagccgcgccccgttcaccgtgcttgaatttccagaggcagaacaggaaatgtccacggggctggagctcaagtgcgaagtcagctgggtctccggctcctttccgaggggcgcctcctacgtgctcccaacgctggccctgtctggaatttaa

SEQ ID NO: 3251 - DNA, 798 bp, Homo sapiens
  SIMILAR (112)..(495): 1001254mologous to Homo sapiens Human secreted protein, SEQ ID NO: 6486,accession number G02405,Smith-Waterman Score=672.
atggcacataagtatgacactctgaacacagccagatgtatgagagcacctcctttttctcaggcctccaagccagacatgaggcttactggctctctcctatgttcacagttctgcctctgcatggctgaagccatcctactcttctcacctgaacactccctgttcttcttctgctcccgaaaagcacggatccggctccactgggcagggcagaccctagccatcctctgtgcagctctgggcctgggcttcatcatctccagcaggacccgcagtgagctgcctcatctggtgtcctggcacagctgggtgggagccctgacactgctggccactgctgtccaggcactgtgtgggctctgcctcctttgtccccgggcagccagggtctcaagggtggctcgcctcaagctctaccatctgacatgtggactggtggtctacctgatggctacagtaacggtgcttctgggcatgtactcagtatggttccaggcccagatcaaaggtgcggcctggtacctgtgcctggcactgcccgtctatccagccctggtgatcatggcaccagatttccagatcctacttgccgaggaagaaaatggaaataatttggaacaagtgaacaattctaaacttttcaactgctacgtgtttcagaagaaccaagacaggtataaattggttattgaccaaactataagtctaactcaggatccttggttattaatgttcacacagaacctgccttatagtactagtacagaagcagagccagtgggacaggtcttctga

SEQ ID NO: 3252 - DNA, 624 bp, Homo sapiens
  SIMILAR (297)..(407): 441254mologous to Pisum sativum PsAD1,accession number AB031227,Smith-Waterman Score=74.
atgcccgtattgctggctttgaagatggaggaggggccacaagccaaggaatgccgacagtctcaggaagttggaacaagtaaggaaagggattctttcctagggcctccagaaggatttccaagctcttcagtagccgcaccccagatgttccagtgccagcaggtgcaccccagctctggcccacacaggagcgatgagctctcccagccccctgaccattccctggcagcaaggaatggagctgggggctccaggacaaggactcgctcccaggaggacggacgaggtagcctggatgcttcggaggggcgctctggggcaaggaaggacgtgcttctggaagcgacgcacaagggggctcagggtctcggcctcctgggggtagggggggacacgcctcgagatctttccacacaccctgaaaaagttcccgtccagagcgcccagactggcgctaggaggaggccagttctcggggacctagcgcttccctccatgagaccttctggacctgacccaccaggtcaggcgccgccgccgccgcggtcacgcgtgcagccctggattccagcgggcggcggcggcggacacgcgacccggtaccctggtctcctggcctaa

SEQ ID NO: 3253 - DNA, 756 bp, Homo sapiens
  SIMILAR (706)..(233): 281254mologous to Homo sapiens H-Delta-1 polypeptide (reading frame 2 product),accession number W11726,Smith-Waterman Score=108.
atgcccgtattgctggctttgaagatggaggaggggccacaagccaaggaatgccgacagtctcaggaagttggaacaagtaaggaaagggattctttcctagggcctccagaaggtgacaacccgaagctcagagagaactcccggcgagcccggctgcggtcacgttctcggccccagacccccgaattcccgtgcgctctctgcacccccagccacactcaccataagctggaggcggcggaagggggtgctggtttctcacgcactgtccgcaacttcgcgggcaggcaattaagcaacttggcaataaaagcaaccacatttttcctggagcagttcacggagaacacagaacagcacaggacagatgttgaaccaaaacgcaggaggctgacctggaccaacaacagctatgggcttcctggtttggacaatggagagcaccagcagagacggaggtgcttcctggtgggtttggacaatggagagcaccagcagagacggaggtgcttcctggtgggtttggacaatggagagcaccagcagagacggaggtgcttcctgcaccaccagctctttccaggagagtctaaagagattctgagtgcaccagactatggcaaaatgggagaaagacactccaagctcgtgccacactttgcctccagagcaccaaagcccctcatggagcctcttgagagcaccttctggacctcactcatcaactacaccatctacccaccatcaggataa

SEQ ID NO: 3254 - DNA, 624 bp, Homo sapiens
  SIMILAR (241)..(615): 291254mologous to Coprinus cinereus pcc1,accession number AB007760,Smith-Waterman Score=99.
atggttgatgatggctcctcaccacctcttgcctgccccatgaccctggaggagggtgatgtaaaaaactgtacgttctacggacagcaagattattacaacattactgaaactttatacctgttgattagatcagcaaatctcatttccctggcccctgagaccctggccacaaccttctactctctgctctatgagtttgacgattttagatccccgaatccctcatgcagtaaagacccccgaattcccgtgcgctctctgcaccccagccacactcaccataagctggaggcggcggaagggggtgctggtttctacgcactgtccgcaacttcgcgggcagcgccgccgccgccgcggtccgcgtgcagccctggattccagcgggcggcggcggcggacacgcgacccgtaccctggtctcctggcctaaaggggacagagggtgaaagttggatgcggggcaatgagcccaggactttcacctgcgcccgtcctcgtcctggtagccccaggctttgccagccacatccttcccttgctctcaccaccccaggcacgctggccaccttgctgttctcggatgtgcagagccctctccttcctcccccgggcttctga

SEQ ID NO: 3255 - DNA, 459 bp, Homo sapiens
  SIMILAR (37)..(459): 991254mologous to Homo sapiens dihydroorotate dehydrogenase,accession number M94065,Smith-Waterman Score=725.
  misc_feature (1)...(459): n = a,t,c or g
nattgattacaattcgcncgngcggnggaattccaggaagtgagagttctgggccataaattccgaaatccagtaggaattgctgcaggatttgacaagcatggggaagccgtggacggactttataagatgggctttggttttgttgagataggaagtgtgactccaaaacctcaggaaggaaaccctagacccagagtcttccgcctccctgaggaccaagctgtcattaacaggtatggatttaacagtcacgggctttcagtggtggaacacaggttaccggccagacagcagaagcaggccaagctcacagaagatggactgcctctgggggtcaacttggggaagaacaagacctcagtggacgccgcggaggactacgcagaaggggtgcgcgtactgggccccctggccgactacctggtggtgaatgtgtccagccccaacactgccggg

SEQ ID NO: 3256 - DNA, 767 bp, Homo sapiens
  SIMILAR (235)..(519): 721254mologous to Homo sapiens dihydroorotate dehydrogenase,accession number M94065,Smith-Waterman Score=320.
  misc_feature (1)...(767): n = a,t,c or g
gggccagcccctgataccctagcttgagagcctatccaggatttgcagtaatttgtccattttccatgaaaattttaaaaataaaaagggcaaaatgcagcaaaacatcctcgtagctgcccagactttgctagacaaagccagtgagtggttttggtcagcaggcgggcccaggccgcagttgagcacctgtcagccggtgtcgggcaggtcaggtttggagggaaggcctgcgcggctgtccacaggtggtttggtcaagggcagcctcagaaggtggcacaggaaagggtgtgcggggtgcaggcctgaccagcgatgtttgcagatggactgcctctgggggtcaacttggggaagaacaagacctcagtggacgccgcggaggactacgcagaaggggtgcgcgtactgggccccctggccgactacctggtggtgaatgtgtccagccccaacactgccgggctgcggagccttcagggaaaggccgagctgcgccgcctgctgaccaaggtgggcagctgcacccctctccaggccctgtcccaccagcctgtcccacctgctccccttcattctccagggcgaaccttcagcatcaccctcagaagctgtccttagcacctagaccagtaggacccctggctataccttcccagagtcccctctgatcccctctcatgacactgattatatgcgacggtgacaaattatctgtccctgctgctataaatcacggngtctgtaagagcagacaccacgtc

SEQ ID NO: 3257 - DNA, 777 bp, Homo sapiens
  SIMILAR (25)..(525): 781254mologous to Homo sapiens dihydroorotate dehydrogenase,accession number M94065,Smith-Waterman Score=590.
cccattgacactgaagactttgcacgaggcctgctgaccaaggtgctgcaggagagggatggcttgcggagagtgcacaggccggcagtcctggtgaagatcgctcctgacctcaccagccaggataaggaggacattgccagtgtggtcaaagagttgggcatcgatgggctgattgttacgaacaccaccgtgagtcgccctgcgggcctccaggggtgccctgcgctctgaaacaggagggctgagtgggaagcccctccggggatttatcaactcaaaccattcgggagatgtatgcactcacccaaggccgagttcccataattggggttggtggtgtgaagcagcgggcaggacgcgctggagaagatccgggcaggggcctccctggtgcagctgtacacggccctcaccttctgggggccacccgttgtgggcaaagtcaagcgggaactggaggcccttctgaaagagcagggctttggcggagtcacagatgccattggagcagatcatcggaggtgaggacagcgtctgacgggaagcctgatctggaaccttcccaaggactcaggcaagcctttgtggctggatcatgagaggagggactccatcttgagccatgtcccccagccatggcatggctgcactgtaaacgccaatcggggggtcaccaggatcaaccgcaggctttcttcagtcccttggtcagaccataaactgcatttttgattcttttgtggattcaaaccctaggatccatcagtcttgcag

SEQ ID NO: 3258 - DNA, 478 bp, Homo sapiens
  SIMILAR (51)..(362): 781254mologous to Homo sapiens dihydroorotate dehydrogenase,accession number M94065,Smith-Waterman Score=394.
tgtgcccttgggaacggcccggaattcccgggacgacgatttcgtggagcatggcgtggagacacctgaaaaagcgggcccaggatgctgtgatcatcctggggggaggaggacttctcttcgcctcctacctgatggccacgggagatgagcgtttctatgctgaacacctgatgccgactctgcaggggctgctggacccggagtcagcccacagactggctgttcgcttcacctccctggggctccttccacgggccagatttcaagactctgacatgctggtagtgctcccagacaccctatacattaaatacaaaggcgaaggctgcagtcccctaaacttctcagctgggactgatctttttgaaaaccagaaccccaagaagggagagttctgggccataaattccgaaatccagtaggaattgctgcaggatttgacaagcatggggaagccgtggacggactttataag

SEQ ID NO: 3259 - DNA, 1015 bp, Homo sapiens
  SIMILAR (653)..(739): 681254mologous to Homo sapiens dihydroorotate dehydrogenase,accession number M94065,Smith-Waterman Score=86.
ggctgctggacccggagtcagcccacagactggctgttcgcttcacctcctggggctccttccacgggccagatttcaagactctgacatgctggtatggatttaacagtcacgggctttcagtggtggaacacaggtacgggccagacagcagaagcaggccaagctcacagaaggtcaggtttgggggaaggcctgcgcggctgtccacaggtggtttggtcaagggcagcctcgaaggtggcacaggaaagggtgtgcggggtgcaggcctgaccagcgatgttgcagatggactgcctctgggggtcaacttggggaagaacaagacctcgtggacgccgcggaggactacgcagaaggggtgcgcgtactgggcccccggccgactacctggtggtgaatgtgtccagccccaacactgccgggctgggagccttcagggaaaggccgagctgcgccgcctgctgaccaagcctgtctggacagcgggtctctgtggcataggagagtagtggaaacagactgagcccggccatcgtgggttcaaatcctggttccaccacttactacctgggggcctcagacaagacactgtaattgggttgtgccgagttcccataattggggttggtggtgtgagcagcgggcagacgcgctggagaagatccgggcaggggcctccctggtgcagctgtacacgccctcaccttctgggggccacccgttgtgggcaaagtcaagcgggaacggaggcccttctgaagtggttggtcagttgggacctggtggtctgctggtggtcgtttgggaatttccaggtaagaaatgccttaacccagtgaaagatctgctccagatgacccttaaaagtgactctaatgccaactacaaacacaacgacaccctaaactgtcgaccaaccactttactggtactctacaacaagacccatacactgttcgcaacaacaaccacaacccagaaaaaaccagaaaccgtgctcgtcacctaa

SEQ ID NO: 3260 - DNA, 841 bp, Homo sapiens
  SIMILAR (325)..(345): 851254mologous to Bromheadia finlaysoniana extensin,accession number Y13142,Smith-Waterman Score=42.
gagttcagtgagtggtttacctggaaatcttgacttcagatgacctgaaaacggtggcttatagaggtgagagaaaagaagacctgtaattatggcaacccattttaaagatagtttagggaaactgaggcaaaattattttctcaagtggtgctttaaaattccttttaacagaacaaatccccaaaccggggggaaaaaccctcatgacctttagtttacgatatcagtctatccgttttcagaaatggggaacgaggtttgcagtgaatggatttctcctttcagagctcgcttaggaagcctggcttgcttctattcttttctcctcctcccccctacttcaagcaaaagcacttgagattcaggaatgtttttaaattcaaatacaaagagaaggaaaggaagccaaacgacctgagacaggggttgtggcttagaacagaccaaggttcattcctcgagcctcctctctctcagtctccaagtgtccccccattcccgggtcccggtgcagatgatgctgtgctgcggtctgaagactgagcaacaggagtccgcccccctcgcagctccctccccgacccgctatctccagagtctgaatgagcatcttgagtgcataggtatagagcatttgctgcttcataccacgggtaccgagagacactacagctcaagtatttactacagctgcagcgttgatcaagctgagggagtaaatgaacatgtagcacgtgagagtgcatcaaaatcccccccttctcgcgggccacctttcctgagagaggggagtacggttcgggttgttatagattccacgaggcctgtgcatgcataa

SEQ ID NO: 3261 - DNA, 320 bp, Homo sapiens
  SIMILAR (285)..(175): 361254mologous to Medicago truncatula MtN12,accession number Y15369,Smith-Waterman Score=70.
ggagaatgagtgcaaggttttattgagtggaagtagctctcagcagatgggggagccagaggggagatggttttcccctggagtcaggcaacattctcgggatgtccagcagcttgtcttcttccaccagtgtgttcctctccccacacagaggcttctgtctctgccttgctagggtcttgggtttttataggcataggatggaggcatggcagccaggggtggtcttgggaaatgcaacatttgggcaggaaatgcctgtcctacctagtcggggggggggtggagccctaagcagggaccacgcccttctctacgca

SEQ ID NO: 3262 - DNA, 1212 bp, Homo sapiens
  SIMILAR (310)..(861): 431254mologous to multiple sclerosis associated retrovirus element gag polyprotein,accession number AF123881,Smith-Waterman Score=404.
atgcctgtggctgcacagataggagaacctccagcccactcagataaaaacttgcacaaacctccagctcattcagaccaccctggcctgccctgtccccatcttgtgcctataaaatcccctgaggccctagtgtgcagagacaaaagtggctggacgtcgagagaaacacatcagaggaagaacacacaagtggctggatgtcaagaggacgtcgaggggagcatgctgacggaagagcacagtgacagatgccggcaggatggcaggccattggctggcagaatgatgtggagtttggccggggagaacttaaagaaaattaagggggaccttggcaagtgttcagatgaccctcatagatatatagaggccttccagaatttcaccaagatatttgaattctcctggagatacgttattttgcttttgaatcagaacctgatggacactgagaaacaggccactctgcaagcagcagagagatttgggaatgagttttgtatcacgtatagcatcagggaagggggtgactattatccatctggaagagaaggagtaccagtgagtaactctaaacgggatcccaatgacgagatggaagactggaaaaggagacactttcaggtgtgcataatggagggtttatgtaggaccaagaccaagcctctcaattatgctaagttgtccattattgaccagggatttgatgacaattctactgcttatctggaaagcttaagagaggacttggtaaagcgcacctctctgtctcctgattcagtcaagggacacctaattctaaaggaaaaatttattactcgggcagctcctgacatcaggaagaagttgcagaaattggccctaggaccagatagcacattagaggacgctcctgaaagtgaacaccgagaccctagcaggcagagacacaagcagctggaagttgagaggaacacatcagtggaagaagacacagtggctggacatcaagaggacacctgcggaagagctcaccgacaggccattgataggaggaatgacatggagtttggctggggcagacggaggagagactggaccactgagcagcccgattccaaaagaatagcaccttcccgctccatctcccttctggctcccccgtctgctgagagctacctccactcaataaaaccttgcactcattctccaagcccacttgtcctctga

SEQ ID NO: 3263 - DNA, 495 bp, Homo sapiens
  SIMILAR (151)..(59): 481254mologous to Homo sapiens Human secreted protein, SEQ ID NO: 6874,accession number G02793,Smith-Waterman Score=72.
ttatgagcttggagaatgagtgcaaggttttactgagtggaagtagctctcagcagattggggagtcagaagggagatggttttcccctggagtcggaccgctaggtggactgggctctcctctggctgccctagccaaatgtcgttctgctggtgggtggcctgctggtgtgctggtgcctcctgatgtgcttctcgccatgtccagccacctgtgtgtctgcctgctggggtcagctcagacaccctctcctgccaggggctgagcccacagtcaggtggccacaggatccacacctgcgtgcaagccaggagtggcccagtgggccagttgtgcagggcacctcctttagcacgggacgctgctttggggggatcgccctcgacacagcgcccctcccggcacctggccagaacctcccagggcgaaggtcggggccgagaagcttgtgagtaccggggcagtgagggagggatccctaagtgcagacgaaa

SEQ ID NO: 3264 - DNA, 564 bp, Homo sapiens
  SIMILAR (265)..(131): 371254mologous to Arabidopsis thaliana extensin-like protein,accession number AL035526,Smith-Waterman Score=64.
tcaaggcttctgaggctttttctgttcgggactgtatttcccagcggccaccgcgccagtccacttccggtctccggggtcgacgacatagcggggtaaggtcttcacgtctgaggaagagatctgtggctgcgggagatctctgcggattggggctccagcctgactgacccgacagtgcgggtggcctagggggaggcgctcagagtaggaacccgggggtgcagacgggatctgccggatccccaggcgtgtgtgtgcgcgggtatcagaggagggggattgtgagatcatgagtgacggaggggactgtgagtgtgtgcgtgaggttctatgcacaggcccgggagggcgtgtggacgcagcgcactttgctgagtgacactgtgccggtgcccctaggctcctgctgcttcctccctctttccgcttcacagctgcggggactttccacttaatagtcacaaaacaatttggcaaatcgttcacaccttcctgtgcgctctctttttcgaagctccttttcaaaacagggaagaatggagatggttggatgatctccat

SEQ ID NO: 3265 - DNA, 647 bp, Homo sapiens
  SIMILAR (123)..(257): 971254mologous to Homo sapiens Human secreted protein encoded by gene 36,accession number Y00293,Smith-Waterman Score=236.
cggaattcccggttcgacgagatcgagtgctttcccttcctggggatctggctaaaaagcgggttctgattctttaggtctggggtttccagagtccgcggctttgctaagaagccgcagtgatgttgacgcggctggtcctcagtgcacacctgagtagcacgacctctccgccctggacgcacgctgccatcagctgggagctggacaacgggctgatgcctagtcccagaatctggccccaggtgactccaacagctgggcaggatgtgcatgccatagtaaccagaacctgtgagtctgtgctgagctctgccgtctacacccacggctgtggctgtgtgaggaaaggacaagtctctgggttcagtgtagcagaagtggacaggctgcagatgtgcgtgtgtctgccctggtcccaggtcctagtgcagaagcctgggaccgaggacagggccattttccagaggagaaacaccctggcgggcgagcggccaaaccgatcacctgtccagctggagagcaggctgccagaaccgatgcttcctgctcagtataatggcggctacagcttctccttggccttcccatcgtctcctttggtcctgctgctgctggagtggctgagcagcgggcactgggtgtga

SEQ ID NO: 3266 - DNA, 686 bp, Homo sapiens
  SIMILAR (81)..(401): 351254mologous to Homo sapiens Human bcl2 proto-oncogene mutant protein fragment 14,accession number Y21166,Smith-Waterman Score=78.
atgaattctgaagaggacacaaacatccaaaccatagcagtcaatgccttagcccttgatgttgctatcaacctgagattcggggatcaaggaaggacagagaccacctcgctcccgggactcgccagcgagggatgccgccggtcgccggggtgtcttctccaggaccaggagagaaatcctctctccgcttcacgacgcggccactcccacccctgagacgcccacctggcggactctgagggaggattcggctgcgtctaataccacctccacccctcatccctcacaatgcgcggaaaaccacaggcggctgtgcgcgcagcgtcggctcagccaccgcagctcctcccctgggatgaaaaagcactctgacgtcttgaaagctggcagctctctgtttggaaaatctctgcccagtgaaaaaaatgtaccgacaaagattactaagtaacacagtcttctgggaatgccttatcaatgccagctatttgaagagcacccaaaagtcaaactagtgctccgcgctggcagtctggaaaaggcagatgtatgtgagtagagaaactgatagacaactagttgctggccagttggcctgttttcgtgctacaagccttcagaaaacagtcgcctccttttaccacgtttctatttctaaaccaaaatgaaaaggacgtttgttc

SEQ ID NO: 3267 - DNA, 690 bp, Homo sapiens
  SIMILAR (1)..(93): 641254mologous to Homo sapiens PRO1412,accession number AF116659,Smith-Waterman Score=92.
atggggtttcgccatgttagtcaggctggtcttgaactcctgacctcaggggtcagcagcgcccctgccccgcctcccgtcaccgcatcctacctgcggctggtgtgggacgctggcagcctccgaaaagcgcggggactgacgtgcgcctgcgcgctgctgtcgccctcggactcgcgccgcagggagcgggcggcgggagaggagcggatccacttaggtcagcggttaaaacgtcgttacaagaggccaccccggcatcgcggggcctgtgggagtaatagtagtcctgacaaggttcttatgaagattaaatacgagaaccaggcaaagagcttaacgtggttcttggcacatgatggaaaaggaaagtcaagagaggctgaacaaagtctccagtatcccggtgtttgcagcaaaatcatgtcttgcgtgcatgaacaggcagtaccatggacagatccacagtgcatggttgccatccccactccgggcttgtctcatcactttgtgctcttccaagggctcaagtctcctctcctgctctgctacctgcaggctttcccacggctgcagctcctcctcgcctcagagctccaagagtcagaagacactcagattagtgaggctatggacaggccgctgtcctccaaggagggccagtggcagaggtgtgggatggagccttga

SEQ ID NO: 3268 - DNA, 930 bp, Homo sapiens
  SIMILAR (705)..(839): 431254mologous to Murine leukemia virus gag p10 protein,accession number X14576,Smith-Waterman Score=97.
atgcctttcagccccaaggctgccacctgctcccttgagaggctacactctatacttcaggtggtcctaagggagaaagtgacccaagagctaatatccattagacattttagcagacatagccatagtgggtatcttggtttatctccagaaagtactaaaacccaggcccagaataaaactgaaggatgtcggaccggcactctcactgtttctaggcttccaggaggtcctggtgtcttagctgtggatctcccaatacctgcagaatatttttggcgtcacgaacaggattcaaaaaccaaactgtgccactttttggccacaaggacagggctggaaactcgaggaaatcccaaatccagggatgggaactccccaatatcactgtcaattcctacaggattgaacgaaggggacgaatgcagaaatgaagacaaagacaaaagatttgttttaaaagaagggagacaaaggagacacgttttatccatggacccaactccggcaccggtcatggactgggaaggcagccttcccttggtgtttaatcattgcagggacacctctctgattatacactcacgtttcaagggtgtcagaccacacagggacacctgccttggtccttcacccttagcggcaagtcccgattttctgaggaagggacaaagggggatgtgtcagggtcacaagacaattgtggggagagggtcagccgacaaacacgtgaacaaaggtctttgcatcatagacaaggagcttgctacacgtgccggaaatctggccactgggccaaggaatgcccgctgcccaggattcctcctaagctgcgtcccatctgtgtgggaccccactgaaaatcggactgttcgactcacctggcagccactcccagagcccctggaactctggcccaaggctctctga

SEQ ID NO: 3269 - DNA, 811 bp, Homo sapiens
  SIMILAR (459)..(289): 401254mologous to Homo sapiens Similar to CAAX box 1,accession number BC000393,Smith-Waterman Score=80.
atgccgcgacgttgcttgatcctctagagcggccgcaatacactccttgcttaaatttttaagtattttcgcgataactcccataaatttttaatagaagaaaagaggaactaggaaccccataaaccaaaccaaagctcttcccattcgtgaacccgcaccccgagtcaggattctcccctgaccaccctcccgtggtccctgcacaatctgggagagacacgacgctgcgggtgcagagctgcccagagagggctccaggccagggcaccgtcactgcgcagggaagagacaggacgcccgggggtccggctgccagcgcagccgccaatctgatggctgaaggggactgaggctgggctgggcaaggcgaacttggggcgcagattgtggagccgactgcggggaggcctgagtcccgccacagcctcttgccaccggttccaaccagccccttcccctctctcgggatgtcggacccggcactctcaccgtttctaggcttccagggggtcctagcgtcttagctgtggatctcccaatacctgcaggtcacagggccacagaggctgggcctctacgagcagaggacacagaagcgcgaagacgagaccagtaactccggctgcagcgagagacaaagaccccgccacatcccggaagccgccctttccgctccaaccgcgtgcctgattggacagttcccaggccagcgtctctgacttgttaacgtttaagatccctcgccctcacgccctgagtgacagaagatgtgaccaaatgctgggctgaatgaagaaagacgaattcc

SEQ ID NO: 3270 - DNA, 471 bp, Homo sapiens
  SIMILAR (50)..(244): 351254mologous to Gallid herpesvirus 3 DNA binding protien,accession number L10087,Smith-Waterman Score=92.
tttcgtgcacgagacccttacaggttgtgggaggatgctggtcagggcttggtggggtgcacagctgccctgtcaccctgcagggaacacccggcatcttactattaatagctcctccagctcacaccttggaagagggtcctcagagggtgtctccccaccccccagccgcaagctggtggtacagattcctgagatcccctcccgacataccacagcagccttggcaaggagatccaggaaccttcaccgggagaagcttcccaggatcatcctcccactcagcaccgaggactgctgctgaggggagcacaggagccagcccggaagcccagcagggcttgtgaggaaggagcaggcccttcaccgaagatgctgctgacgtcaagtcagcacagaaggtctagagaaacctgcagaatcgtttcctggctgctctgaagagagtatccagccctgctgtgaaacttc

SEQ ID NO: 3271 - DNA, 1104 bp, Homo sapiens
  SIMILAR (351)..(377): 1001254mologous to Homo sapiens Human secreted protein encoded by gene 14,accession number Y04306,Smith-Waterman Score=66.
gcggctacaatttcctgcgcgcggaggcggacgtcgcgcccagcctgtgcccacacattttcgtttagccaggcgccggacccagcttcagagcggctgaaatcttggagggaagaaaacacatcccaccctgcctccgggaaggggcctctcctggacatgtctcctgcagctgctgctgagccagatggggaccagcaggacagacacgtcagcaaactcatcctctgcttctttgtcttcggcgccgccttgttgtgtgtgggagtcctgctctccatctttgggttccaggcatgccaatataagcccctcccagactgccccatggtgctcaaggtggcggggcctgcatgtgccgcggttgggcttggggctgtgatcctggcccgctcccgggcgcaacttcagctccgtgcagggctgcagagaggtcagcagatggaccccgaccgagccttcatctgtggagagagccgccagtttgcccagtgccttatctttgggtttctgttcttgacaagcggcatgctcatcagcgtcctgggcatttgggtccctggatgtggctccaactgggcgcaggaaccgctaaacgagacagacactggcgactcaaagccccggatgtgtgggttcctttctctgcagatcatggggcccttgattgtgcttgtgggattgtgtttcttcgtggttgcccatgttaagaagagaaacacgctgaatgctggccaggatgcctctgagagagaagagggacagatccagattatggagcctgtccaggtcactgtagctgctcagagccgcaaggggctggaagttgggcagggtgggaggtcccatgtcaaagctgaagatgaaagagaaaccaggccagcagtcatccaacaagatctagtggccctgatgaagccagacaaaaatgtaatacagatgacacaggccagccaggcgaggattcaagtacagcacgtcacaggaccctgtcagtggccaccactacctggcaatcctgagatgatcaacaaaatcagaaaaggtccggatgacaaaatcagactccagaggaaggtggttcatgggtccacgtggatgtga

SEQ ID NO: 3272 - DNA, 593 bp, Homo sapiens
  SIMILAR (114)..(200): 511254mologous to Homo sapiens Human secreted protein encoded by gene 49 clone HFOXE30,accession number Y14459,Smith-Waterman Score=68.
actctgtctacctttttgggctttttcagtgatgtttctccagcatttcaaaggcaccatggtatgggtagttaggaatatgtgctgtggtgccagactgtctgggtttgaatcctggtctactgtccactaactctgtgactctgggcaagttgctgagcctctttgtgcctcagtattgtcatctgtataatggaaatcgcggtagtgctaacttcatagagttttgtgagattaaatgtattaatacatgtacgacacttaaaacaacggttacttgtctattaaccatttggtatatgaaagagacaacaaacctggggtcagacactccactgcctgtgcatcttgcctgtttccggatccgccgtgtcacagacattttctatgtcagtgcctatggctctacccagtggttggcattttactttcggtgctacagagtggcagcaagctacactgtttctgtgctgaggttgttgtctgagagagatttatctggccctagcaaaagtatcggaaaaaaacaagtgcaagcacttccttctaatattggtttagttgtggtcaaaaacaggaattatgagtcatga

SEQ ID NO: 3273 - DNA, 87 bp, Homo sapiens
  SIMILAR (1)..(66): 1001254mologous to Homo sapiens Amino acid sequence of a human secreted protein,accession number Y10874,Smith-Waterman Score =104.
atgcggcccctgctctgcgcgctgaccggactggccctgctccgcgccgcgggctctttggccgctctttccaccttgctgcactaa

SEQ ID NO: 3274 - DNA, 819 bp, Homo sapiens
  SIMILAR (558)..(638): 581254mologous to Homo sapiens SEQ ID NO 359 from WO9922243,accession number Y19641,Smith-Waterman Score=79.
atgcgaagtttgattgtgaaggatggtgtcaagtctgcaaagaaaaatgtttctaaatcagtaaggcatattctcacattaaaatgggtggcagcagcacacgccagcgtgcaccgccctgagcatttcaaaaagccgaaaggggctgcggggataaagggaaggccaggacccacgataggaattgtggatggggtttctgtgcgtcaaagaggggatggtgacagcgttccagaaaaaaatcgtgtccacttatttgaaggcaagaaaaagagctggctgtctgttaaagatggtcatttggacagtgtccttgaatggccattttggacaaaactggttgtggtagccattggcttcacaggaggtcttgtcttcatgtacgtacagtgtaaagtctatgttcagttgtggcgcaggctgaaggcctacaaccgtgtgatctttgtacaaaattgcccagacactgccaaaaaactggagaagaacttctcatgtaatgtaaacacagacatcaaagatgctgtggtagtgcctgtaccacaaacaggaagttccggtgcaacaatcgatttctgtttaagcttcccagtttgtggtattttgctacagcagcagccctatcagaaagaatacgccttccccactccacaatactgccagcattctgtggcattggtgctgtttcctgcaataagcaataaactcagccttttcttaatgatagctcatgctagttatattggagatgccagcattcagcaagagcctgctggatttgccactcttttaaagctgtcaagaagaacttttgaataa

SEQ ID NO: 3275 - DNA, 1321 bp, Homo sapiens
  SIMILAR (321)..(347): 881254mologous to Homo sapiens unnamed protein product,accession number AK000675,Smith-Waterman Score=46.
cggacgcgtgggcggacgcgtggaggaaatcaagcaatgcaattacaatggtgtccttgaatggccattttggacaaaactggttgtggtagccattggcttcacaggaggtcttgtcttcatgtacgtacagtgtaaagtctatgttcagttgtggcgcaggctgaaggcctacaaccgtgtgatctttgtacaaaattgcccagacactgccaaaaaactggagaagaacttctcatgtaatgtaaacacagacatcaaagatgctgtggtagtgcctgtaccacaaacaggtgcaaattcactgccatctgcagacgggtggcccccctgaagttgtatcaatcttgaggaaccttggtgggagtttcttcaccgaagaatatctttctaagccctcagccactacaaatgacagaagtgatcttgaattatttactcccttcaggtcctcctttctcctacatgacacatttttccctgacttttgttcaaagaggaaaggagaaaaacaaacaaacagaccaaatgcccagggagcccatgaagtaatagcgtaaagtaaagtatgatatgggaaatgtgaagtttgcaagaggaatgatttccaagacaattaaggaactactggggggcaatgaatgcttttagggcagtaatcaaagattaaatggacccatgatactcttcttcacagtaacaggggaaaagttcaagaatacagacttgaattgcgatgtgtattacttctagggccttgtaatgttaactgtctcatctggaaatataataactaacatatttggttttaagcctgaaattgtctgcattatccctaagtcacattggaagtgaacttggaggatgcatattttgatatgctttgacagctaacagatttgtatggtttagtggagtctggttattttgacagatgcatgtttttttttaaatagatgcaatatacatttgaagacattgatatttggaattaattatgtttgtttaagtcacgcaaaagattttcagaaaatgttcggatataattagctctgttaaatacccacagaactgttatcaggtcttatatttattttcatctggttcctctaatacagtgctgtccaatagaaacacaacagccacaaatgcaggcccacaggatacaaaatatttaacttccccagtagcccctatttttaaaaagtaaaaataaatgtttttgtttgttaaaatgaattttgattttttaaaaacactatatgttatttcaacgtcatcaatataaaaaattgattggttggaaaaaaaaaaaaaaaaa

SEQ ID NO: 3276 - DNA, 318 bp, Homo sapiens
  SIMILAR (172)..(14): 361254mologous to Cricetulus griseus 170 kDa glucose regulated protein,accession number U34206,Smith-Waterman Score=78.
atggacagaggagcaatagtgagggacttggaaaacctgggtgaacgagcgcttccttataggatctctgcccacagtcagcagcacaacagaggcggaactcaggttatgggtctcccatctgcattgccacaaggacccagcaagacagtctctgcagatgtgctctgcgacgagaatgctgcttgtagttatgtgagtcgagctgtcttgtgcagccctagaggctatgacacgtatccgaaattacggcaaggcgctgatttgaaacctgacagtggtgtgcgagagccagcttttggctggctaatggagtga

SEQ ID NO: 3277 - DNA, 1020 bp, Homo sapiens
  SIMILAR (260)..(391): 431254mologous to Homo sapiens potential tumor suppressor,accession number X65705,Smith-Waterman Score=77.
ttttttttcctacaatcaagtttattactcaaagcaaaagttgtccatataatacattggtcgtcaatttttatttccacatggttacacaggctgaatgactagctcacaatcccaggaggtattataagttttgctcttcaaaaaatggtgttactgttgtaaggggaaaagtcctcaatgacaaagaaatgacactaatgaaaacaaaatcaagaacgatccactggtactgcaggttacagagaagctgtcagtgagcagttccccacctctcgcaagcaaaggggatcaagggctaaaaataccttagaaaaatcaaacagcacctgcaacacatgcttatataaaggccaaaacttgcaaattcttcccttctcgtccatgctgccccaaaatgtgaaaggaattacatataagggttaaaattcggggaaatcttcccacttcttacctcttctttgtggaatataattttttctgcgaatgggaactgggacaatccctttcaacattcttttaagttcctgggtccaagagggtgtttgaacaaaaatcccctcctaaatcaacatctaatatctcgaaaacaagtgctcccacccatgcctttcaaacagctgcggtgggtgccataaaaatcccaccaagaaatacccgcctcttgttgtgcttgctgactgtgggccagagatcctataaggaagagctcgttcaccccaggttttcccaagtccctcactattgcttctctgtccctcagggccctctatcgtacgtttcaaagtagcagcagtcctctggccgctgcatggctttttaggattaaagccagctcgtagcggggcatgcctggaggatcggcgagtgcggctcggaagccaagcggttcccgggacgcgaagggacagtgacggcggggacagtggggacctagaaactgctgcgccggacggctcccaggcggcgaaagcacggtccgagagcgcgagcccgggcttaaaggcgctggcagctgcg

SEQ ID NO: 3278 - DNA, 478 bp, Homo sapiens
agtgccgcggaatttttgggaaccaacaacgaaacagatggtgagaatgtgaaggtcagattttcaccttgcattatgcacatgatttacagctgtgatggtttagcagttgctctgctacttgagatgatggagagcaggttcttttaactcaagttacagtcgatcctgggagagcaaggagccagcaagtctagacattccagagccacaggccctgggattctatccaagccacgagggattttatgtccctgggcttagattatggtgcgtcagggcagcctttcaccctttagcacagagctttgctgttccaaagaccacaaggggttttagacccttgaccctggacatatttcaagactcttttacattatgtcagaatgcaagccctgcctcagcttctcccaacactcagcttttcgcaacataatcccagcactttggaacgctgggtggattgcttgaacccagg

SEQ ID NO: 3279 - DNA, 1194 bp, Homo sapiens
  SIMILAR (474)..(515): 501254mologous to Homo sapiens Deduced from chromosome 11 putative gene clone cSRL-5f2-t,accession number R78448,Smith- Waterman Score=44.
atgtccagggtccaggatctaaaaccccttgtggcctttggaacaccaagctctgtgctaaaacgtggaagacttcatcaccctcacgacctggtgttgggtctgatcaccccaacaccgaagcttcttccactaaattatgcagacagctatttgcaacgagtatcttctacaggaacaaaaactcagttggctgctgaagaaccccgaagtgtgaggacacagcgttcggtcctttttgctcttctgtttcttccaccttgtgagaatacatcccgtcccacttgccccttctggctgtgtaaggacacagcaacaaagtaccatcttggaagcagagagaacagtcctcaccagacaccaaaatgctggtgccttaatcttggacttcccagattccagaactactgtaccacaagcatggcactcgcatctgctcagtttctggtgaggcctcaggaggcttttactcatggtggaaggcaaacaaggagcaggcagtcacatggcctgtaccatgtggaccaggcagcttccgcagccagaggagacccacaggcagagagctgcaggaaaccttccaagcatggaactgtctccagggcgggtcaccaggatgtaggcaaagtcagacagaatctactagaagcccagtgggggaacgcggatgcagagcgatacacgcggaggactttgaataaacacaatcaacagtgtcagctgagaaaagcttggcggtggccaggtggcctcatggacgaagagataatggaagtaatgacggtaggtgtccggggcgccagtggggagagaaaggaatatttctttgctccggcactggatctaatccctacttacagcacgctgctgtcagctggtgccaagcttagaggcctccgctactacatggataacacagttagcgaagcgtgcattcgaagacaaaagcaactttccattgtcacgctgaaaagagagggaaagaagtggagccatcccatgtcctgcaatatcatacaactaaagctgcaccagagttgccagggcctttggcagattgccaggcgatatcctgcaaagatgcccatctctgtgcatgctggtgaagtggcagtaagagagcagcaggacctacatcaaatccctggtgtttcagtaacagctgcaggaaccctgcaggttcctgtggaataa

SEQ ID NO: 3280 - DNA, 1800 bp, Homo sapiens
  SIMILAR (421)..(897): 821254mologous to Homo sapiens KIAA0433,accession number AB007893,Smith-Waterman Score=639.
atggatgatccagggtgttattttgaggatcaggtagctctggccgtgaccagtaaaggtatggaagagatgattatcccaggcagtagtgttcatgatagtctcaagcagtgtggtaagactagaaaaggtgtaaagaggtctccaacaacagcagtggcaaacgggagtttctgtggcttcattagacaagaggctaacatttccaatgatcactggccatctttggttcaagaggctacaactgaggccttgaagctttgcttttgtccactggctgttcttttacaagctttgttacaattcaaacgcaaaatgggggcaagagagacacggcgtcttttggaaagagtggtatatcagcctgggtatcccaaatctattgcatcaactgcacgttggtacctactgagacacttatatgccaaagatgactatgagcttattgaccttactccatctggaagcatttctcttatcaaatcaatgcatttaattaaaaaccctgtgaagacctgtgataaagtttattccttaattcagagtttgacttctcaaatcagacatcgaatggaagatcctaaatcatcagatattcagctttaccatagtgaaacattggagcttatgctacgtagatggtccaagttagagaaagactttaaaacaaagaatggaagatatgatattagtaaaatccctgacatatatgactgtataaaatatgatgtccagcataatggttccttgaaattagaaaacacaatggaattatataggctttcgaaggcattagcagatattgttatccctcagatgagaacaccaacaggaagcctccagtcagctggctctcttccagctgcttattgtctcttattggcctgtgccataaggcttcagccccagtttagggatggattgtcagaaagagctccccaggagggcgtggtctttgtgcctgatatggtttggctgtgtccccaccaaaatctcatcttgaattcccatgtgttgtgggagggacctggtgggagaaagcgtcttgccgagttttataactgcagaatctgttttcaagcaccaagagggcaggccatgctcttgaaatctaatgatgagtcgatgaagacgccaccggatctctcagtggctctgagaccattcggatctgactggggtcctctagagtggacctgcagcatgcaagctcctcacatcagagacgtaaataaagcggatcggtaccggggatctctagagtcccccgagtctttttataagtatatacttgcaaacatgagagcatttttaaaagttaagtgctacactaacgatgtatactgctgtaagcatttttgttacaatcatgtgaatttgaaaacaaacatttctggaaaaatttgtgcctataatacaaataataaggaagagagccccctgagtgtgtctagcccagagggtactggtacctggctgcattataccagtggtgtgggtactgggcgtcgaagacgcagatcaggggaacaaatcacttcttcccctgtctcccccaaatcattggctttcacatccagtatttttggctcatggcaacaggtttttaaactttacttcattaaacatttttcctccctgcattcagagcaacaaacagctgtctttgaggacatctatctacggtctgctgctgatctgacaggaggggcagctcaggtggtagtgcttgcttgctggctgctcacctcctgctgtgtagcccagtttctaacaggaatacacatatccaggggttga

SEQ ID NO: 3281 - DNA, 577 bp, Homo sapiens
  SIMILAR (261)..(350): 621254mologous to Homo sapiens unnamed protein product,accession number AK023443,Smith-Waterman Score=98.
tttttttacaaaagaaagaggtttaatcggacttacatttccacatggctggggaagcctcacaatcatggcggaagacaaacaggagcaatcacgtcttacatggatgacagcaggcaaagagagagcttgtgcagggaaactcccatttttataaaaccatcagatctcatgagactcattcactatcacaagaacagcatggggaacacctgcccccaaaattcaattacctcccactgggtccctcccacaacacgtgggaattcaagatgagatttgggtggggacacagccaaaccatatcattgttaaaaatgcaaattatcggtaccccagacctattaaatcagaaactgggaggcagccatatgtgcttcagcaagccctccaaccatttccaatgcttgctaaagcttaagaaccactgcttccggccacgttgggagggccaaggcgtgagccactgcacccagccatatactctaaaatctcaagtcagctgaagtctttcaaacttgaaataaatgtacatgagacagctacatttaagaccatattagaatagtcaaaactg

SEQ ID NO: 3282 - DNA, 1764 bp, Homo sapiens
  SIMILAR (1417)..(1668): 511254mologous to Homo sapiens Human secreted protein clone bg249 1 protein,accession number W30650,Smith-Waterman Score=195.
atggccatagggagatgtgggtatgtagcctctattgaaatgggcctttcttcagaagagagggttcctcgggaaatcattaatattgtgctattatcatcatcccattctataggtggaaagcaggattatatcattttgcaagactatccagctgctcagacagcacgcagggctgtcagcacccaagtaagttcagagaccaaggacattctgatggagtgcagcaacaaaaccatctcacgattagaacaaccaccatactgcatttctcttattactggaggtccctcgcagctcctacccaactgcctcggaaagaggccaactgagggctctcaacccatgcagaagacatgggggtatgaagatgtagacaggcccagctgtatgccaagggactcagggatggacgactctccatccaatcagagggcaagtcacaagctgaatccacctgctcagaacagttgtcagatgagaacaccaacaggaagcctccagtcagctggctctcttccagctgcttattgtctcttattggcctgtgccataaggcttcagccccagtttagggatggattgtcagaaagagctccccaggagggcgtggtctttgtgcctgatatggtttggctgtgtccccaccaaaatctcatcttgaattcccatgtgttgtgggagggacctggtgggagttgtcacatggagacaagcccatcagggacaagactagaagtagacaaaccagtcaggccgagtcaagagagaggggctttgatgggatctgttggagaatatgacatgtgtccccttaagttaggaggacacactgaactggtgtctgactccttcctaggaaatattcagggcactgaactaggaagcagagatttagcaaagaaagcccatgctctcatgaaacttacttttggtaaacacagatttagcaaacacagacgagaacttcggacagagacaagtgctataaaacagcagaagcaagaaagagcatgggcggctgcagggaaggaaaccaaacaaaaagctttctacttagaacaagaagagaataaactgagtggcactgcaaagccaggatggtacccctggtgcactgatcccacacctacccctatgaataggcgaaggttacagccactacagcagaagaagccaaccacagtcaatgttgactacgcgtcaagttgccagaggccacaggaaatggactaccttggagaatcatccctgccaacatttctgaatggctatgtcactaccaatggggccacaacaacaacacttgcaacccaacctggacttcctttgaccaaaggaagaaatctatctttgcccatgtcagacgaaaggagtcatgcttttctccccatcattccaaacacccagagaggtcagctagaagacagactgaacaaccaggcgcgtaccatagctttccttcttgaacaagccttccgcatcaaggaggacatctctgcttgcctgcaggggacccatggctttcgaaaagaggaatcgctcgccaggaagttactggaaagccacatccagaccatcaccagcatcgtcaaaaaactcagccaaaatattgagattttagaagaccaaataagagctcgagatcaggcggccacaggaactaactttggcagtacacgaggttaaacatcaaacaccttacaagggagttgggagatcttcgaggaagagtagccagatgtgattcaagcattgtgaact

SEQ ID NO: 3283 - DNA, 375 bp, Homo sapiens
  SIMILAR (178)..(59): 351254mologous to Human immunodeficiency virus type 1 Tat protein,accession number AB034433,Smith-Waterman Score=58.
agagacttaatacaaactttggcaattaagacaggataccagttggaatggatcaaatattccatccacacgttaaacaaaagcaattgttatgcttgtgcacacagcaggccagaggcccagaatgtcccctttccactaaggtggtcctccagtcgaccaggcatgggctgcatggtagctcttttccaggattctacagcctggaatagtaagtcatgccaagctctctctgctatatcccgaagtctggcaccctgtgggtcagcccccgagggccatccagcttcagtctgccaacactaagatcacttcgtggccctcacgactggggaggagattaagcataccttggagacctgaagggatgcagtg

SEQ ID NO: 3284 - DNA, 507 bp, Homo sapiens
  SIMILAR (109)..(150): 501254mologous to Mus musculus Fd fragment,accession number X73014,Smith-Waterman Score=48.
atgaccattcgatttagcaataaggagatcaataacgacctcagggagggcagtatcagcaggaggatcgtagaagttaaagacttaaaacaaactttggcaattaagacaggataccaagattcaaatgcctggttggaatggatcaaatattccatccacacgttaaacaaaagcaattgttatgcttgtgtgcacagcaggccagaggcccagactgtcccctttccaccagggtggtcctccagtcgatcacatgtggatttccaggattctacggcctggagtaacaagttgtgccaagctctctctctgctatatcccaaagtccagcaccctgtgggtcagcccctgagggtcatccagcttctgtctcccaacactcagttcactttgtgtctctcacaacaaggaggaaacttagcgttccttggagacctgaagggatgcagtgagcttaagaattttcaagagcttatcaatcagtcagcccttgttcatccctga

SEQ ID NO: 3285 - DNA, 374 bp, Homo sapiens
  SIMILAR (171)..(230): 611254mologous to Homo sapiens Human secreted protein, SEQ ID NO: 4864,accession number G00783,Smith-Waterman Score=60.
ggatcaaatattccatctgcactttaaacaaatgcaattgttatgcttgtgcacatggcaggccagaggccctgattgtcccccttccactaaggtggtcctccagttgaccaggcatgggctgcagggtagctattttccaggtttctacagcttggagtaataagtcatgccaagctctctctgctatatcccaaagtccctgcgggtcagcccctgagggccgtccagcttccgtctcccaacactaagttcacttcatgtctctcatggcagggaggagacttagcattccttggagacctgaagggatgcagtgagcttaagaattttcaagagcttatcagtcagtcagcccttgttcatccccgagg

SEQ ID NO: 3286 - DNA, 845 bp, Homo sapiens
  SIMILAR (127)..(309): 761254mologous to Homo sapiens Human secreted protein, SEQ ID NO: 7284,accession number G03203,Smith-Waterman Score=252.
tggtctacagctttactacaatatttgaagctctctcagaatctcctacagagcttataaaagcacagataactgttcctctatccagaagttctcattcagtagctctacgacagagcctggtaacttacctttctaacaagttcccagacaataaaatacctaggaatccaacttacaagggatgtgaaggagaactacaaaccactgctcaacgaaataaaagaggacacaaacaaatggaagaacattccatgcttatggataggaagaatcagtatcgtgaaaatggtcatactgcccaaggtgcacagtgcatgctgtcagtgaatcttccatgctggagtgtggaggacagtggccctcttctcacagctccactaggtggtgccccagtaggcactctgtgtgggggctctcaccccatatttcccttccacactgccctagcaaaggttctctatgagagcactgtgcctacagtaaacttatgcctggacatccagccttcttccaaaacctctcacaatggaacaattgctcctcctccatctaatgacaagaccaagatagctatcatagaagttaaagacttaaaacaaactttggtaattaagacaggataccagtatgcaaatgcctggttggaatggatcaaatattccatccacatgttaaaccaaagcaattgttatgcttgtgcacatagcaggccagaggcccagattgtcctctttccactagggtggttctccagtcgactgggcctgggctgcatgatgctaacactcctagattataacacatacatccaactgccaaaaaccctgataccaaacatctag

SEQ ID NO: 3287 - DNA, 867 bp, Homo sapiens
  SIMILAR (385)..(864): 281254mologous to Homo sapiens ataxin-2,accession number U70323,Smith-Waterman Score=87.
atgaaagggatggggagtatagaggaaatgtttgtagctttagactggtggtcaaggacatctcatggagaaggcatgtcttgccaagccatgaggacatctgggaagggagctacaggcagaggaaacagcaggtacaaacacctcggggtttctgcagttgttgcccattttcctcttggtcattgtgctggagacctctactgggaagcctggtggaagaacagaatcttagccaaacctgaactggggcgtagagcaggttattatctcaaaccctcaagttctcccccttttctaagccagttcccttcttctatgggggctgaggtttcagggacagaccctattagattatttgaaatgcgtttctttgatcccccgccacctgcaccttcctctaagccttcttccaaaacttctcacaagggaacaattgctccttctccatctaatgacacgactgagatagctatcgtagaagttaaagacttaaaacaaactttggcaattaagacaggataccaagatgcaaatgcctggttggaatggatcaaatattccattcacacgttaaacaaaagcaattgttatgcttgtgcgcacagcaggccagaggcccagactgtcccctttccactaagcagctgatcctccagtcgaccacacgtgggctgcatggtagctcttatccaggattctacagcctggagtagtaagtcatgccacgctctctctctgctatatcccgaagtccggcaccctgcgggtcagcccccaagggccatccagcttccgtctcccaacactaagttcacgacagggaggaaacttagtgttccttggagacctgaaaggatgcagtga

SEQ ID NO: 3288 - DNA, 375 bp, Homo sapiens; identical to SEQ ID NO: 3283
  SIMILAR (178)..(59): 351254mologous to Human immunodeficiency virus type 1 Tat protein,accession number AB034433,Smith-Waterman Score=58.

SEQ ID NO: 3289 - DNA, 864 bp, Homo sapiens
  SIMILAR (385)..(861): 281254mologous to Homo sapiens ataxin-2,accession number U70323,Smith-Waterman Score=91.
atgaaagggatggggagtatagaggaaatgtttgtagctttagactggtggtcaaggacatctcatggagaaggcatgtcttgccaagccatgaggacatctgggaagggagctacaggcagaggaaacagcaggtacaaacacctcggggtttctgcagttgttgcccattttcctcttggtcattgtgctggagacctctactgggaagcctggtggaagaacagaatcttagccaaacctgaactggggcgtagagcaggttattatctcaaaccctcaagttctcccccttttctaagccagttcccttcttctatgggggctgaggtttcagggacagaccctattagattatttgaaatgcgtttctttgatcccccgccacctgcaccttcctctaagccttcttccaaaacttctcacaagggaacaattgctccttctccatctaatgacacgactgagatagctatcgtagaagttaaagacttaaaacaaactttggcaattaagacaggataccaagatgcaaatgcctggttggaatggatcaaatattccattcacacgttaaacaaaagcaattgttatgcttgtgcgcacagcaggccagaggcccagactgtcccctttccactagggtggtcctccagtcaaccgggcatgggctgcatggtagctctttcccaggattctacagcctggagtaacaagtcatgccacgctctctctctgctatatcccgaagtccggcaccctgcgggtcagcccccaagggccatccagcttccgtctcccaacactaagttcacgacagggaggaaacttagtgttccttggagacctgaaaggatgcagtga

SEQ ID NO: 3290 - DNA, 1449 bp, Homo sapiens
  SIMILAR (1397)..(1218): 271254mologous to Homo sapiens Human secreted protein, SEQ ID NO: 6831,accession number G02750,Smith-Waterman Score=71.
ggcacgagacagctaacaaaatttgtggaaagggaactgttcaagcccgatgaggtacctgaaagacataattcatctttttttccaactgtaaatgatataaaaaatcacatccatgaggtacagaaatccttgacaaatggagatacggcatataactcatagattattccagcaacgcttcaatggactacagacagtgggaatattctcaaagagaccatgacagttacatttgcagaaggaaattcaccaggagaatcaattaccaccaaagtggaaacaaatcacaccaggggttctttgtctcctgagccaacccacttgctctcctcactctcctcatttcagcccaaaatatttacacaactacagggtttgcagttacaaccaaggtacacctctcctgatgaatcaccagctgtggtatcagtaaataaccagccgtcctctagtccttcaggacttctggatacaataggaagtgctgtaatgaataataattctctactgcttggtcaaagtcatagccttcaaagagatacatgcttaacccaaaacaatagtactgcctccaccatgggtaaccttccagaaccagatcaaaatctagttgcaatggacgagctggtagaagttggagatgttgaggatacagggaatctgggaagggaactgttcatcgggttctgttgggagatgtgaaggacctatttccaataccagaattattagacaagccactcagctcttattgaagaaaatccagaaagtaccatttctgtgagccaagttaaacaagaacccaaagaaccagcattgtctatggaagcaaaaaaaactgtggactataagaaattatccggcctacataaattattgaagccttttccagaatttaccaactctggtgaccttctgatgcccttagaaaggaaggtgaatatagtcaaagcgtggcattgagataattggactgaagacccagtttgatgagaagcttttatttaaaactgatatatttgttgcccagttcccatatttttaccttccttaagagatgttttactcttcttattttgtataatttttatgctctttgattatctaataaggccagtatttcaaaagctgttctgaatttatccacagtaatatagtctgaacacaaatagtttacttaacttatccttggaaatattcaattttggttattacaaaacagaaaaaaacaacagcaacaaaaacattgtgtgaatatatgtttgtatgtgtgtatgtatatcatgaattttttttttttaaggtctgaaaaggacttgttctctccttaaagttgtgaagaaattgttaattgccagacaggtaagaaaatgtttataatctatctcattaagaaagatgaagtattagattttacatcataacacaaagtccagcagctacatc

SEQ ID NO: 3291 - DNA, 189 bp, Homo sapiens
  SIMILAR (52)..(171): 301254mologous to Homo sapiens dJ154K9.1,accession number Z94277,Smith-Waterman Score=57.
atgtcctgtgcagaaaagagccacaagccaaggaagacaggcagccactacaagctgaaaaaggaagagaatgatcatgaagggcaaatggcagtgaagcaagaagagctggcttcaggctcagaagagaatgctgtgcctcttcctcatggtttgcggtgccctgcatgttcagagaaacttctctag

SEQ ID NO: 3292 - DNA, 406 bp, Homo sapiens
  SIMILAR (86)..(223): 401254mologous to Homo sapiens Human D2-2 protein associated with brain tumours,accession number W49763,Smith-Waterman Score=60.
agacaagctgggagggttcactgagccttggggacatgatcatgacttgggccaaggcgatcactgaaggctgtgagaaggccatgtgcttagctgctgccgcaaaggtgtgccggaggaaggaggcccctgcaggtccttcaggtggggagacgggcagctggtggcctctaggggtgaagccttggaacttggggtggccccaggctcctctacacttcaagtccactgtcccctctgtagcctcacagcatcccctgcaggccaggcagtgtgaggcacacctacctctagctttgtagagaaaaactcaaaaatgcacgctaacctgccacatgacccagaattcttctcctgtatatttagccaagattaatggtatactagaatgttccggacgcgtggg

SEQ ID NO: 3293 - DNA, 389 bp, Homo sapiens
  SIMILAR (12)..(227): 951254mologous to Escherichia coli O157:H7 putative outer membrane protein Lom precursor encoded by cryptic prophage CP- 933M,accession number AE005290,Smith-Waterman Score=377.
cagggcggccattcagctatgcaggagacaagaatcgccagcttacccgttacagcgatacccgctggcatgaagattccgtgcgtaaccgctggttcagcgtgatggtggggccgtctgtgcgcgtgaatgaatggttcagcgcgtatgcgatggcgggtatggcttacagccgtgtgtcgactttctccggggattatctccgcgtaactgacaacaagggaagataccggatgtaccctttggatgtgccccgtgccccaacgaagaggaagaggcgcaccatgaaacggaaagtacaaaagtaccggacacccacccagatcccaaatagaatccgccaaatcctgcgggaaattgtaatcccattcaccagctcctacatttaa

SEQ ID NO: 3294 - DNA, 597 bp, Homo sapiens
  SIMILAR (184)..(501): 1001254mologous to Escherichia coli similar to,accession number D90889,Smith-Waterman Score=569.
atgtcaaaacccaacccggacccccatcccaattccaaagccagacccaaaacccgattcaaaagccagacccaaaatccaaacccagacccacttccgatcccaacgccgacaccggttccggagaaacgcattacgccttctacggcagccgtactcaatatggcagcaacattaccgttgacgctgaccggaatgacagtggggatcgacagccgtaatgatattcctgaaggaattaccacgctaggcgcttttatgggctattcccattcacatatcggttttgatcgcggaggacatggcagtgtgggcagttattctctgggcggctatgccagttgggaacatgaaagtggtttctatctggacggtgtcgtgaagctgaaccgttttaaaagtaacgtagcaggtaaaatgagcagcggtggagccgccaatggcagttaccacagcaacgggctgggcggtcacattgaaaccgggatgcgatttaccgatgtaagtacaaaagtaccggacacccacccagatcccaatagaatccgccaaatcctgcgggaaattgtaatcccattcaccagctcctacatttaa

SEQ ID NO: 3295 - DNA, 606 bp, Homo sapiens
  SIMILAR (1)..(363): 991254mologous to Escherichia coli ORF 1 (AA 1-121),accession number V00279,Smith-Waterman Score=596.
atgattgatgtcttaggggcggagaaacgcagacggcgtaccacacaggaaaagatcgcaattgttcagcagagctttgaaccggggatgacggtctccctcgttgcccggcaacatggtgtagcagccagccagttatttctctggcgtaagcaataccaggaaggaagtcttactgctgtcgccgccggagaacaggttgttcctgcctctgaacttgctgccgccatgaagcagattaaagaactccagcgcctgctcggcaagaaaacgatggaaaatgaactcctcaaagaagccgttgaatatggacgggcaaaaaagtggatagcgcacgcgcccttattgcccggggatggggaacgaaccgatgactggatggatggccgccgcagtcgtcacactgatgatacggatgtgcttctccgtatacaccatgttatcggagagctgccaacgtatggttatcgacgggtatgggcgctgcttcgcagacaggcagaacttgatgtaagtacaaaagtaccggacacccacccagatcccaatagaatccgccaaatcctgcgggaaattgtaatcccattcaccagctcctacatttaa

SEQ ID NO: 3296 - DNA, 426 bp, Homo sapiens
  SIMILAR (124)..(219): 401254mologous to Streptomyces coelicolor putative membrane protein,accession number AL451182,Smith-Waterman Score=65.
atggggagaatactcaaggttcacacgacagtggccgtaggaagaagcgatattttttctcatcaatgcgatgagaaaacaaggttgaatgaaacattattcacttacctggtgcttgagtgtgtgggcctaggtgaggcagcatttgtttctgcaatgtctttcagcccctggcctccctctagcataaccccaccctacagcagcacacaacggtggcatcgagaggagcacatcactggaggaacacgcaggtggctggacattgagaggaacgcaccgacaagcaccagcaggccaaaaagccgccaatccactggcagagtgacactaagtacaaaagtaccggacacccacccagatcccaatagaatccgccaaatcctgcgggaaattgtaatcccattcaccagctcctacatttaa

SEQ ID NO: 3297 - DNA, 792 bp, Homo sapiens
  SIMILAR (280)..(26): 411254mologous to Human coxsackievirus B3 polyprotein,accession number AJ304427,Smith-Waterman Score=172.
atgcttcaaagcaaccgaaccgccgccagccattcaccatccatccagccagccatccagccagccatccagccagccaaccaactatccatccacaatttgtggacacaattccggcattcaaccaaaattccagttgaatgggtgaatggtgaatggctgaatggacgaatgccaggggatcaacatgaatggcaatgcaactatcagccagccatccagccagccatccagccagccaaccaactatccatccacaatttgtggacacaagtccggcaatcaaccaaaattccagttgaatgggtgaatggtgaatggctgaatggacgaatgccaggggcacgtcatgaatggcaatgcaactatcagccagccatccagccagccatccagccagccaaccaactatccatccacaatttgtggacacaattccggcattcaaccaaaattccagttgaatgggtgaatggtgaatggctgaatggacgaatgccaggggatcatcatgaatggcaatgcaactatcagccagccatccagccagccatccagccagccaaccaactatccatccacaatttgtggacacaagtccggcattcaaccaaaattccagttgaatgggtgaatggtgaatggctgaatggacgaatgccagggggtagtcatgaatggcaatgcaactatcaggtaagtacaaaagtaccggacacccacccagatcccaatagaatccgccaaatcctgcgggaaattgtaatcccattcaccagctcctacatctaa

SEQ ID NO: 3298 - DNA, 513 bp, Homo sapiens
  SIMILAR (1)..(156): 1001254mologous to Escherichia coli K12 6-phospho-beta- glucosidase; cryptic,accession number AE000355,Smith-Waterman Score =276.
atgggcgaagcgattgcagacggcattccgctgatgggctacaccacatggggctgtattgatttagtttccgcctctacgggtgaaatgagcaaacgctacggctttgtctttgttgaccgtgacgacgcaggcaacggtacgctgacgcgcacgcccttccagtcgttgataaacggtttctaccgcatctttaatcggctgggtcatcgggtagtaaaaaccgacgatatccggctgaatgccgaggaaaacgtttcgccaaaactcgtcgaacaagaacgcgccagcgatactgacattcttccagaaattaatcatatttggcccaaccgcatcgccggtcatatcccagtaatggtgaccaatcaccgccgtacccagcgtgtagaaaataaacagcaccgccagcggacggtaagtacaaaagtaccggacacccacccagatcccaatagaatccgccaaatcctgcgggaaattgtaatcccattcaccagctcctacatttaa

SEQ ID NO: 3299 - DNA, 676 bp, Homo sapiens
  SIMILAR (466)..(585): 311254mologous to Homo sapiens Human glial fibrillary acidic protein GFAP mutant fragment 31,accession number Y21022,Smith- Waterman Score=49.
atggtgaagggctggcggccggtccggttccttttaagcatttgtggctatcttaaattccttttaaggttggtccctaatcggccaagcaccatcttattctccaattgggaatccccccctccttcaataagtacaaaagtaccggacacccacccagatcccaatagaatccgccaaatcctgcgggaaatgcctctgtctgaagtatgggaagacattttagcctgcaggctcatgcctatgcagtaccagagggaatgtggagggcgcttgccatgcaccagcagccctattctcacctgtgtgattatatctaactttagaattgcagccccaagatggttatctgaaatacaaacccacttgtttgcaactttctgcctacctccccatggcatttgtgcagtctttatgactgggatttggcctcaacgtttcctccaatatctcagtaacccagctggggatgagtctcacttggaaatgcagttcagctgtgctgatctcttccccagcttggaggaggcctgccttccctcaagctggccgcctggctggcttcctgatcatgctggacaatctaccctgtaaagttccacgttgtcagctgcccagacactgtgtgctgaaactgacaggacacaatgctcctggaacccctcggacgcgtggg

SEQ ID NO: 3300 - DNA, 324 bp, Homo sapiens
  SIMILAR (52)..(258): 731254mologous to Homo sapiens CAT:SP-C hybrid protein,accession number R05419,Smith-Waterman Score=251.
atggggccctccctgagaagcctcctggcctgcaagttcctgtgtgctcctgagaggtgggaagcagtggtggcactggaaaagttggccaaccagaccgttcagctggatattacggcctttttaaagaccgtaaagaaaaataagcacaagttttatccggcctttattcacattcttgcccgcctgatgaatgctcatccggagttccgtatggcaatgaaagacgtaagtacaaaagtaccggacacccacccagatcccaatagaatccgccaaatcctgcgggaaattgtaatcccattcaccagctcctacatttaa

SEQ ID NO: 3301 - DNA, 879 bp, Homo sapiens
  SIMILAR (242)..(171): 331254mologous to unidentified cloning vector carrier protein,accession number L11614,Smith-Waterman Score=43.
atgagggatgaggggatgtgtcgagaatgttttcgtgcagagaatgaagagggtagaggaatgtcaggctatgttggtttcttcaatcaacccttatttttctttgctgtgaggaccaggaaggaaccaatctgtttaaaaactgttgcccgctggtggctcgttgccaggtctgagataacactggtggtccctctgagggctgaggacgcattccccgggaggggcatcccaggagaaggcagagtccaggaggcggatgttgggaagcaaatcctgaactcatcaagtcccatagcccctttgtctatggaccttctgccagcatcttctgtaagaggcaggattgatggcagcttccaggctcacttcttcccatattcatcatcagagtcaaaggggtacctctggtgtcaacttcagacaggactcgcattggcctatgttgatcccgtctgggtctcttgggccaatcctacgtggggcatgatgactggcctagttgggccacatcctcacccatgtaaacagatgtggggaatacctgctttgagaaataaagaagctgctgaatctacagaattaggctccacagaatcaactcctatgtgggtgttcccctgtggcacaatacaagttgctaaggatgcgatgatgatgatgatgatgaaacatggaggctctgtgtccacatcagaatgctctgcatccccatcagaacgttgtgtaccatggagaaacaatataaataaatcatgtaataaaatgacctttcccaaatcacgttttggcgagaagatgctttttacagctgtctctttgctctccctgcagatgccaacaacagtggaacttttacaagtcctactagaagtttga

SEQ ID NO: 3302 - DNA, 405 bp, Homo sapiens
  SIMILAR (274)..(191): 361254mologous to Hepatitis B virus precore/core mutant protein,accession number AF115422,Smith-Waterman Score=60.
atggtccccaaattctttgacacttctccagttgagagagccccagtcccagatgtgacaaacctgaagtcccatgagtgtgcctacttgctggcagacatcaagaaaaacacaaaagtgggcatttctgcttgggaagttaaaagaaatgacacttttatccacccagcttcacacaatgacgaatgcccccaaattcaggaaaaggattcagataccaggtccaatcatgcgatgcatctaactaaggacacaggatggataaaacaatgcaatgccttttactggctcaacgctacaccccagaccacagaccacaccaaagctttgcaaggccaaccaagagttcagcagttgacagagctcctatatttacagccaggaggcactgcaagcaaagcatag

SEQ ID NO: 3303 - DNA, 408 bp, Homo sapiens
  SIMILAR (211)..(408): 331254mologous to Mus musculus selenoprotein R,accession number AF195142,Smith-Waterman Score=74.
cccacgcgtccgggaaaaatcaaaagcaaaatatgcaacaccactccctgccctccagtactcccacagtattatttattgaccactctgggtgtgcttggcttaacagacaacagaaaggaagtgaaggctcttccctgagggtttgctgatgcgattagagagccatttagaaagataactcgaaatctcagacagacacaggaatctaacttttattctggtgtcaaaaatgatttgaaaccttttttgtatgatgacgtttgtcagtactccttttattcctctcacagcagccggtgggcgtctccatgcctgatgcagacaatatagaatccaaatgcagttgcaaaggtgaatgacttcaggtggctttgcgccgccatcgtcatctgcacaaaatgtgga

SEQ ID NO: 3304 - DNA, 429 bp, Homo sapiens
  SIMILAR (291)..(386): 451254mologous to Drosophila melanogaster segmentation protein PRD 7,accession number M14550,Smith-Waterman Score=78.
atggcagtattcaagggctcacctgatgtagggtgccttaccagctgcccaggctgcagcttccaaagcacagcccactctttcccaaggctgtacctctgtcctgctgttcctgctaccctgaatgccattcctctctttgcatacctgacaaattcctattcatccttcaagaaccaacttcttctggaagccttgcttgacccccaacccttaaccacaggtcccttcctcatactgctcctctcacctgtgagcacagaccaggccaacaccaccactgctgagatccacagccagctcaccccacggctaaatctcaccatcctatcatcccagggggcaagtcttcagcagagggtcacgtaccatcgaaatcacaagtacggccagacccacccccaaaaggccgaaatagttgtcggctga

SEQ ID NO: 3305 - DNA, 5025 bp, Homo sapiens
  SIMILAR (578)..(1570): 1001254mologous to Homo sapiens dJ18D14.2 (T-cell acute lymphocytic leukemia 1),accession number AL135960,Smith-Waterman Score=1731.
gcccgggactatcccttcgcggtgtagcggcagccggagacctggctgaggaggcaaccgcgtagacacctccctgcttagaaaacaaacactgaaccagaccgatcccagttggagggttcgaaaatgttccagacagcctgtcgggaggggttgttgttgctgttggactaaatagctattcctgattggtcatgtatagggttttttaaggcgggtggggggaggagggggtagaggaaaggctccaaacacctgcaggttgggggcggaaagctgtttgcgattccctggactggttggtcggggacaggaggtaattcccagccattgacccccatttctctctctccctccctcttgccctgcctctttctctccacccctatctttcctggaaactcgctttgggcgcggcagatcgcccaggaccacaccgcagcgtaactgcaggcctctcagcgaaaaagggggaaagcaaagacccgggtgtgcatcctcttcctcggcttccgcccctttccggcggagtggagatcctattcagaggggccggtctctctaaatatgccccaggatgaccgagcggccgccgagcgaggcggctcgcagtgacccccagctagagggacgggacgcggccgaggccagcatggcccccccgcacctggtcctgctgaacggcgtcgccaaggagacgagccgcgcggccgcagcggagcccccagtcatcgaactgggcgcgcgcggaggcccggggggcggccctgccggtgggggcggcgccgcgagagacttaaagggccgcgacgcggcgacggccgaagcgcgccatcgggtgcccaccaccgagctgtgcagacctcccgggcccgccccggcccccgcgcccgcctcggttacagcggagctgcccggcgacggccgcatggtgcagctgagtcctcccgcgctggctgcccccgccgcccccggccgcgcgctgctctacagcctcagccagccgctggcctctctcggcagcgggttctttggggagccggatgccttccctatgttcaccaccaacaatcgagtgaagaggagaccttccccctatgagatggagattactgatggtccccacaccaaagttgtgcggcgtatcttcaccaacagccgggagcgatggcggcagcagaatgtgaacggggcctttgccgagctccgcaagctgatccccacacatcccccggacaagaagctcagcaagaatgagatcctccgcctggccatgaagtatatcaacttcttggccaagctgctcaatgaccaggaggaggagggcacccagcgggccaagactggcaaggaccctgtggtgggggctggtgggggtggaggtgggggagggggcggcgcgcccccagatgacctcctgcaagacgtgctttcccccaactccagctgcggcagctccctggatggggcagccagcccggacagctacacggaggagcccgcgcccaagcacacggcccgcagcctccatcctgccatgctgcctgccgccgatggagccggccctcggtgatgggtctgggccaccaggatcagccaggagggcgttcttaggctgctgggatggtgggcttcagggcaggtggggtgagaattgggcggctctgaagcaaggcggtggacttgaactttcctggatgtctgaactttgggaagcctttactgaccctggggctggcttttctgtttcctgtaccagtaggagatcagaaaaatggagcaaagtggtaggtactttttgtgaagacggcacggtcttccctcttccctcagtcccaaatccttcccaagtaagaggctggagttgtcactgcttttggcctggagtttgggatccctgtctttcctaagacctggggttgtcagctctcatctgaggcatccagcagtctctgccttgcctttagcccctcccaagctggctggggtggcctgtgtggccacttctgtccatatttataggtacccaatagctgcccatttcgtgagccccatcttcacccaggcctatgttgatccatccagcttgccagatgctgcagagtcacaagcctcgaggtgccttcttcagggcctggttgaagaagatgatcagtggacagtctgctctagatgagctgggccggagggtcaggaaacccagtcgcccttacttcttgccctggggatcaaagttctgctttctccccaatgagacttgccttcctaagcctgtggctgtggagaccatgtctgcagccctgagaaagccctgtcgggctttgtgtgaaggcagagaaagggacaatgatagtagagtgatatggagcaagagatattttgggcatgtgggcttcaactcctcgacatcactgttcatgctggcgagtgaatgccagtgtgctgatgggcgtacgctggtgctgagtagatgcgcagccccatctgtgcattctcctggatgcttagagggatttctttgctgtaagatgtctgtttgctgatggtctggtctatgttccgaattggagcacaaaacctgtcctatgaatgctttgcatttggaatttttgcttgacttcagttattggtggaatctttagcgctcaataggaccaggatccagcctcacttctagggtatgggaaatccaatcagagaccgaggccctggctaagacccaaacatatgcacattcacttagcagaaccttaaacacccctcagttgtgcagcttttggtcatcaagggtccgtctgggaggttggtttaatgcaatagaagtgctcccctctgaaagttgtacatgaaatttttgtaaatcacatccttatccttcatcttttaaagaaataaccactgcaagtccttttgtaaagtgaagaatccttttgtagaatgaaccactgccccttcattgatttcctgtgtcaatccagatggtgggatgtggttttcttaaggtgaggcctgtctgtgacctgcatctaagcccatgggacaaattgcacagaagtcctgtatgtctgtcattgtacccttaagtcaccctagccctctccctctaggctctgccttcgaggtcagaggagagatagcctgtggccctgtcctgccatgcaagaactcatcactgtggctgtctggaaagcccccccttatagtttgggcttcagcctagtggcttgtcctcaccatgatggggccctaattcagccatgtacagacagagaatatgtctgctcctttccccttccttttaagtaaggtccaattctcgagcttggggcaacattgattcacctttgtagcactcaggctctccattcaatttcaggctccccagatcatgttttggtgaaaattagggttggttcctttccaacgtttggaagatcctgtgaggagccccatctgtctaaagatagagtcattgctgtaggatctaaggctgtttgcttcaccgtggattcgcttgagttaggaatgagaagtagccacagtatggatgggtggatgggttttatgagatggatcacatattttattaagaactcaaacttctggctccctcttctttcagacttgccatgtgactctggcttggcctatctcctagggctatggtgtggactgaatgggatcatgaaagtagacagttttgagaacgtaaagaactttttcttttccctcaatctcaatcctgcagtggggtttcgcagcctgagtccacgacctaggcagtaggccggtgtgcctgactgcccagcatttgggtaatttagattgtaaaccgctttggcctgagttattgagattgtcctcatttctccagattatctatttgtgtgtgtgtgtgtgtgtgtgtgagagacggtgtcttgttctgtcactcaggctggagtacagtggtgccatcattgctgtctgcagccttgaactctgggctcaagcaatcctctcacctcagcctcccgagtagggaggaccacaggtgtgagccaccacacacctggctaatttttacttttttttttttttggtagagatggagtcttgctatattgcccaggctggtcttgaagtcctggcttcaggcaattctcctgcctttgcctccagaagcactgggatcacaaggtgtcagccattgcacccagcccagattgtcttaatttcctatcttgttccaaggccagggacagtaataagaatggaaaagagatatgggagcgctggcagactgtgtaaaatgtaatgcaactacccaaaacaagcctggtaggaaagggcaagtctttaggtctttgtaagaactaaagaagatctgtaatttttattttcaccctctgtaccccatgaccttatccttcctctccttccttgttacccatgaaaaactgggcaacattccaagaatagcatctgtacaaaggggaaagaacataaaggtaaaacaaaacaaaacaacattttgagaacaaagatgaccataaccactgaaggaaatcacatctttttaaggacaaattcatattcttttatttgttatgggcagatgacaagatgggtacaacctttattcttttccaaaataaaaccaaggggcacagcatctgtagtcagccgacaactatttcgggccttttgggggtgggtctggccgtacttgtgatttcgatggtacgtgaccctctgctgaagacttgccccctgcccgtgtacatagtgcaattgtttctgtgggcgggcccagtactttccgtcaacgttgtactgtatgtgatgaattgcgttggtctctgcatttttctgcagaagaggagtaaccgctcccaggtaccttgacctttgtacagcccagaggccaacactgtgggtgtgtgactctttagcaaaaaaaacccatgtggtgatgatgtgtatatatatgtgaggatgtatcgggaagatttctaaataaaagttttacaaaggggaaaaaaa

SEQ ID NO: 3306 - DNA, 288 bp, Homo sapiens
  SIMILAR (7)..(285): 631254mologous to Homo sapiens Human skin cell protein, SEQ ID NO:327,accession number Y76072,Smith-Waterman Score=300.
atgcccaagagaggaaagcgactcaagttctgggcccacgacgcctgctctggacaagtgactgaggtggattacgccaactcggatccagcggtcgtgaggttaaagagcaaatgtacaggaggattgcagccccctgttcagtacgaagatgttcataccaatccacaccgggactgctgcctactgcaggccaccaccctcaatctcatcttcattccgattgtcatgagaatgatatttactctctttactatcaatgtgagcaaggacatacggcatcattga

SEQ ID NO: 3307 - DNA, 1479 bp, Homo sapiens
  SIMILAR (741)..(854): 841254mologous to Homo sapiens Human skin cell protein, SEQ ID NO:327,accession number Y76072,Smith-Waterman Score=182.
aggaagaagagaaatctaaaagtctggaaaacatatttgcgctaataatcgatgaaaatttccttggctttgttagagatctagacatccaaatccaagaagctcaaagaacacctgggaaattcatcacaaaaagaacaccctctaggcacataatcatcaggttacttaaagtcaagacaaaggaaagaatcttaagagttgtgaggcaaaagcatcagctcaacgctgttcggcaggaagtaaaatctctttgtggcttggaagcctctcatgttcctgcagaggaagctctttctggggctggtgagccctatgacatcatcgacagcagtgatgagatggatgcccaggaggaaaacatccatgagagaactgtctccagaaaaaagaaaagcaagagacacaaagaagaactggacggggctggaggagaagagtatcccatggatatttggctattgctggcctcctatatccgtcctgaggacattgtgaatttttccctgatttgtaagaatgcctggactgtcacttgcactgctgccttttggaccaggttgtaccgaaggcactacacgctggatgcttccctgcctttgcgtctgcgaccagagtcaatggagaagctgcactgtctccgggcttgtgtgatccgatctctgtaccatatgtatgagccatttgctgctcgaatctccaagaatccagccattccagaaagcacccccagcacattaaagaattccaaatgcttacttttctggtgcagaaagattgttgggaacagacaggaaccaatgtgggaattcaacttcaagttcaaaaaaacagtcccctaggttaaagagcaagtgtacaggaggattgcagcctcccgttcagtacgaagatgttcataccaatccagaccaggactgctgcctactgcaggtcaccaccctcaatttcatctttattccgattgtcatgggaatgatatttactctgtttactatcaatgtgagcacggacatgcggcatcatcgagtgagactggtgttccaagattcccctgtcccatggttggtcggaaacttgcgcagtgaacagggtgtgcaagtcatcctggacccagtgcacagcgttcggctctttgactgtcaggcaccgtgtatgaaatctaacaatgcgctcatcgtcatcctcggcaccgtcaccctggatgctgtaggcataggcttggttatgccggtactgccgggcctcttgcgggatatcgtccattccgacagcatcgccagtcactatggcgtgctgctagcgctatatgcgttgatgcaatttctatgcgcacccgttctcggagcactgtccgaccgctttggccgccgcccagtcctgctcgcttcgctacttggagccactatcgactacgcgatcatggcgaccacacccgtcctgtggatctacccactagtcaattcaccatcttgttga

SEQ ID NO: 3308 - DNA, 1435 bp, Homo sapiens
  SIMILAR (774)..(1184): 581254mologous to Homo sapiens Human skin cell protein, SEQ ID NO:327,accession number Y76072,Smith-Waterman Score=351.
agcggcctccggtgtgggatggccgcggagccgggcggagctggcttgcggctcccggggccggctctccggccggagacatggcccgggggcccggcccgctaggcaggcctcgccccgatacggtcgccatgcccaagagaggaaagcgactcaagttccgggcccacgacgcctgctccggccgagtgaccgtggcggattacgccaactcggatccggcggtcgtgaggtctggacgagtcaagaaagccgtagccaacgctgttcagcaggaagtaaaatctctttgtggcttggaagcctctcaggttcctgcagaggaagctctttctggggctggtgagccctgtgacatcatcgacagcagtgatgagatggatgcccaggaggaaagcatccatgagagaactgtctccagaaaaaagaaaagcaagagacacaaagaactggacggggctggaggagaagagtatcccatggatatttggctattgctggcctcctatatccgtcctgaggacattgtgaatttttccctgatttgtaagaatgcctggactgtcacttgcactgctgccttttggaccaggttgtaccgaaggcactacacgctggatgcttccctgcctttgcgtctgcgaccagagtcaatggagaagctgcgctgtctccgggcttgtgtgatccgatctctgtaccatatgtatgagccatttgctgctcgaatctccaagaatccagccattccagaaagcacccccagcacattaaagaattccaaatgcttacttttctggtgcagaaagattgttgggaacagacaggaaccaatgtgggaattcaacttcaagttccaaaaaacagtcccctaggttaaagagcaaagtgtacaggaggattgcagcctcccgttcagtacgaagatgttcataccaatccagaccaggactgctgcctactgcaggtcaccaccctcaatttcatctttattccgattgtcatggggaatgatatttactctgtttactatcaatgtgagcacggacatgcggcatcatcgagtgagactggtgttccaagattcccctgttccatggtggttcgggaaactgcgcagtgaacagggtgtgcaagtcatcctgggacccagtgcacagcgttcgggctctttgactggtgggcatcctcagtacccattctccctgagagcgtagttactgcttcccatcccttgggggcagcctcgagtgtagtccattagtaatcagattccagtttggacagggtggctggattgtatatctcgttagtaatgtacatgctcttcaggttctagggctcctgttaggggagggagaaatgttgaatcaagagggaaaacaactactatgatttataaacatattttaatgtaaaaatttgcatttaaaaa

SEQ ID NO: 3309 - DNA, 708 bp, Homo sapiens
  SIMILAR (569)..(537): 631254mologous to Homo sapiens Human secreted protein sequence SEQ ID NO:165,accession number Y87126,Smith-Waterman Score =40.
gatcatcagtctgttagtccttcgctagcggctgttgcgtttaaacccaacccgcagccgctgctgcttcgccgagctcccggagctgggtgggggtgccccacgcctgaaagagagtgatggagtgcccagtgatggaaactggctcactttttacctcaggaattaagagacatttgaaagacaaaagaatttcaaagactactaagttgaatgtttctcttgcttcaaaaataaaaacaaaaatactaaataattcttctattttcaaaatatctttaaagcacaacaacagggcattagctcaggctcttagtagagaaaaagagaattctcgaagaattacaactgaaaagatgctattgcaaaaagaagtagagaaactgaaattttgagaacacatttcttcggctaaagctaaataacttgaataagaagcttatagacatagaagctctcatgaacaataacttgataactgcaattgaaatgagcagtctttctgagttccatcagagttcctttctactgtcagctagcaagaagaaacgaattagtaaacagtgcaagttgatgcgtcttccatttgcaagggttccattaacttcaaatgatgatgaagatgaagataaagagaaaatgcagtgtgacaacaatattaaatcaaagacattacctgatattccctcttcaggatcaacaacacaa

SEQ ID NO: 3310 - DNA, 729 bp, Homo sapiens
  SIMILAR (427)..(672): 261254mologous to Thraustochytrium aureum ribosomal protein S13,accession number AF288091,Smith-Waterman Score=84.
atgtacctggtttgtacattcacgctaaacaatgataagctcaagtctgatggtttaatagaatcttttcgagtggcctccattagtggccggattcccaatgctacaccgactgctggctgtccacatgatctgctccggttcctaattatctacagcgccggtgtggtcaaggcacacaggggcacatgttgttactttgatcagagcatgggcagtcactatgaatcacaggggtccagtggcagttggcagctgcactgtcactgggggtcattgccacttgccagggtgcatcaacactctgcgtccaccaagctatgggagcacaccaggtcctgggagtgtggctttgatgagggacaggaaaagtcccacatcaggccaatgcttgacttcacttgcgtcggcgtctcagacggcacggtgtcgggtttgagcacccaagatccaatgcggaagaagagggatcaggaagaggctctacatagaaccttgtggcgtacacctgcagctctgactggtgcccaatgcagccggactttcctcattcaagttggtgcctgcgtcagcccctctctttcagaggcacatgccatggcctccttgagaatctccagtggcctccgtgcccgaggcgagggcacaacacagatgtcctcggccaagcagagacatgggcccagtgacatcacattttcagatttttctgaaaagccagatacttga

SEQ ID NO: 3311 - DNA, 777 bp, Homo sapiens
  SIMILAR (456)..(548): 411254mologous to influenza A virus (A/Swine/Texas/4199-2/98 (H3N2)) M2,accession number AF153257,Smith-Waterman Score=67.
ttttgaaatgcaggaccaaaaaatcaaattctggtttgcagacaggaaaaaagtatcaaaaaccagaattcctaacagagcagctagaaaggggcaattttataaaccttatcagctgaatatcatgaggtgattttcacctgattgcaaaactgccatagtttgaaacacttttcaatttaccagacacactctgtcaagacttcatatacttccaacttgcaagcctgtgttttgccttctccaacctaaaaaggaaaagctttaaacgatgaacttacattctattaaaccatcagacttgagcttatcatctgtttagcgtgaatgtacaaaccaggtacatttccaccaaacacatagaaaaatcttgtgcatcacagttcagctaagggtggtaagacaatccttacaatcctccttggatttcttttttaaagatgtcaaagaagcaggtaagcaacattgttcatttgttactgggtgttctagatcaaaccttcacaagctatatatatagcttcatatgctatagcttacaaatggggtaacaaagtaaaagaaaagaacaaattatactttgacactttatagtcaaagtataattaaaaaagaaatcctacagtgggtaatggagaaatagataatttttccagcagctatgcctgaaatttttggtatttttttccttgctaaatatgctttttttctttttttagtttttaagccaccagttttcagagttcaaagcacaagatttgagaataaaacagtaag

SEQ ID NO: 3312 - DNA, 480 bp, Homo sapiens
  SIMILAR (196)..(366): 321254mologous to Scyliorhinus canicula putative Na,K-ATPase beta 1 subunit,accession number Y18921,Smith-Waterman Score=65.
acatgcctaaaagctctcagtgggtcaatcacagcctccagcagtcaagagtttcttaattagtatccaagatcctgagaaaggtggcaatcaggaggccagaggctgggcctgactccgtgcagctcctcaaatccttcccggaccactctccacctgctgcccctgccatgaatgaggccagtcacccagactgtcctaacaaccagcccagcaccctaggaaaattcacccagcagatgccatacaaattttcagaagtacttaagcccacagtatcccagagctcaggtctaatgagaaagggagacaataaacagaaccaagtattttgtttctgctgcaggagcgggaggtgaggggtttcatgctgcaggagcaggagatgaggagggcacaaacagtgtgtatacgagtagctcccacctctctggattcttacttctgcagggttcaaggatttacattaggaaaccctga

SEQ ID NO: 3313 - DNA, 1098 bp, Homo sapiens
  SIMILAR (974)..(1018): 461254mologous to Homo sapiens junctophilin type3,accession number AB042636,Smith-Waterman Score=44.
atgccgcgggtgccgggcatgggggctctgggcccgggccctggggtgcttggaggtgctgtggaggaggggtggggctggcttggagcccatgggattcgattggaggccatggaaacagtgctgctgagaacccaggtgcacaggcagctgctgcagtccccaccctcccttcttctggggatatcaggtctgctgattttatgtctgaaggtcatgggccactgtcccttccctatgcccttgaatctcttccatgggacctaccagggccagtgggtcggtggcatgcgccagggctacggcgtccggcagagcgtcccgtatggcatggccgcggtcatccgctcacccctgaggacgtccatcaactccctgcgcagcgagcacaccaacggcacggcgctgcatcccgacgcctctccggcggtggccggcagcccggccgtgtcccgcgggggcttcgtgctcgtggcccacagtgactccgagatcctcaagagcaagaagaaggggctgtttcggcgctcgctgctgagtgggctgaagctgcgcaagtcggagtccaagagcagcctggccagccaacgcagcaagcagagctcctttcgcagcgaggcgggcatgagcaccgtcagctccacggccagcgacatccactccaccatcagcctgggcgaggctgaggccgagctggcggtcatcgaggacgacatcgacgccaccaccaccgagacctacgtgggcgagtggaagaacgacaaacgctccggcttcggcgtgagccagcgctcggacgggctcaagtacgagggcgagtgggccagcaaccggcgccatggctacggctgcatgaccttcccggacggcaccaaggaggagggcaagtacaagcagaacatcctcgtcggcggcaagcgcaagaacctcatccccctgcgggccagcaagatccgcgagaaggtggaccgcgccgttgaggccgctgagcgggccgccaccatcgccaagcagaaggctgagatcgcggcttccaggtgggggccccagcacctgcatgctgacctggtccccaggacgcagatgctgctggcctga

SEQ ID NO: 3314 - DNA, 1637 bp, Homo sapiens
  SIMILAR (903)..(1193): 871254mologous to Mus musculus junctophilin type 3,accession number AB024450,Smith-Waterman Score=479.
atggcgccggttgctggcccactcgccctcgtacttgagccgtccgagcgctggctcacgccgaagccggagcgtttgtcgttcttccctcgcccacgtaggtctcggtggtggtggcgtcgatgtcgtcctcgatgccgccagctcggcctcagcctcgcccaggctgatggtggagtggatgtcctggccgtggagctgacggtgctcatgcccgcctcgctgcgaaaggagcctgcttgctgcgttggctggccaggctgctcttggactccgacttgcgcgcttcagcccactcagcagcgagcgccgaaacagccccttcttcttgctttgaggatctcggagtcactgtgggccacgagcacgaagcccccgcgggcacggccgggctgccggccaccgccggagaggcgtcgggatgcagcgcctgccgttggtgtgctcgctgcgcagggagttgatggacgtcctcagggggagcggatgaccgcggccatgccatacgggacgctctgccggacgccgtgccctggcgcatgccaccgacccactggccctgggatcatcgtcttcattacctgcgtccatgttcttgaaaatcattgtattgtgtattttgtctttcttgttttgtttcaggcaagaaggcagggttctgatagctctgagaaaaatgcttgtgggaaggagtgcatcatcatctttgctgtttgggtgaccggccattcaagcctgggggctttggtaccggaaaaactgaggcaacgagggtctagaatagaaccccagcaactgcagcagccctaccaaatagtggccagcctgttaaaagaaaaacagcaaccagataaacaacaacaaaaacacaaaacccccaaagatcaggaactcaaatatcgaagggccaaggcgaatacaccggctcgtggagccacggcttcgaggtgctgggcgtctacacctggcccagcggcaacacgtaccagggcacctgggcgcagggcaagcgccacggcatcggcctggagagcaaggggaagtgggtgtacaagggcgagtggacgcacggattcaaggggcgctacggggtgcgggagtgcgcgggcaacggggccaaatacgaagggacctggagcaacggctgcaggacggctacgggaccgagacctactcggacggagagccggggccggaagccagggagctgcctgctgctgctgctgctgctgctgctgctgctgctgctgctgctgctgctgaagatggtttctgtgcagggaaccttggccggctctgcagctgcccgcctgcctggactctccgatatccactcctcagtgcacctgacacgcatggagccggtcctttcctggaagccagaccccaaacaaactggcttccccgaccagtccactcccatgtgggagcttatcctcagaggcactgggtcctctgcctccctcgggcggctcgcctgtttcaggcatggatgcctgggaagggagtgagacgcagcaatgacttgtgcttctgccgagaataaaaatcctgagcgtacgtgtgctctagtcctccccgcccgctcgctgcctccgagtctcatgaagaaagctcggaacacctgctccacgaaa

SEQ ID NO: 3315 - DNA, 933 bp, Homo sapiens
  SIMILAR (1)..(126): 591254mologous to Homo sapiens HDCMB45P,accession number AF068294,Smith-Waterman Score=133.
atgcttgttatagatgagcaaagaaagtggtttcctgagatggaatctactcctgttgaagatgccgtaaacactgttgaaatgacaacaaacgatttagaatattacataaacttagttgataaaatggtggcaattttgattccaattttgaaggaagtcctactgatagaggcaagaggcagacaaaggcctaggcagatagggaagggtccccggagaatctccaactcgccccacaagtgtttacatcagatgttttgtgcagataagggaacctgcacaggggacttgcctgagcatgcccgcagtgaactggaggcccacaagcactgggggaatggggtggagccaccaggaattcgtgtcttatgcaggggaggagcctggctaaggagcctagataaggagcaaaaaaatcctgcatcactactgtgtggccctagcaaacttgcacagaggggccgtgggaaccagcagcccacatccttctttggtgactgcacactgaccttggattcctggcatccagttgtactctttcaggttccatctcttctgcatacctcatgctcctggcacatttttgaatggttatgccaggtccagagcccaggaccccacaggatattttgtgataaggcggtagccttcaagaaagggtacactcaccagcagttttgccacgagagtacgccgaacaaaggagacaaggtcatttataacctgacacgtccactctattgctgtgtccagtttccaatggctggcacaggacctcacattctgtatttgtcccgattggctagcaacttagaactttttaaaaggggcaaaggcagaggagaacaaagcaaggaggaagtaacttgtggaatgctgagaaaggtaaaaacaccttcaaataaggaagaggaacaggctatgacctaa

SEQ ID NO: 3316 - DNA, 1989 bp, Homo sapiens
  SIMILAR (1600)..(1986): 971254mologous to Homo sapiens p40,accession number U93566,Smith-Waterman Score=660.
atggctcaggctgcatggccactgcttccatggccatcaccccaacactctgctcctaaccacggtgggacacctccggaggaggcagcactgcagaagtggcccccaggggctgtggaagcagaaggctttggaggaggagctgctctgcgccgccaccagggggcagtctatcatcccatcaaagagggtgggaggaaaaacgcctccatggcttgctgttgttgcctcttggagaggtgtaagctcaatcacactcgatctgtgctctccatttccctgggtggcaagaacactgggaaaatcatagctaaccttcttttggtcggggacacccttttccacctcaggtacttgctttcagctggggatgtgcctttccacagtgggaggcttggagggcgggacagtgctaagaagataggagccggcagcttggacttaggagagaactcagcatgggagggcagaggggctctgcggctgcagcgagctggagagagaagttctgttccttacgtacgaactgcctacaggccacctttgggcacgacctgttggtgggaacctagtgatagtaagatctcagtcacaggtttaccctatggcgtgtctctccaggagtctttgaacgggcatcgacagctttcccaagaagcgcttgatgatggggcggctcttggcaaacttgtccttcacctcaatttccagcaccgagatataaaggggggaaatgaaaaacaggtttcattcacaagaggctgcctggtaccattcagccaatgccattatttattactaatggaaattaaatggactggacatggtgctttctgtgtaaaagttctacctggaggagaaagagcaggcaagaagcaaatggagcatgtgaactatagctacttttccttagaaccttgcaatgtatgtgactttcagttcagagtgcccagaacacagaaggaagaaaagagctattattctaactttgccttctgcacgtgctttgttgataaactgtcatcttcagtgatgctcctcatctgtatatcttggtcaaccttggtcaaacttcaggagcccatatccaatcagtcaaagttgaaaaatgatgctaacagacaagtacaaggaacactttggcaagtgaatatcaaacacagagttggagagtctatgttccacacctcaccagcagccatcattgttgatcttcttcagtttggccataccattgcacactgccaatcgggacaaatacagaatgtgaggtcctgtgccagccattggaaactggacacagcaatagagtggacgtgtcaggttataaatgaccttgtctcctttgttcggcgtactctcgtggcaaaactgctggtcacagacaaacaaaaagacagcagtaacctctgcagacttaaatgtccctgtctgacagctttgaagagagcagtggttctcccagcacgcagctggagatctgagaaccggcagactgcctcctcaaaaggaaaactaacaaacagaaaggacatccacaccgaaaacccatctgtacatcaccatcatcaaagaccaaaagtagataaaaccacaaagatcgggaaaaaacagaacagaaaaactggaaactctaaaacgcagagcatctctcctcctccaaaggaacgcagttcttcaccagcaacggaacaaagctggatggagaatgactttgacgagctgagagaagaaggcttcagacgatcaaattactctgagctatgggaggacattcaaaccaaaggcaaagaagttgaaaactttgaaaaaaatttagaagaatgtataactagaataaccaatacagagaagtgcttaaaggagctgatggagctgaaaaccaaggctcgagaactacgtgaagaatgcagaagcctcaggagccgatgcgatcaactggaagaaagggtatcagcgatggaagatgaaatgaatgaaatgaagtga

SEQ ID NO: 3317 - DNA, 675 bp, Homo sapiens
  SIMILAR (611)..(519): 641254mologous to Homo sapiens PRO1488,accession number AF116636,Smith-Waterman Score=93.
atgggaaaaggccgtcgatcgctctggcttcttcctgctgatgggggaagtagcgggaatgggaacgaactccaagggacatctccccatgactatttttccattgcaattaagtccacgcacattgggttggaataccccaccagtagacagagtaacagagtcagcccccagtccaagagaattaggcagccacttgggctgccttctggatccatcactgaaagggggccaccaaacaacaggcagaaagggtacactcgccagcagttttgccacgagagtacaccgaacaaaggagacagggtcatttataacctgacatgtttactctactgctgtgtccggtttccattggctggaacaggaccacacattctgtatttgtcccgattggctagcaacttagaacttttcaaaagagacaaaggcagaggagaacaaaggaaggaggaagtaacttgtttccacaagttacttgctgagaaagagaacaacccccctttttcctttatctacccaaatcctataaaacggccccacccctatctcccttcgctgactctcttttcggactcagcccacctgcacccaggtgaaataaacagctttatggctcacacaaagcctgtttggtggtctcttcacacggacgcgtatgaaagaaacatttaa

SEQ ID NO: 3318 - DNA, 559 bp, Homo sapiens
  SIMILAR (101)..(247): 341254mologous to Mesocricetus auratus transferrin,accession number M26642,Smith-Waterman Score=66.
aggttctcaacgtgtggccctgggaactgtagcatcagcatcaccagggaacttgttagaaatgcaaattcacagtcccaccccacaccaactgaatcagaaactccgggaatggggcccaacaatttgtgttttaacaagcactatagattatgatgtactccaaagtatgagaaccagtccttctcaaactttaatgtgcaaagggtacactcgccagcagttttgccacgagagtacaccgaacaaaggagacagggtcatttataacctgacatgtttactctactgctgtgtccggtttccattggctggaacaggaccacacattctgtatttgtcccgattggctagcaacttagaacttttcaaaagagacaaaggcagaggagaacaaaggaaggaggaagtaacttgtttccacaagttacttgctgagaaagaagggtgttcaggaatctctggccttaagaacagcagcagtagtagagacagcagcagcccagagtttggatgtggaccaaatcgggttgcaattatagcaatttggtctatctaa

SEQ ID NO: 3319 - DNA, 430 bp, Homo sapiens
  SIMILAR (361)..(194): 361254mologous to Epicrates cenchria cytochrome b,accession number U69777,Smith-Waterman Score=67.
atgaatggatatgaggtggctttggtggtctcaccttcaggaccctctggtgggttggatgtggaggacagtgacacggagagagctgccaaggctaaagggtacactcgccagcagttttgccatgagagtacactgaacaaaggagaccaggtcatttacaacctgacgtgtctaccctactgctgtgtccggtttccactggctggaacgggacctcacattctatatttgtcccgagtggctagcaacttagaactttttaaaagaggcaaaggcagaggagaacaaaggaaggaggaagtaacttgtggaatgctgagaaagtttccaccttcacaacggagtctccctccaaacacagtccctgcttctgtgtttctgcctaactacaaagagtatgacataaagattcagagcaaatgcagta

SEQ ID NO: 3320 - DNA, 768 bp, Homo sapiens
  SIMILAR (2)..(184): 601254mologous to Homo sapiens reverse transcriptase,accession number L27428,Smith-Waterman Score=221.
atggaatcaacctcggtgcccatccactgtgaattggataatgaaaatatggtacatatacaccatggaacactatgcagccataaaaaggaacatgatcatgtcattcgcagcaacatggatggagctagaagccattttcctaagcaaaatgccacagtagcagaaaaacaaatactgcgtattcttacatgcctgtttggagagttaagcaaaataaatgcatttgatactcctgattcaccgctcttgagaggcaaggagtttagtgactctatacataatacctttaaccatctgtggagaaccaaggaatataatgaagttggttgtttgctcctaaattcactggacaaagtgatgaaagaaaatgatgaacttaaaaaagggtacactcgccagcagttttgccacgagagtacactgaacaaaggagacagggtcatttataacctgacgcatccaccctgctgctgtgtccggtttccattggctggaatgggatctcacattctgtatttgtcccaactggctagcaacttagaactttttaaaagaggcaaaggcagaggagaccaaaggaaggaggaagtaacttgtggaatgctgagaaagatggggaggaaagccttcaaagaggaacctctactttacttttcacatccagataagcaaaagctgcggaaattcctcatcactacactggccctacaaggaatactcaagggagctctaaacatggaagcaaaaggatgccgtttaccatga

SEQ ID NO: 3321 - DNA, 1126 bp, Homo sapiens
  SIMILAR (592)..(630): 611254mologous to Arabidopsis thaliana F24O1.6,accession number AC003113,Smith-Waterman Score=47.
atggtgggtcagcaacatgtgagcacagatgaaagcgcacggccgttcacggagcagctgaaggtgcagacgaggagcactggagggcgtgcagagcacaagagcccccttgcagccaaagccaaagggagagatccaagagaacatgtcggcagggcacagtggcaagcaaggtcaaatgccactcagaggcccggtgacaatgaccaccgcagcaaaggcgagaacagcagctttagcacagaccttgcgggacgaccacgtgcccatgagcgaaccagctgcctgaggcactgcagatgtcctggttggagctcaagggagctgtggagctgtggttttggtcagaagcagatggacgtctgcagggtctgcatagtactagcgagagctgcctgcctgcatggtggggcgtttcatctcttggcaaagctgcagcagacgttggcttcagagcaggcgggccaggagaggagctgtggccagacagccattgccaaggaagggtctggggctcgtagggtgccacagatacccacacccggtgcattttccacttatacccagacctatgcctacgggagctacatccctgccccacctcctccattccctgtccctgtctcacctcgggagcttcccactgggattgacaatgtggaactatggtctgcatttgggaagagggaggagcaggagggcttggcagttacccgctggctcctctccccaccacagaaagagtacactcgccagcagttttgccatgagagtacaccgaacaaaggagacagggtcatttataacctgacacgtccaccctactgctgtgtctggtttccattggctggaatgggaactcacattctgtatttgtcccaattggctagcaacttagaacttctaaaaagaggcaaaggcagaggagaacaaaggaaggaggaagtaacttgtggaatgctgagaaaggtaaaaacacttttaaataaggaagaggaacaggctatgacttaatgcttgcttgcaccagtataagcctgccggggcgaatagttacaagctcaggtttgactacattaagctcattaggcaagcgactatttattcctatttaaatgctcgtgcc

SEQ ID NO: 3322 - DNA, 441 bp, Homo sapiens
  SIMILAR (112)..(59): 1001254mologous to Homo sapiens Secreted protein yb7_1,accession number Y26041,Smith-Waterman Score=95.
aaggagttcacaagaaactgatctttactcaacaaagttctacacaagtggaatctcacgccacctcggcgccaatccccagcacagcacagtaacaaatggacagacccgggaaaacagcagaagcttcttaaactctagatgcaggttacacggaaggccttacgggttaactcaggggttcactaattctactgtctccatgcagtcggggaaatggtggagcggctggcccagcctcgccggttatggcacccgcacatgcgtgtggccatgtgtgtccgtgtgagtgtacgcgtccctacgagggcccccctcctgacctgctcctccctcacctcatccgaagccggattcggtcagctgtgtaattcctccctcccacgtagctggcccaagtgggctgccagagatgaccctattagagcccaggggcccttg

SEQ ID NO: 3323 - DNA, 1680 bp, Homo sapiens
  SIMILAR (1295)..(1459): 561254mologous to Homo sapiens Secreted protein yb7_1,accession number Y26041,Smith-Waterman Score=140.
  misc_feature (1)...(1680): n = a,t,c or g
aaaactgagtaccctccgacagagcggngcaatttntcggggcggnccgaggaggatgctgaccttgggagtcgccctgtcagcacgcacatgcttgggacccactccacacactccctgccagctttgttgcagcctcagctggtggtgtctccgtccttatcctagcctagctcgcagggtgagaaccactggagtggctggggctggccagaggtcaccgtttctccttcctgtgtgctccagtggcttttgaagacactgggttgggacctttttcctgaagagagctgggtgtagccagagctactggcacctaccccgagcatctctctctgtaaagcagcttcaggggcagtccgtttctctgtgcttctgaaagcccccttctcacgtttcagggcccaagttttaaattcaaggccttgggcaaggggcgttttaattgatgatgacagaggacacaggtttttgccagcaaaaaggaaaaccaaggcttggtggaagggaaaggtggtgtgtcccctgttccctattccatctcccctgggacttcctgctcatcatagtaccaagtgaaccccagagatccctactaaactggggtcaggaaattcctagagaacctttccggaataagtctgggaacatggtccaaggtggaaaggggctccccctaaaagagggtgggggtgtagttacccacccagttggccagaaaacctgggccttgcaagacccccttagcattttttcccttttttttccttccctgctttctacttctttggggagccccttgtgttttgggagtctgactggagtctcgcatccctgggggcctgctccatccgatccctcctgggcgccagaccctccatccaagccctgtgtcttttccataggtcagggtcaggccctgcatctattccaaggggcactaaagtacacattccaataaataagctgggtgtccctgcacgcccaccccatgaaaactcgagcaggtctctggaagccatttgttaaaaaaaaaaaaaaaaagttttaaaaataccttttaattttctggtaattccagttctttgaaaacatcctctgcctgggtcttggggtgtgtggatggattggctgtctgatgggattggtaaccccctcgctactcaagatggggggatacaaaccaccttcaggggaaggggagcctgggttcttctcgttttccctttttttttttttttttaaaaaaaaaactatttaattttttaatttatttttggttgttttttgcacaatgaagtttcaagcttctcaaccttctcccctacccagggctgtggacccaagactggccttgagccacagtccctctttccctcctcaccctcgtctctcctgcgggctcccgggtctgtccatttgttactgtgctgtgctggggattggcgccgaggtggcgtgagattccacttgtgtagaactttgttgagtaaagatcagcttcttgtgaaaaaaaacaaaaaaaggggcggccgctttaaaggaaccgacctaacgaccgcgggcatgcgaagtcaaagcttttctataggcgccccaaaactcctttccctcggcccgcgtttaacaccgcccgacacgggaaaaagcataatcagcttgcgatctcgtgccaccccg

SEQ ID NO: 3324 - DNA, 1799 bp, Homo sapiens
  SIMILAR (374)..(622): 391254mologous to Streptomyces coelicolor A3(2) SC5B8.08, probable ABC transporter; N-t erminus is similar to several ABC transporters e.g. NODI_RH IGA P50332 from Rhizobium galegae nodulati, accession number AL022374,Smith-Waterman Score=102
atgcaggtcgctcagggattcaggctgattgaggctctgctgtctggaacagtggcctctgccaacttcctggcaggggaagacacagatggagcagtgagaagacaaacttgcacatatctgttcgggcagcagacgatgactgagcaccctgggctacgcagctgctccaggtgccagagagatccccgtgaacaagaccaagtccccaccctcatggagggaacattccagaagtgcaccatagggtcaaaggcaatgaagaaactccaagctctgggtccgtgggaggcacccggcaaacagaggagtcggcaagctaaccttgctattagcagcgatggagaagtgatgattgtctgcacagctgtcagaagcagctccccgctgcctggcaccagcacctggggaggggcgccactcatcggcttcacagagatgccccaggctgggaaagaaagaccagcaggccggaccttctgtgccaccactccctcgtccttagctgcagggatcttgcccttcatccagagactgagaccgggaagcgaggcccacctctgcacctgcccccatagctgggccttcgttcctcaaactttgctcaatgaggaagcccagggaatcctgtgggtgttggcaggtcctgtgggagatggtgtggtgacagcacttggccataccttacaggactccaaagggctactgcagacacatcccagagcccagggagcagcagctgttgtttctgcagcagagcggagcggccaggctgcagaggaggagctgagctcccatgttaaggatctttatgtcttcacaagagcctgtgaccagacctacacactttcaggggcagacactgtggttgcaagcaaagagaaacactttggctatggagctctaggttcgagggctgggctttatgatcagacctgggttagaatccggactctcacaccttctagatatgtgacctttgtcagtgacagcatctctgctacagactctaaagcggttgtgcataatggggacctacagactcctccaccagaaccctccccagcagacagcaactccccttcagttggtctgtgggcactcgaagctgtgtgcaaccaggccaatgaggtcgcagttcctgatccaggcttggactctgcactggaagcaccagccggcagtcttccttcccactttgcaccaacaccagtcaagtgcaggatgatgcagcaagaaggtcctcaccagatgcagccccccaaccttggatttcccagcctccagaacactgtgcttttcctctctcaccatccagccgtcaagggggcctgcagtcataagatcataaacatcacagcagcagcaacaacagcagccatctttcatggagcatctccaatcctaggagctgacatgagtgtgtctgggttcctgatccaaggagtcactttatacacagtagacaaaacccaaattgcaagtgtgagatgcatacagaaaccaaggctggcggcaacactctccatgtatcactcgccagccgtgcagtcctcactctcttgcccaggtaagctggggcagagcctgctgcagcccaactctggttgtgggaagggctgggcaccaaggagctgcgagcttacctcaactcatctcaccttcaccatggccggctgcgagggcggcccgtgcagtccgtgctcaggaggaagggaagtatcaccggcctgaactactactccccatcccctgcaactgccattctttctgacttgtctctagaaaaggccatgtga

SEQ ID NO: 3325 - DNA, 1833 bp, Homo sapiens
  SIMILAR (339)..(301): 611254mologous to Homo sapiens super cysteine rich protein; SCRP,accession number U63332,Smith-Waterman Score=68.
atgagtttgggagtcagggaggtaaaaggagccagacacagtgcagcccacacagctcctgtcacccttcatgtctcagtgcaagcatcagctttttcgagaagcctcagtgtagaaaggatcaagtcaaatccttccatcattgttcgcatttcgtggcatttatcactgatgcagatttctgtgcatttgtgtgatgatttcattcatgtttatctccaccagtggactacagctgtgcttttcctctctcaccatccagccgtcaagggggcctgcagtcataagatcataaacatcacagcagcagcaacaacagcagccatctttcatggagcatctccaatcctaggagctgacatgagtgtgtctgggttcctgatccaaggagtcactttatacacagtagacaaaacccaaattgcaagtgtgagatgcatacagaaaccaagattagtaagtggagactcagagaagtcaagcagcttccccaaagtcacacagctagaaaggtgtttgcttctcaagccctctgatgtccgtgacatctgcctgtgccccaaccctcagagaagcaaactagagggaccccaatatgttgatcctggtaaagaaaggtgcccttcttcccgaggctgcccgtgtcagcccctgcaggtctggatggtgctggcgaagacaccatggtttaggcttgtctgggcgggtggtcgtggaaatttggccatagatggaattgcaaaggttgcgttagttattcagtgccaatctgcctttaatgagacagggaatctgatgcccagacagggagaggactctatcaagggcacaaacccagcaatgggcggaactgaaacttggctggcggcaacactctccatgtatcactcgccagccgtgcagtcctcactctcttgcccagctaaagctcctcaactgcagcatcaacagatcagtgccgacctgttaaggccgtcgagagcatcaaatgctactgttcagcagctcccttttcatacaagaaaataccaaccagggggaaagcaacgaacaaaagcaggcagaggggacaggaggtggcctgacccagaggagttaagggtgaggcttgggcgcctggaggagaggggactttctgtcctttggaacaactctgacattgtgtctctgacccagagccctggggactcaaccctcagaccccgatctgaagggcctgaagctagaacgcggttatttactccttctcccatctacttctccctggatctcagcgcaggccagacaggtgctataacctttgcccagagatttggagccttcggtggtgagactgagtgccgacgaggaggagagcggcctggctgtctcccactgcccttgggatctggggaaggtcactccctgaccctgcccatggcctgtgcccaattctcacccatattctactcagagggtcctcagctatccagaaaaaagagagaggcaggcagcatgcccagccacattacagcacgaagcacacctccctaccaggacctgcttattggttccatgaggacatggttcttgtttcagtcgccactgtgttcccaggtcctagcagatagtccagcacttactagatgctcagtaaatgcttgtacagctaaatacgtcaaaggggaggaagatcggaaaatagaaagggctgtcctgcttacaaatcattttcacgtcaccctgctaataagatgtggctgttacatgtatagttttactaagtgtgagaaacccgagaatttgaggtcaatgctcacagcagagcggtatcacgaacccaggtctctctga

SEQ ID NO: 3326 - DNA, 497 bp, Homo sapiens
  SIMILAR (39)..(497): 981254mologous to Homo sapiens SWI1Lbeta protein,accession number AF259792,Smith-Waterman Score=818.
  misc_feature (1)...(497): n = a,t,c or g
ngcgggaattganattctgtcgccatgcaggaatncgccacgaggccttgagccagtcaccaatgccacaggaaagaggttttatggcaggcacacaaagaaacccttagatggctcagtatggacctcaacagacaggaccatccatgtcgcctcatccttctcctgggggccagatgcatgctggaatcagtagctttcagcatagtaactcaagtgggacttacggtccacagatgagccagtatggaccacaaggtaactactccagacccccagcgtatagtggggtgcccagtgcaagctacagcggcccagggcccggtatgggtatcagtgccaacaaccagatgcatggacaagggccaagccagccatgtggtgctgtgcccctgggacgaatgccatcagctgggatgcagaacagaccatttcctggaaatatgagcagcatgacccccagttctcctggcatgtctcagcagggagggccaggg

SEQ ID NO: 3327 - DNA, 486 bp, Homo sapiens
  SIMILAR (4)..(432): 901254mologous to Homo sapiens SWI1Lbeta protein,accession number AF259792,Smith-Waterman Score=649.
  misc_feature (1)...(486): n = a,t,c or g
cgaatggggccgccaatgccacctgtgaaccgtaaggcacaggaggcacccgcagcagtgatgcaggctgctgcgatctcagcacaaagcaggcaaggcagtttccccggcatgaaccagagtggacttatggcttccagctctccctacagccaggccatgaacaacagctgtagcgtgatgaacacgcaggcgccgccatacagcatggcgcccgccatggtgaacagctcggcagcatctgtgggtcttgcagatatgatgtctcctggtgaatccgaactgcccgtgcctctcaaagcagacggcaaagaagaaggcgctcctcagcccgagagcaagtcaaagaagcccagctcctccgccagtaaaggggagaagatcaaaaaggtgtacgagctggggaatgagccagagagaaagctctgggtcgnnccgggnnttcgaacgctgtgcacntcgaagggtatcaatggttctcaccac

SEQ ID NO: 3328 - DNA, 399 bp, Homo sapiens
  SIMILAR (75)..(398): 871254mologous to Homo sapiens SWI1Lbeta protein,accession number AF259792,Smith-Waterman Score=498.
  misc_feature (1)...(399): n = a,t,c or g
tttatgacgcaaggacagatgcccatcagtctcatgctggacatgtacaactaaaggcccttcggattaatgtccaacctgggcatggagcacagccagcagtttccctatggagccagctacgaccgaagaattacaaacgccatatggacggcatgtactggcccccagccaagcgccacgagggcgacatgtacaacatgcagtacagcaaccagcagcaggagatgtacaaccagtatggaggctcctactcgggcccggaccgcaggcccatccagggccagtacccgtatccctacagcagggagaggatgcagggcccggggcagatccagacacacggaatcccgcctcagatgatgggcggcccgctgcagtcgtcctccagtgaggggn

SEQ ID NO: 3329 - DNA, 585 bp, Homo sapiens
  SIMILAR (256)..(381): 951254mologous to Homo sapiens SWI1Lbeta protein,accession number AF259792,Smith-Waterman Score=197.
atgaagtgtcccgttaatgccctgccagtacagggtatcccagctccagcaggcctttacgaagaaaaaggcaatcacactaccacaaaaactgagaacctcctacctctggacttcctgcagtgcttgttaaaactaccgattctggggctcccttcagaattcttgaggtgggtccaggaatccgcatccctgaccacttccgcaggtagttttcatgcatgcaagctcaagtttgagaagcgccaatgtggagcatctgtgggtcttgcagatatgatgtctcctggtgaatccaaactgcccctgcctctcaaagcagacggcaaagaagaaggcactccacagcccgagagcaagtcaaaggatagctacagctctcagggtatttctcagcccccaaccccaggcaacctgccagtcccttccccaatgtcccccagctctgctagcatctcctcatttcatggagatgaaagtgatagcattagcagcccaggctggccaaagactccatcaagccctaagaatttacgaggctccgttattgatttacttcctccaaaaggaggaaatgatacttaa

SEQ ID NO: 3330 - DNA, 2302 bp, Homo sapiens
  SIMILAR (1648)..(1824): 1001254mologous to Homo sapiens SWI1Lbeta protein,accession number AF259792,Smith-Waterman Score=323.
atgacagagtgtttagatagattcattgacagcatcgcggctgtcccaagatctaccaagtccactgtgcagaaatgtttgccctgccttagtgatggtgaagataagattcctgacttaattgcaattacctggacaccgaggcagggtgaacttttggaaaagaatgtaattagtgaaacaggaactttactgccaactccctgtctagataccagtactaaagagaccgctgataagtccacatctgggaaaacaatccatcagtcgataaaaacagttcttaaggatctgtctggctccattgatgacctccccacgggaacggaagcaactttgagctcagcagtcagtgcatccgggtccacgagcagccaaggggatcagagcaacccggcgcagtcgcctttctccccacatgcgtcccctcatctctccagcatcccggggggcccatctccctctcctgttggctctcctgtaggaagcaaccagtctcgatctggcccaatctctcctgcaagtatcccaggccaagatcctggttatggaaactcagcaagtccatgggtcatgaatattctcagcgctgtttctagaggacagattccccattgctgtctggtggccaaggcctttgcgtttgaagaactgcctcagtgttctgagctactcttctccttcagaggtcactccacaccccaagtcagagagttcaggcacctcttagctgctcaggacttacaaggctgcagtcaagatgttgggcagcctgcatcctcatctggaggctcgactagggaacaatctacttccagtttcattcggattgtggcagcttcatctcctagcagttgctggaaattacaggttctgctcagtggagaggaggggattactcaccggtgttactcattggaggttactcgagggtgtgtctgccacagtagtcagatgcctccgcagccacccgggagccagtcagaatccagttcccatcccgccttgagccagtcaccaatgccacaggaaagagggacccccatgtcggcagcaggctggggcttcacagatgctcagcagagactgagccaaacaactaaagccatccagctctcacaccctgtcaaagcacaagacaaccgaactagaaaatctttattgtttggaattaagaaagcttacaattttaccaataaatactattcagagctcatgacgcaaacaagaccacaatctacgccttccattcccagtccactgccgttagatgatgctggcttagaaaggagtcagggaaatgtgtcagcttcctctttcatggtcttggggaacagggaaaggggagaagacacaactggggctggctttggtagaagtagaaataaggaagaagtaccatgcacgatctatgtcggagcggagtcaccaggatgtgctgatggatggatcacacttagaggaaagaaggaaagggtggccttgtgggcgtcccatgtgtctgagggagcatttggaggagtggcagtaccagttacagaggtagataagtctcaagacccaacaggtttgaaggagaaagtcagaggttctgctggggcgcagcagaatacagcgcaagcctgcagttgttggcagttgacctgttttatggcaggcacacaaagaaaccctcagatggctcagtatggacctcaacagacaggaccatccatgtcgcctcatccttctcctgggggccagatgcatgctggaatcagtagctttcagcagagtaactcaagtgggacttacggtccacagatgagccagtatggaccacaagatggggggggtgatgttagtgatgttgttatggccattgatgacgatggcagctgtcatttgttaggcagtgcggtgcctggcgctgtacttgttactttcaacctcttactcattatcgtagtcactttacagatgacagaaccacagttcagagagtacattactggggatcctctagagtcgacctgcaggcatgcaagcttggcgctggccgtcgttttacatcaggaaacagctatgaccatgattacggattcactggccgtcgttccacattcaggaaacagctatgaccactggccgtcgttttacaagcaggaaacagctatgaccactggccgtcgttttacaccaggaaacagctgtgaccttgattacgaattcgagctcggaaacagctatgacctactggccgtcgttttacatcaggaaacagctatgcccactggccgtcgtttaacaggtcaggaaacag

SEQ ID NO: 3331 - DNA, 5402 bp, Homo sapiens
  SIMILAR (2285)..(2902): 381254mologous to Homo sapiens SWI1Lbeta protein,accession number AF259792,Smith-Waterman Score=258.
ccttctcctgggggccagatgcatgctggaatcagtagctttcagcagagtaactcaagtgggacttacggtccacagatgagccagtatggaccacaaggtaactactccagacccccagcgtatagtggggtgcccagtgcaagctacagcggcccagggcccggtatgggtatcagtgccaacaaccagatgcatggacaagggccaagccagccatgtggtgctgtgcccctgggacgaatgccatcagctgggatgcagaacagaccatttcctggaaatatgagcagcatgacccccagttctcctggcatgtctcagcagggagggccaggaatggggccgccaatgccaactgtgaaccgtaaggcacaggaggcagccgcagcagtgatgcaggctgctgcgaactcagcacaaagcaggcaaggcagtttccccggcatgaaccagagtggacttatggcttccagctctccctacagccagcccatgaacaacagctctagcctgatgaacacgcaggcgccgccctacagcatggcgcccgccatggtgaacagctcggcagcatctgtgggtcttgcagatatgatgtctcctggtgaatccaaactgcccctgcctctcaaagcagacggcaaagaagaaggcactccacagcccgagagcaagtcaaaggatagctacagctctcagggtatttctcagcccccaaccccaggcaacctgccagtcccttccccaatgtcccccagctctgctagcatctcctcatttcatggagatgaaagtgatagcattagcagcccaggctggccaaagactccatcaagccctaagtccagctcctccaccactactggggagaagatcacgaaggtgtacgagctggggaatgagccagagagaaagctctgggtcgaccgatacctcaccttcatggaagagagaggctctcctgtctcaagtctgcctgccgtgggcaagaagcccctggacctgttccgactctacgtctgcgtcaaagagatcgggggtttggcccaggttaataaaaacaagaagtggcgtgagctggcaaccaacctaaacgttggcacctcaagcagtgcagcgagctccctgaaaaagcagtatattcagtacctgtttgcctttgagtgcaagatcgaacgtggggaggagcccccgccggaagtcttcagcaccggggacaccaaaaagcagcccaagctccagccgccatctcctgctaactcgggatccttgcaaggcccacagaccccccagtcaactggcagcaattccatggcagaggttccaggtgacctgaagccacctaccccagcctccacccctcacggccagatgactccaatgcaaggtggaagaagcagtacaatcagtgtgcacgacccattctcagatgtgagtgattcatccttcccgaaacggaactccatgactccaaacgccccctaccagcagggcatgagcatgcccgatgtgatgggcaggatgccctatgagcccaacaaggacccctttgggggaatgagaaaagtgcctggaagcagcgagccctttatgacgcaaggacagatgcccaacagcagcatgcaggacatgtacaaccaaagtccctccggagcaatgtctaacctgggcatggggcagcgccagcagtttccctatggagccagttacgaccgaaggcatgaaccttatgggcagcagtatccaggccaaggccctccctcgggacagccgccgtatggagggcaccagcccggcctgtacccacagcagccgaattacaaacgccatatggacggcatgtacgggcccccagccaagcgccacgagggcgacatgtacaacatgcagtacagcagccagcagcaggagatgtacaaccagtatggaggctcctactcgggcccggaccgcaggcccatccagggccagtacccgtatccctacagcagggagaggatgcagggcccggggcagatccagacacacggaatcccgcttcagatgatgggcggcccgctgcagtcgtcctccagtgaggggcctcagcagaatatgtgggcagcacgcaatgatatgccttatccctaccagaacaggcagggccctggcggccctacacaggcgcccccttacccaggcatgaaccgcacagacgatatgatggtacccgatcagaggataaatcatgagagccagtggccttctcacgtcagccagcgtcagccttatatgtcgtcctcagcctccatgcagcccatcacacgcccaccacagccgtcctaccagacgccaccgtcactgccaaatcacatctccagggcgcccagcccagcgtccttccagcgctccctggagaaccgcatgtctccaagcaagtctccttttctgccgtctatgaagatgcagaaggtcatgcccacggtccccacatcccaggtcaccgggccaccaccccaaccacccccaatcagaagggagatcacctttcctcctggctcagtagaagcatcacaaccagtcttgaaacaaaggcgaaagattacctccgaaagatatcgttactcctgaggcgtggcgtgtgatgatgtcccttaaatcaggtcttttggctgagagtacgtgggctttggacactattaatattcttctgtatgatgacagcactgttgctactttcgaatctctcccagttgtctggatttctcgaacttttagtcgagtactttagaaaatgcctgattgacatttttggaattcttatggaatatgaagtgggagaccccagccaaaaagcacttgatcacaacgcagtcataggaaggatgacagccagtccttggcagacgattctgggaaagcaaggaggaagatgctgaatgtattgatgccgccgaggaagacgaggaggatgaggaggaagacagcgagaagacagaaagcgatgaaaagagcagcgtcgctctgactgccccggacgccgctgcagacccaaaggagaagcccaagcaagccagtaagttcgacaagctgccaataaagatagtcaaaaagaacaacctgtttgttgttgaccgatctgacaagttggggcgtgtgcaggagttcaatagtggccttctgcactggcagctcggcgggggtgacaccaccgagcacattcagactcactttgagagcaagatggaaattcctcctcgcaggcgcccacctccccccttaagctccgcaggtagaaagaaagagcaagaaggcaaaggcgactctgaagagcagcaagagaaaagcatcatagcaaccatcgatgacgtcctctctgctcggccaggggcattgcctgaagacgcaaaccctgggccccagaccgaaaagcagtaagttttcccttttggtatccagcaaagccaaaagtcaccggaacatcaagctgctggaggaacgagcccaggagccgagacgagactcctctgtgtaccatcgcgcactggcaggactcgctggctaagcgatgcatctgtgtgtccaatattgttccgtagcttgtcattcgtgcctggcaatgatgccgaaatgtccaaacatccaggcctggtgctgatcctggggaagctgattcttcttcaccacgagcatccagagagaaagcgagcaccgcatacctatgagaaagaggaggatgaggacaagggggtggcctgcagcaaagatgagtggtggtgggactgcctcgaggtcttgagggataacacgttggtcacgttggccaacatttccgggcagctagacttgtctgcttacacggaaagcatctgcttgccaacttttggatggcttgctgcactggatggtgtgcccgtctgcagaggcacaagatccctttccaactgtgggacccaactcggtcctgtcgcctcagagacttgtgctggagaccctctgtaaactcagtatccaggacaataatgtggacctgatcttggccactcctccatttagtcgtcaggagaaattctatgctacattagttaggtacgttgggggatcgcaaaaacccagtctgtcgagaaatgtccatggcgctttttatcgaaccttgcccaagggggaccgcacttagcagcaagggccatagctgtgcagaaaggaagcattggaaacttgataagcttcctagaggatggggtcacgatggcccagtaccagcagagccagcacaacctcatgcacatgcagcccccgcccctggaaccacctagcgtagacatgatgtgcagggccggccaaggctttgcctagccatgggccagagtggaccgaaaaccgctcggaattcctttttgcacgagggccggttgcctggatatctcgatatcagctgtcctgaactctctggttgcatctgtcatctgtgatgtactgtttcaggattgggcaggttatgacataaagtgagaaggcaagcatgtgtgagtgaagattagagggtcacatataacctggctggtttctgttcttggttatccagcgtaggaagaaggaaaagaaaatctttgctcctctgccccattcactatttaccaattgggaattaaagaaataattaatttgaacagttatgaaattaatatttgctgtctgtgtgtataagtacatcctttggggtttttttttttctcttttttttaaccaaagttgctgtctagtgcattcaaaggtcactttttgttcttcacagatctttttaatgttctttcccatgttgtattgcatttttggggggaaggcaaattgactttaaaaggaaaaaagttgtgggcaaaaggatggctaaggtggcgaaaattttcaccacactgagttcaaaaaggtggaaaattatcccttttcccatggcgttttactcctcagagaatgaaaaaaactgcatcccatcacccaaagttctgtgcaatagaaatttctacagatacaggtataggggctcaaggaggtatgtcggtcagtagtcaaaactatgaaatgatactggtttctccacaggaatatggttccattaggctggggagcaaaaacaatgttttttaaggattgagaatacatacctgacaacgatccgggaaactgctcctcaccactcccgttcatgcctgctgtcgggcgttttgaccttccacgtggacagttcttcacaattcctttcatcattttttaaatattttttttactgcctatgggctgtgatgtatatagaagttgtacattaaacataccctcatttttttcttttcttttttttttttttttttagaacaaaggtttagtttttttttcatgagggggaaactacaaagggagggtaa

SEQ ID NO: 3332 - DNA, 183 bp, Homo sapiens
  SIMILAR (179)..(147): 631254mologous to Takifugu rubripes reverse transcriptase- like protein,accession number AF086712,Smith-Waterman Score=34.
atgagtgtaaaagcatctagccaaggtggtagcagtggaattagtgaaaagtggtcgaattcaggatatattttgaaggtagaacagaccgaatatgctgatgaattagttgtggggtgtgagaaaataaataggcgtcaaagacgagagccaaagttttggcctgagcaacttgaaggatag

SEQ ID NO: 3333 - DNA, 183 bp, Homo sapiens; identical to SEQ ID NO: 3332
  SIMILAR (179)..(147): 631254mologous to Takifugu rubripes reverse transcriptase- like protein,accession number AF086712,Smith-Waterman Score=34.

SEQ ID NO: 3334 - DNA, 283 bp, Homo sapiens
  SIMILAR (55)..(2): 381254mologous to Homo sapiens Human secreted protein, SEQ ID NO: 5576,accession number G01495,Smith-Waterman Score=41.
ttaggagacatttttcccagtatggaacctcagtccagagcccatgatcatggggtcaggatcatcactgtctttcacctccatattgtgtcttactaggtcttcaggggcaataacgtgcatggagctatcatctatggcaataatgctttcttctggaagatctgctgaagagaccttcccccacttcagactggaactttccctcttctggagttgttgctttccaccatacaagatgtcttgtgcttctgcatgttggcatccaggtgtattattattc

SEQ ID NO: 3335 - DNA, 954 bp, Homo sapiens
  SIMILAR (334)..(465): 411254mologous to Homo sapiens Amino acid sequence of a fragment of human collagen type 1 protein,accession number Y84546,Smith-Waterman Score=79.
atgaagaactccttcaagtcagcaagaagacaggcaagccgagaggaggacgggcaaacgacctcaacagacactttacagaagagatatccaggccagggagcagcccttctgctgctgctgctgctgtttacggctgcttcaataaaaactgctaactccattggctcgcccttaccttctttcttgggtgaagccacaaaccctcctggggcagcatataatcaattaaaatgcaaacataagttaccaaaagacatgtacaagaatgttcctagcagcctattcataacagccagaactgggagtactccggatgttaccaagaggagaatgggggcttgcggatccagctctgtgcccggcccccctcttgcacacatccggaaagcagggcctccctcctctcctattcacccttctttgaagctggacccctgggcacggggcccaccaggagcaccgcgagaggtggaaacgcagatgaaagagcagctctggaatctcccaggcctgcgggcacgcacatccccgctccgcggacaaatggcagaaagacaactggatgcagcagaaaacacagcatcgttggcccaggtctccatggcagctaggaggggaaagagagccgctccccctccagccctcacctaccacggagcctgcaaaatgagtgtcgtatttctgtttacagatgaggaaacagagaagttaggtgccttgttcaatgccctagaggtagaatttagctgtcagcgccaggcgaatcgggtccctgtggcgggttccttctccccagccccctgctcagctgtcaggatggaggctagatgtcacctctgccgtgggccccccagaggggaggtggttaatcagggtgatgatgatgaagatggcaatgacccctttggggtgcacagccctttactactgacacctcctattcctgcttga

SEQ ID NO: 3336 - DNA, 384 bp, Homo sapiens
  SIMILAR (278)..(331): 381254mologous to Homo sapiens Human secreted protein fragment encoded from gene 18,accession number Y45321,Smith- Waterman Score=41.
atgcactctttgaatctcagctttgctttgcagctgcatgactggaagctgctttttattgacattggtgttggtgatgtgattccagatttacactcagtttactccctgctcttgctggccctcagcactgtgcttacccaactgtgccaacagccccggggaggctcagacttcctcctcgccgaagcccaaggctgcgacgtgtctggaatgttccgtgtcacagagactgtcaagaatctgacagctctgctaacgaaagctgcagaccctcggttcggttccatcgccctttctctgggctggtgtgtgaagctccgaatctgtgacctcactagaatcagtgtgcgcaaggggatcagcaatgcagggcaaaggtga

SEQ ID NO: 3337 - DNA, 1458 bp, Homo sapiens
  SIMILAR (416)..(363): 501254mologous to Candida glabrata metallothionein- I,accession number J05133,Smith-Waterman Score=48.
ttttttttttgagcattcaacagttttatttgctgttggggaatgaagggaacaggaaggaatgacatggaggggaaggaagctccttactcccgtcactaaggtagggcacgtggtacagagtggcttgtgtgaagcggccgccccaagctgagcctgcagctgataaccacagacaccctggcagggagatctgtgatcggaacaacaaaatgccaaggaaaacaaaacccatttgcatttggtatgaatttcctgtttaaataggttttattagcgggcaagaaaggaaaagtggtgacttcaaggtgtcattgggctggcaagggctcgggcccctggaggggtacagtgggggctgggccacactccctgctgcccgtttcctcctgggggcagctgcagcaacctcttggcttgtctgcttcctgtctcttacctaacagtcaaggctcactagaggagtcccgggccccctaggctggctccgggggaaaaggaatcaggcagaaccggctagtattatcccaaggagtgtggctgggcggagcttccccacagatctctgagtgtggggaggactggagaggcctcagggcagtcctgagagggggcagggcttacaaggggctgaagctgccctctgtggaggaggtcaaagggcaaaacctcagagccagtctactgcctggccttctcgcttcacaggctcagacttcctcctcgccgaagcacaaggctgcgacgtgtctggaatgttccgtgtcacagaggtgcctctggcagtgacctgcatctctcaccctcctccacttcctttgcctccgaaaagctcatgtcatggacgtgcaaaaggagacctcctgataaaatgccttctcagccccgactcctcacaaataaattaaaacccacaaaactgtccattccacaaatccacaggccaggagacagtttaaaatgaaaatgcatctttaaaaagtaatggaccactaacttcatgggctcacctcataaatgctaaaaaccaaacaaatcaccccaaatccaagtaaattagcctgattttatcacacaggaaaggactcaggcttctctccccacgtctgggctggcggcctgtcatccatcggacgtccctccccccaccccactccccagagcttggcaggaaattcgggggcagatgggcagtggggagctctctagaccattctcagataccacaggacctgcttctcagaaaggctctccccctgtaggcactgaccaggaaggtggatggcttatcagagatgcaaggtgacagaccccatgtgaggaaggccaagggcattttgtagttcaggcgatggaggcaccttgaatattttctcaattttgctttataaacagcaagtgccctaagtaccagttgatctagctttcgatcagccaaagaggccacattaatcataa

SEQ ID NO: 3338 - DNA, 3438 bp, Homo sapiens
  SIMILAR (2751)..(2191): 381254mologous to Escherichia coli O157:H7 thiamin- monophosphate kinase,accession number AE005221,Smith-Waterman Score =183.
atgcccgatgcgacgctgtcgcgtcttacgtgcctacaaatagtccgaaccgtaggccggataaggcgtttacgccgatccggcaattggtgcatgatgcctgatgcgacgctgtcgcgtcttatctgcctacaaatagtccgaaccgtaggccggataaggcgtttacgccgcaccggcaattggtgcatgatgcctgatgcgacgctggcgcgtcttatcagcctacattggtgccggatcggtagaccggataaggcgttcacgccgcatcggcaagtggttaaacccgctcaaacaccgtcgcaataccctgacccagccgatacacatcgtcgccagaccaaactgaacgtctttgcgttccatcaattcagcagcgtgaaagccccgcttttttcgcgccagtttcgaggccggaaccgggccgtaacccataatcgatgggtccaaccaacgaccgccatcgaacgcacacgagcgcgcggcttaagacctattcatgggcgcggctttcactcatcaccagcatggcagctgcgccatcgaaagtgcagaagatgtgcccgccgttaccataccgtttactggatcaaagccggacgcagcgtggcgagggcttccacggtggtttccgggcgaatcattcgtcaaagtcttccggaagaacgatcgatcagcctgggtcctgtaaagacggatgaaccgcgagccagacacaagccaccgtccatggggcggcgtacatccgggctgttgttcgggctggttcgggcgtctggtctgacaataatcgacggcagtacagaggcagacatgcggtggactgactttcagcaaatggaagtaattttcactcatctactcgttgtgattgttcataagtggctggttgcccttgcacggccgcagcttgctgctgtaggtcgatctagaggatcccctgggcgtgggatagcggcgattaagaatgcgaaaacgatgtttgctgcgacgcaaacgacagcgctgagaagaacaccgacattgccagctttaaatactgagcaattgctcatagagcgcatccagttccttcaacccatcaaggaaaatgcccgccgtgctgccagtgatttgtcagcaatttcgctgcccagcgctcgacgatatcggaggcctgttcaagcaaatggacaaacggcggataatcaggctacccaccagcttaaacagcagactacccagcgcgaccggcgggctgcggcattggcggcactgttgttgagcatgccagcagaccgaaccgaggttagcaccaatcaccagacagagcgccacggggaaggagaaatgcctgcggcggtcagagtcgcgagccggtgcgagggctaccagatcctgagcgacaaagaggtcaccagcatggtggtggcattactgctctgtaccagtgcgcaaggaagttctgagcaccgccctcccaacccaagacctctgcctggtatctccaggaggcccttgatcctcaagacagagcagctggaccaacaactcagcacagcagctgcccccagtgcatctacggaggctgcaggtccccgcagggccccagattcccaggccccacagaggcctgagcccactagaaatgatgtgcctcccagttcctccgggaggaggctggcagaaggattgggaaccagccgtggggacctatatctgctgcagggcgtgggcgtggagagaaggccagcaggctccctgccccccagcccttcccagctgaggcttctctacagtctcagcatgtttccctacctccaggtgggccatacttaccctgtgaccacatttctcgcgtgtggccggggtcgcgctttaccggtgtcggaccaccgcggctgggagcgccccgtggcaacaattcgccgggcaatctggcccttcacgagaggacgcacgttggcccaggcaccactcacatccccccgggtgttccccctattttcccacgcaccatcacttcagctaggctttcccccaatcaacaaagcgttctgtcaaagtaccatgactccacataagacagaaaacggcagcaatgccaggtcaatacgtgcgccgcagtcgcgggctttcacgatatgcccgagatcggaaatcaaaccgtcagagagatcgtggctgaatttgccagatcgcgcagtgcctgcccctgtaaaatacgcgggatggacggagatgacgtttgatcaagtagtccgcatctttagcatcggaacctgcaaacggttttgcaaaatcgccagcccggcggcgctatcgcccgtgtaccggtcacatagatccagtcacccggtttcgccccagagcgcccgtggatacccaacgtcattgatatggcccacgcgtggtatcgccgccaatgagttgcatatcgtaataattggaagatcaaacaaactgtcgctgaaggactcaagccacgcttcgtctactccggttaatgccagcgtcagccaggccggatcggcccccatcgtgccagatcgcttaggttcaccgccagtgctttataagccagatcagcagatcgatatcagggaggaaatggttacccgccaccagcgtatcagtgctatcgccagggtctgtttctcggggatattgagaagtgcgcaatcgtcgagatgcccagttcgacatcaagacgagaacttcttacacggtcaaaataagggcaatcagggagaactcgccacatgccatacgttatgcctcagcaggaaaaaagaaaaggccggcgatcatggaacggtcttccgtgaatctaccgcctggatatcactttttggcgaatcacaggtgctgctttatcgatacgccgttgacgaacttatggctgtcttctgcgccgaacgatttcgccgttcgatcgcttcgttaatggccactttgtatggcacatcgctacgtttgacagttcgtacagcgcaatgcgcagtactgctttttctacctgtcccattcttccagcaggcgggacaggtatggcttcatcagtccgtcgaggtatcggtattagtcgccaccccggccagcagctcacggaagtacaggacgtcacgtcttttacatcctgttcagccaggaactggtattcaacatcagcgagtcgttctgggacaactgccaggagtagagcgcctggacggcacactcagagcgcggcgacgagcagcaggtttcacggatttccccttactaatttcggccttgatggctttcaatacattaatcatttcaagcgcggtcagtgcacttctgcacctttgttgccagctttggtgccagcacgttcgatcgcttgtcaatgctttcagtggtcagaaccccaaaagcaaccggaatttcgctgtctggcaacatgcgcgggaacaaaaatatgtagtttag

SEQ ID NO: 3339 - DNA, 1229 bp, Homo sapiens
  SIMILAR (29)..(346): 701254mologous to Homo sapiens Human PRO873 protein sequence,accession number Y41723,Smith-Waterman Score=382.
gaggacggctaccatgccatccacagtgttgccatccacagtgttgccatcactcctgcccacaacaggagctggctggagcatgaggtggattctgtgctggagcctcaccctttgcctgatggcgcagacggccttgggtgccttgcacaccaaaaggcctcaagtggtcaccaaatatggaaccctgcaaggaaaacagatgcatgtggggaagacacccatccaagtctttttaggagtccccttctccagacctcctttaggtatcctcaggtttgcacctccagaacccccggagccctggaaaggaatcagagatgctaccacctacccgcctgggtatatttgaaggctcccatgattctgaatggagtctgtgctatctggaaaggctggattgatctccaaagactgcatggtatgggctgtctggagtttgatgaggagcgagcccagtcctggccctggtaggcccatccacaatgctaggagggaaggcgacctagctgcagggagttgggaaacgtggccttgggagcagatggagactctcctggcagcatctatacccgaagatggaagctgcggtcccaaagggtaccggccccgccacctcaggaagccgaagatgccgagcctgtgctgcagaaacaccagcaccactttctcgcgggcggccaagtcagagccctcgtacgaagaagcagcgcccacgatgaaggcgcctcccgggaaccagaccatcacctggacgaagaaggccgggatctgagcggggcggaagtcgaagccagcatcgaaacgctcgtaattacatcgactggacaccgttctttatgacctggtcgctggccggaagtatccgcgcattctggaagatgaagtgggcatccgtccggcaccgggctatccggcctgcccggaacatacggaaaaagccaccatctgggagctgctggaagtggaaaaacacactggcatgaaactcacagaatctttcgccatgtgggcccgggcatccggttccggggttgtacttcagccacccggacagcaagtactacgctgtagcacaaattcagcgcgatcaggttgaagattatgcccgcccggagcgtcgaaaaaaagccgctcgccttttgcgcggggatcggcgttacgcactggtacagagcagtaatgccaccaccatgctggtgacctcgtttgcgctcaggatctggtag

SEQ ID NO: 3340 - DNA, 1512 bp, Homo sapiens
atgaagaaatccatatgccctgaagttaccatcctagagacatcatttggagagactacagtgcacagaagtagagaggcccagctgtgcctgtccccaactgatggagtcttctcagtgtcagtcaccagacatttaactgtaaaacagcctcaggcaggtccttcaggaggcattccagaagaagaaggcattgttatcataggagatgacagctccatgcatgttattgctcctgaagaccttccagggggacaagaggtggaggtggaagatagtgatattgatgatcctgaccccattattcagcagatagggccccaggaggaggcaggtaaatggtattttcaacaattagaaaactgctataatgatccagggaaattggatgagggcctgaactactgtaatggtattaagattggaaggaaatacacacttttgagtcacagtttggtgttagaattgataggtcttggtgatccattaggactcacacttcatggcagtgggcaccctctggcccagggcaggtccagaaatgccatccaagagtcaagacctggaatcagggacctaagatcccacttggtgcttaccccactgtggcccatgctgatacctaagatcacctgggtgtcactgctgcttgttcaggtcccaaaggctcttcggttagcaggtgataaatactgccagcactgggccctttccttcaaggcagcaggttcccttctggcccaggtggctgagctggtctccaagaggcaagacaaagccctctctacactttctgttcctctcctcaagcagaagaaaggaataaagaggtctcttttggagccgctgtgcaacctggtgttagaggagggtgcccagatatactacctgcaccacatcgctgctgctgcggttggggaaaagaacaaatctgtagatagtgctgaaaataagagtgagtgtgtcatcaacaaacagcagcttcctaaactatgtggaaatctgaaagcaaatgggttcatatcgatgtacaagccacagaggaactttatcctggaaaatgtacctgagcaagttacaccaaagactgttctggaagctaaagagaaaaagaaggtaaagccttactcaaataatattcatgttcttgatgccgctgcagccattcccattgctgtatccaattcaagtattcaccaggtcctcaatttacttgggatttccacaataaagacgtccttgactcatcctgaagtctttggtgaggggtcagttactgtggtagcccacatcctttgctatgcgattttgcagtttccctatcaagatgtgaagtgttttccttgcttcttgattctgaattcaggtgtcattgctttggccaatgggatgtcagaaaatgtgatgcagcagagacttgaagatgcactgcagagactagatttattcttttctgctgcagcaattgccatgaagttgcagtcccagcctagcctgctggccccaggatga

SEQ ID NO: 3341 - DNA, 354 bp, Homo sapiens
cagataccctagtgtactgtgcttcattaatgggcttaagcagcctgaggcctgttggattttcggggtgccggctgacaagtcctagggctgggctggtgcaaggctgcattagcagttcagtgcctggagatgttttcttgggcttgattcctacttctcccccctcagtaaaggaatacttggatgttttactttgaaatgctgggcctcgccgccaggaggcaacaaagtcaggattccagctcagctccgacacctgtggcctggcttttaacagtttagagggaggctcacaattaagaataaatgcagaaaaacgtttgcagcggagataaagagtgttgtgtgaac

SEQ ID NO: 3342 - DNA, 323 bp, Homo sapiens
  SIMILAR (163)..(306): 391254mologous to Escherichia coli narX,accession number X15996,Smith-Waterman Score=67.
catttcaaagtaaaacatccaagtattcctttactgaggggggagaagtaggaatcaagcccaagaaaacatctccaggcactgaactgctaatgcagccttgcaccagcccagccctaggacttgtcagccggcaccccgaaaatccaacaggcctcaggctgcttaagcccattaatgaagcacagtacactagggtatctgctttggttgcaaaaagcaatctggctaaagggatttgggacatccggctggtgaatgtaggggaggtttcacctttagatgaggcaccagaaacgatgtgctccctggtagcatcctga

SEQ ID NO: 3343 - DNA, 2094 bp, Homo sapiens
  SIMILAR (1247)..(1363): 351254mologous to Gorilla gorilla atrophin-1,accession number AJ133271,Smith-Waterman Score=44.
atggtgaaaggtgaaggtgaaaagcccgtggtgaaaggtgaaggtgaaaagcccgtctcacatggcagcagacaagagaagagagtttgtgcagggaaactcccccttataaaaccatcagatctcatgagacttattcactaccacgagaacagcatggaaaagacctgcccccatgattcaattacctcccaccaagtccctcccacaacacataacagctttctagctttcaccagaccctggattcccagtaataatgcatccttcagaccctttaagcctctggactgtcttcaaataaaatactggaaattgcagaggtctgactccctctcatcccagcccaccctcctccaggccacctggaaggagggagtcggtgaaccatctcttttcctgctgctctctttagcaggccttcgaacttcactgcccttgcagacccaagttttccacattaccaagcccagcctggccacccaggcacacagatttgagaaaaagaggccgaaggaccgcacaataatatgccggcaacgagagccatcccccatccctgccccgatacctgcgccgctcccggcactgcggatgcaggccccctcctctacctgttcctactcccacacaagcctgcaatgctccccagcgccgcagaaccacctcaacatccttagcctgccttggaagagctggcctgtggctcccgtcagtctcctctccatatctcgtcctaagctcttgccaggagcagccacatcactgctgtcctccctccacaccccggccctcctggtcccctcttccggggatgccatctgctactcacccggtcaggtccccgctcaaggggacctctcccaggaagactcctcagactcgcctccagctgagcaggttctccctccttcctcaggttcacacaacactctttatctcggctgcaaacgtttttctgcatttattcttaattgtgagcctccctctaaactgttaaaagccaggccacaggtgtcggagctgagctggaatcctgactttgttgcctcctggcggcgaggcccagagatggtccctgctccactggaaggcaatcagccagcaagacgccacctccacccagtcatcctcacacggggcactcactgtggtcagaagagaaatgaaaggacagtgactcgaggccaaaccaaagtgcttttccaggatgcagtgttgatttgcaattttcccacaagcttaggccatacctcattcatccccagagtctctggggacagtcggaaacaggccttcccaggagggccacgagcttccgccagccccgttctccaggatggggccagaacagcacctgcccgtggtggtgctgcctttcactggggcctttgctgtggtcctgccttgccccttcctagtatcatcgtctgcctggcatttcaaagtaaaacatccaagtattcctttactgaggggggagaagtaggaatcaagcccaagaaaacatctccaggcactgaactgctaatgcagccttgcaccagcccagccctaggacttgtcagccggcaccccgaaaatccaacaggcctcaggctgcttaagcccattaatgaagcacagtacactaggcccctcacaacaccactcacaatgtgtctgctcatgcaggctgctctgcggacactccttggagaggctgggcctgccaaattcagtgaccatcccagggaatgttggctgtccctccccacaggaattcacccagtggcctcctgtccttgtgctcatggtaaatccaagccccggttcagcagcaggggacttcccttggcttctccaacaaagtccttcgcagttaggccccttctcagacaatcttggaagatggagaagcaagaaaagaatggagagggagaatggaagaggtggactcagaaatgccgcatttgtgggtggagctggggctgggctttggttgcaaaaagcaatctggctaaagggatttgggacatccggctggtgaatgtaggggaggttttacctttagatgaggcaccagaaacgatgtgctccctggtagcatcctga

SEQ ID NO: 3344 - DNA, 1572 bp, Homo sapiens
  SIMILAR (1013)..(1129): 351254mologous to Gorilla gorilla atrophin-1,accession number AJ133271,Smith-Waterman Score=44.
atggtgaaaggtgaaggtgaaaagcccgtggtgaaaggtgaaggtgaaaagcccgtctcacatggcagcagacaagagaagagagtttgtgcagggaaactcccccttataaaaccatcagatctcgccacctggaaggagggagtcggtgaaccatctcttttcctgctgctctctttagcaggccttcgaacttcactgcccttgcagacccaagttttccacattaccaagcccagcctggccacccaggcacacagatttgagaaaaagaggccgaaggaccgcacaataatatgccggcaacgagagccatcccccatccctgccccgatacctgcgccgctcccggcactgcggatgcaggccccctcctctacctgttcctactcccacacaagcctgcaatgctccccagcgccgcagaaccacctcaacatccttagcctgccttggaagagctggcctgtggctcccgtcagtctcctctccatatctcgtcctaagctcttgccaggagcagccacatcactgctgtcctccctccacaccccggccctcctggtcccctcttccggggatgccatctgctactcacccggtcaggtccccgctcaaggggacctctcccaggaagactcctcagactcgcctccagctgagcaggttctccctccttcctcaggttcacacaacactctttatctccgctgcaaacgtttttctgcatttattcttaattgtgagcctccctctaaactgttaaaagccaggccacaggtgtcggagctgagctggaatcctgactttgttgcctcctggcggcgaggcccagagatggtccctgctccactggaaggcaatcagccagcaagacgccacctccacccagtcatcctcacacggggcactcactgtggtcagaagagaaatgaaaggacagtgactcgaggccaaaccaaagtgcttttccaggatgcagtgttgatttgcaattttcccacaagcttaggccatacctcattcatccccagagtctctggggacagtcggaaacaggccttcccaggagggccacgagcttccgccagccccgttctccaggatggggccagaacagcacctgcccgtggtggtgctgcctttcactggggcctttgctgtggtcctgccttgccccttcctagtatcatcgtctgcctggcatttcaaagtaaaacatccaagtattcctttactgaggggggagaagtaggaatcaagcccaagaaaacatctccaggcactgaactgctaatgcagccttgcaccagcccagccctaggacttgtcagccggcaccccgaaaatccaacaggcctcaggctgcttaagcccattaatgaagcacagtacactaggcccctcacaacaccactcacaatgtgtctgctcatgcaggctgctctgcggacactccttggagaggctgggcctgccaaattcagtgaccatcccagggaatgttggctgtccctccccacaggaattcacccagtggcctcctgtccttgtgctcatggtaaatccaag

SEQ ID NO: 3345 - DNA, 702 bp, Homo sapiens
  SIMILAR (612)..(55): 291254mologous to Homo sapiens golgin-like protein,accession number AF266285,Smith-Waterman Score=262.
tcagccctggtcagggtggcaaagggtctgtttgtctttccccattagacagaggtcttgtcctgctaccctcattgtaaagggctgcattttctcctcctgctcccgtatcttctcttcctgctcccgtatcttctcctcctgcctccacatcttgtcctcctgctcccgtatcttctcttcctgctcatgcatcttctcctcctgcctccacatcttctcctcctgctcccttatcttcagctcctgctcacacatcttctcttcctgctcctgtatcttctcctcctgcctccacatcttctcctcttgttgctggttcaggaggttccacaactcgttctcttccacctgggcttggagctttgctgacacactctgtagctccttacccaggcggtcagcctccacctgcagctgctgatgatccctagaccatggccccagccggatggggctcccacaacccccggggctgcagctgctcgcctgtggcagcaggagctgggccctttccagcttccttttaaggtcctttacgttgagctggatctcagacttttcagattctacaagtcgaagtttttcttgtagttcggcatttttctccttcaactcctcatcggttatgctgtaccccccacctcccagcacaccacccactctaagggcccccagacctcccattccaccttcccccat

SEQ ID NO: 3346 - DNA, 231 bp, Homo sapiens
  SIMILAR (134)..(226): 701254mologous to Mus musculus Pro-Pol-dUTPase polyprotein,accession number Y12713,Smith-Waterman Score=127.
atccaatgctgcttgaggtatcagtggcggatagggatgctgtttaaaccttttggcaggcccccattggtgaatcacagcagggggctctaggattttggagcaaggcccttcaatcttctgcagataacaactctcctttcaaatcaccatgcaacctgaactgcctatcatgaactgggtgctttctgtcccatctagccataaaatgggtcatgcacagcagcattc

SEQ ID NO: 3347 - DNA, 404 bp, Homo sapiens
  SIMILAR (329)..(403): 441254mologous to Mus musculus Pro-Pol-dUTPase polyprotein,accession number Y12713,Smith-Waterman Score=51.
ctaaaattccaggaacttctacctcagtaaaatttctaggggtccagtagtgtgggacctgtcaagatattccttccaaggtgaaggataagttgctgcatttggcccctcctacaatcaagaaagaggcacaacgcctagtgggcctatttggattttggagccaacacattcctcatttgggtgagttactcaggcccatttatcgagtgacccgaaaggctgccagttttgagtggggtccggaacacgagaaggctctgcaacaggtccaggctgccctgcaagctgctctaccacttgggccatatgatccagcagatcagccactgtgcaacttaaactgcctgtcataaactgggtgcttttctgacccatctagccataaagtggtcatgcacagc

SEQ ID NO: 3348 - DNA, 1078 bp, Homo sapiens
  SIMILAR (958)..(1077): 721254mologous to Mus musculus Pro-Pol-dUTPase polyprotein,accession number Y12713,Smith-Waterman Score=159.
cctctgccagcgcctcttattggctgaacctaatgagaagccagggagcctgggaaatgtgatggctgtggcaagaatagaaattggaatctgtgagtattaccatgagaaaaccacagagaaagctctggacagccatggagtcttagctggatctacaataaaaggagtcagaagctttcagaggaatttggagctgaagttgccagcaacagagagggccacagctaacgcgatagagctgctcacagtgttagaccaggcctatgaaaactttgcaccgcagatcctccccagcactggcagccccacgtcccaggaaactgctcagttcaaggcaaaccagaacaaaccattggtcagaggaaaaggaagcccacatgaggccataagatatatttcagctgcccatcgagaatggaagccagcaatcctgacatcagccattaggtcattttgttctacctggctggtgttcacctccaagaactttcccaagcttgtgacccaacatggaagtacgatagcaggaaacgggcagagctcagatgagacccaagtccagggtgcagcctggaagtctgattccagaggaacaaagagacaaataccaacgtggattctggcagaggggaacaatgcaggtgcccaacttgacatcccaggcccaaccatccctgctcctaattgttccctgaaggtgccccagagctggagtaccacgcccagcatgccctcctcactagggaaggcctactggctcttggcctgttactgggccttggtggaaactgaacattggctatgggtcatcaagtcaccatgtaaacctgaactgcctgtcatgaactgggtgctttctgacccatctagccataaagtgggtggtgcacagcagcattccatcaacaaatggaagtggtatatacgtaatcgggctcgagcaggtcctgaaggcacaacattgcctctgaccaaggcactcactttatggctaaagaagtacagcaacgtgctcatgctcgtggaatttaccggtcttaccatgttccccgacatcctgaagcagctggaatga

SEQ ID NO: 3349 - DNA, 1419 bp, Homo sapiens
  SIMILAR (663)..(728): 771254mologous to Mus musculus Pro-Pol-dUTPase polyprotein,accession number Y12713,Smith-Waterman Score=89.
atggcacagtatcctattttggatttcctcaaagtggggcagttgttgggtaactgtgcattggggaaaggaaatgatcagacatttcggggattactggacactggctctgagctgactttgattccaggggacccaaaacatcattgcgatcctccagttaaatgtgcagccattgacttggcaaatgcctttttctccattcctgtccataaggcccaccagaagcaatttgccttcggctggcaaggccagcaatatacctttactgtcctacatcaagggtgtatgaactcactggctttgtgtcataatcttattcagagagaacttgattgctttttgactccagaagatatcacactggaccattacattgatgacattatgctgattggatccagtgagaaagaagtagcaaacacactggacttattgttctgggattacagacatgagccactgcgcctggccaactactccccttttgagagacagctcttggcctgttactgggctttggtggaaactgaatgtttgatgatgggtcatcaagtcaccatgcgacctgagctgcctatcatgaactgggtgcttgctgacccatctagacataaagtgggtaatgcacagcagcattggaagtgtgctgtgcacacttcatcaaatggaagtggtatatacgtgattgggctcaagcaggtcttgaagggacaagttgattatattggacctcttccatcatggaaagggcagaggtttgtcctccttggaatagacacttactctggatatgggtttgcctatcctgtgtgcaatgcttctgccaagactaccatccatggactcacggaatgccttatccactgttatggtattccacacagcattgcctctgacgaaggcactcactttatggctaaagaagtgcagcagtgggcatacgctcatggaattccgcggatcctctccctatattggcccagggcttcccggtatcaacagggacaccaggatttatttattctgcgaagtgatcttccgtcacaggtatttattcgcgataagctcatggagcggcgtaaccgtcgcacaggaaggacagagaaagcgcggatctgggaagtgacggacagaacggtcaggacctggattggggaggcggttgccgccgctgctgctgacggtgtgacgttctctgttccggtcacaccacatacgttccgccattcctatgcgatgcacatgctgtatgccggtataccgctgaaagttctgcaaagcctgatgggacataagtccatcagttcaacggaagtctacacgaaggtttttgcgctggatgtggctgcccggcaccgggtgcagtttgcgatgccggagtctgatgcggttgcgatgctgaaacaattatcctga

SEQ ID NO: 3350 - DNA, 755 bp, Homo sapiens
  SIMILAR (748)..(719): 501254mologous to Mus musculus Pro-Pol-dUTPase polyprotein,accession number Y12713,Smith-Waterman Score=39.
gactggcatccacaactgctccatcaacgagacctgcttcaacatccagggcggcttccgctgcctggccttcgagtgccctgagaactaccgccgctccgcagccacatgatcgtagggaactctgcatgaggccatcggtgcaggctggagaagagaaggcaagttggcaggagtggagaccacaggcatttgagccacttcctcatgtaacttaacttgtgccttcaggacctgctcaagcccgatcacgtatataccacttccatttgatgacggaatgctgctgttcatgaccaactttatggctagatgggtcagaaagcacccagttcatgataggcagttcaggtcatatggtgacttgatgacccagagtcaaacattcagtttccaccaaagcccagtaacaggccaagagctgtctctcaaaagaagagtagttatctgcagaagatggcagggccttgctccgaaagcctagagaccgccactgtgattcacctatgggggcctgccaaaggctgcagccagcatccttatctgccactgacacctcaagcaacattggatctgctgggtcatatggcccaagtggcagagcaacttgcacaacagcctggacctgtcatagagctttctcctgttttggaccccactcaaaactggcagcctttcaggtcactcaataaatgtgctggagtaacacactcaaacgaggaatgtgttgcctccaaaatccaataggaaaaaaa

SEQ ID NO: 3351 - DNA, 580 bp, Homo sapiens
  SIMILAR (1)..(153): 501254mologous to Mus musculus Pro-Pol-dUTPase polyprotein,accession number Y12713,Smith-Waterman Score=112.
caaatcaccatgcaacctgaactgcctatcatgaactgggtgcttttctgacccatctagccataaagtgggtcatgcacagcagcattccatcacaaatggatgtagtatatacataatcgggttcgagcagttcctgaagacacaagtaagccagaattcaaggtcgaggaatcaaggagtggaagtagaagtggcaccactcaccgtcacccctagtgatccattagcaaacgttttgcttcctgttcctgcaacattaccttctgctggcctagagatcttagttccagaggaaggaaggctgccaccaggagacacaacaatgatgccattaaactggaacctgagattgccacatggacactttgggctcctcctacctttaaatcaacaggctaagaagggagttgcagtgttgggtggggtgattgccctggactgtcaagatgaaatcagtctactactctacaagggagacctcaccgtcatggtagaagacaaggaagagcaaaaccacatcttacatggcagcaggcaaagagaacgagagccaagcaaaaccggaagccccttataa

SEQ ID NO: 3352 - DNA, 405 bp, Homo sapiens
  SIMILAR (1)..(216): 1001254mologous to Homo sapiens Human secreted protein, SEQ ID NO: 8177,accession number G04096,Smith-Waterman Score=355.
atggaagacacgccgttggtgatatcgaagcagaagacggaggtggtgtgcggggtccccacccaggtggtgtgtacggccttcagcagtcacatcctggtggtggtgacccagtttgggaagatgggcaccctggtctccctggagcccagcagcgtggccagtgacgtcagcaagcctgtgctcaccacaaaagtccttctggggcaggatgagggtgacttcctgggccccacaaagtctggaaacccagaccccaagtctccaggccctgcaccctgcctggtgggcagcagtcggaatgaaactcctggtgccatgggagctccctccaggaacgggagtcctcccacggcgggattaggtgtgggagatgggaccggcagcccctctgaggccgtctga

SEQ ID NO: 3353 - DNA, 420 bp, Homo sapiens
  SIMILAR (141)..(290): 701254mologous to Homo sapiens dJ437M21.1 (novel protein),accession number AL049758,Smith-Waterman Score=184.
  misc_feature (1)...(420): n = a,t,c or g
gacaccatagtgtctgctcctgtctcatgggctagacctagatatgtgactgccattaacttcaaggaggcatcccccacatctgtggaagtgagagagcccaggacgagtgtcaacaaggccctccaaagtcgctgtagtactcttgctcctacagttactttgacgagccagtggagttaaggaacagttctttctttaggtggaatcacagttcagattcctattggaaaaaaaagtccagcaaagatactgaaccagttctgaaacccccaggttattcagccaggtatgaatgcaaaactgtggggtcgtcctagtgaatccaggcatttctccgaaaaaattggtgatatcatgacgacataaaaacccttgtaaggnnnnnnnnnnnnnnnnnnnnnnnnnnnnnnnnnnncc

SEQ ID NO: 3354 - DNA, 464 bp, Homo sapiens
  SIMILAR (163)..(462): 571254mologous to Homo sapiens dJ437M21.1 (novel protein),accession number AL049758,Smith-Waterman Score=253.
cacttgaaaggccttggaaatgacacacctcgtgtctgctcctgtctcattggctagacctagttatgtgactgccattaacttcaaggaggcatcccccacatctgtggaagtgagagagcccaggacgagtgtcaacaaggacctccaaagtcactgttgtactcttgctcctacagttactttgacgagccagtggagttaaggagcagttctttctctagctgggatgacagttcagattcctattatgaaacacatttgcttcacctcaaattagtttaacctaatttggctgtttttaattgcagacctactgctcgccgcaagccagattatgagccagttgaaaatacagatgaggcccagaagactttttgcaaaactgcccacaatctttggagcctaacatttccttttccttgtcttctctagtatgagaccagggcccgcctagagaggct

SEQ ID NO: 3355 - DNA, 1190 bp, Homo sapiens
  SIMILAR (18)..(548): 971254mologous to Homo sapiens alkyl- dihydroxyacetonephosphate synthase precursor,accession number Y09443,Smith-Waterman Score=911.
ggcacgagcggcacgaggcgggcgcgagctacgggtctgcagcggaccgggaccgggacccggacccggaccgcgccgggcggaggctgcgggttctctctggccatctgctgggccggccccgggaggctctgagtaccaatgagtgcaaagcgcggagagccgcgtcggcggccacggcagcgcccacggccactcccgccgcgcaggagtcgggcaccatcccaaagaagcggcaagaagttatgaaatggaatggatggggatataatgattctaaattcatcttcaataagaagggccaaattgaattgactgggaaaaggtaccctcttagtggcatgggtttaccaacatttaaagaatggatccaaaatacccttggagtaaatgtggagcataaaactacctctaaagcatccttaaatcctagtgatacacctccttctgttgtaaatgaagattttcttcatgaccttaaagaaactaatatttcatattcacaagaggcagatgatcgagtatttagagctcatgcatgccatgatgatgtagttaagattgtgaatctagcttgcaaatataatctttgtatcataccaattggtgaaagcaataacatcaacatcaacaaaaaggacatcaacacaaaaaccccatccaaaggtcatcagcatcaaagatcaaaggtacataaatccatgaagatgaggaaaaaccagcacaaaaatgctgaaaattccaaaaacaagaatgcctcttctcctccaaaggatcacaactccttgccagcaagggaacaaaactggatggagaaggagtttgatgaattgacagaagtaggcttcagaaggtgcataataacaaactcctccgcgctaaaggagcatgttctaacccaatgcaagcaagctaagaaccttgataaaaggttacaggaactgctaactagagtaaccagtttagagaacataaatgacctgatggaactgaaaaacacagcacgagaactttgtgaagcatacacaggtatcaatacccgaatcaatcaagcagaagataggatatcagagactgaagatcaacttaatgaaataaagcatgaagacaagattagagaaaaaagaatgaaaaggaatgaacaaagcctccaagaaatatggaactatgtggaaagaccaaacctatga

SEQ ID NO: 3356 - DNA, 870 bp, Homo sapiens
  SIMILAR (32)..(547): 931254mologous to Homo sapiens alkyl- dihydroxyacetonephosphate synthase precursor,accession number Y09443,Smith-Waterman Score=839.
ccgggtcgacccacgcgtccgaatggatccaaatacccttggagtaaatgtggagcataaaactacctctaaagcatccttaaatcctagggatacacctccttctgttgtaaatgaagattttcttcatgaccttaaagaaactaatatttcatattcacaagaggcagatgatcgagtatttagagctcatggtcattgtcttcatgagatatttttgctcacggaaggaatgtttgagcgaattcctgatatagttttatggccaacatgccatgatgatgtagttaagattgtgaatctagcttgcaaatataatctttgtatcataccaattggtggaggaacaagtgtttcatatggcctgatgtgtcctgcagatgagacaagaacaattatttctttggacacttcacaaatgaatcgaattctctgggttgatgagaacaatttgacagctcatgtataggctggcataacaggaaaggagttggaaagacagcttaaagaaagtgggttattgtacaggtccatgaacccagattcccctggagttccagtactgtaggaggatgggtatctactcgcgcatcaggcatgaagaagaatatctatggcaatatcgaggacctggagattgtgcatttttctgacaatgatttgtcctgtatagaattagataggctgattgaaatcgttctaccaagtagtggaattccactcttagatggatactcaacagaaattcacatgcctgtacacctagagacatctacaacaatgtgcatagtaacgcctatccatagtagtatgaaactggaaacacttcgaatgtccatgtctattaattgtcgaaaagataaactctga

SEQ ID NO: 3357 - DNA, 894 bp, Homo sapiens; identical to SEQ ID NO: 945
  SIMILAR (744)..(887): 451254mologous to Homo sapiens hnRNPcore protein A1,accession number X79536,Smith-Waterman Score=91.

SEQ ID NO: 3358 - DNA, 441 bp, Homo sapiens
  SIMILAR (147)..(188): 851254mologous to Homo sapiens hnRNPcore protein A1,accession number X79536,Smith-Waterman Score=67.
tgacggtatggaaaaggtggatacagccatgaatgcaaggccgcacaaggtggatggaagatttgtggaaccaaagacagctgtttcaagagaagattctcaaagaccaggtgcccacttaactgtgataaagatgttaaagaagaactgaagaacataaactaagagattatattgaacagtatgggtggaggaaacttcagtggttgtgctggctttggtggcagaagtggtggtggtagatagggtggcagtgggaatggctataacagatttgataatgatggaagcaattttggaggtggtggaagctacaatgattttggcaattacaacgatcggtcttcaaattttggacccataaagggaggaaactttggaggcagaagctctggtccctatggtggtggaagccaatactttgccaaaccatgaaaccaa

SEQ ID NO: 3359 - DNA, 603 bp, Homo sapiens
  SIMILAR (264)..(401): 951254mologous to Homo sapiens hnRNPcore protein A1,accession number X79536,Smith-Waterman Score=242.
cttaccacttgctgcatttacaccctctgcacctacatccactgcacctacaccctctgcacctacattcactgcacctacaccttctgcacttaccacttgctgcacttacatcctctgcacctacatccactgcatctacaccctctgcacctacattcactgcacctacaccctctgcacctacaccttctgcatctacatccactgtacctacaccctctgcacctacattcactgcacctacaccctctgcacctacaccttctgcgggaggaaattttggaggcagaagctctggcccctatggcggtggaggccaatactttgcaaaaccacgaaaccaaggtggctatggcggttccagcagcagcagtagctatggcagtggcagaagattttaattagggaggagtctgctactagtcttatcagctcttaaaaacagaaactcatctgtccaagttcgtggcagaaaggaacgtccttgtgaagacctttatctgagccactgtacttcgttatcactgccatgcagtttacatgagctgttctgcagctcaaattccattttgtgaatgggttttttttttttaataaact

SEQ ID NO: 3360 - DNA, 1134 bp, Homo sapiens
  SIMILAR (2)..(700): 781254mologous to Homo sapiens hnRNPcore protein A1,accession number X79536,Smith-Waterman Score=913.
tatgaatgcaaggccacacaaggtggatggaagagttgtggaaccaaagagagctgtctccagagaagattctcaaagaccaggtgcccacttaactgtgaaaaagatatttgttggtggcattaaagaagacactgaagaacatcacctaagagattattttgaacagtatggaaaaattgaagtgattgaaatcatgactggaccgaggcagtggcaggaaaaggggctttgtctttgtaaccttttgacgacccttgactccgtggataagattgtcattcagaaataccatactgtgaatggccacaactgtgaagttagaaaagccctgtcaaagcaagaagagatggctagtgcttcatctcagccaaagaggtcgaagtggttctgggaaactttggtggtggtcgtggaggtgggtttcggtgggaatgacaacttcggtcgtggaggaaacttcagtggtcgtggtggctttggtggcagccgtggtggtggtggatatggtggcagtggggatggctataatggatttggtaatgatggaagcaattttggaggtggtggaagctacaatgattttgggaattacaacaatcagtcttcaaattttggacccatgaagggaggaaatttttggaggcagaagctctggcccctatgggcggtggaggccaatacttttgctaaaccccgaaaaccaaggtggctatggcggttccagcagcagcagtagctatcggcagtggcaggaggttctaattacagccaggaaacaaagcttatcaggagaggagagccagagaagtgacagggaagctacaggttacaacagatttgtgaactcagcctaagcacagtggtggcagggcctagctggcttacaaagaagacatgtttttaggacaaattactcatgttgtatggggcaaaaaactcggagggactgttatttgtggactaattggttattaacaggttattttagtttcccgttctgtggggaaagttgttaaagcctttccaacaaaggggttttaatgtagattttttttttttgcaccccatgctgttgattgctaaatgtaacagtctgatcgtgacgcttgaataaatggccttttttttaaa

SEQ ID NO: 3361 - DNA, 3857 bp, Homo sapiens
  SIMILAR (55)..(3735): 1001254mologous to Homo sapiens LAF-4,accession number U34360,Smith-Waterman Score=6388.
ggccgagcctcggcggcggcggtagcggcggcggcgacgctgacacctcccaccatggacagcttcgacttagccctgctccaggaatgggacctcgagtcactgtgtgtctatgaaccagatagaaatgcattacggaggaaagaacgagaaagaagaaatcaagaaactcaacaggatgatggcacgtttaattctagttactctctcttcagtgagccctacaagactaacaagggggatgaactctccaaccggatccagaacactttaggcaattatgatgaaatgaaagactttttaactgatagaaccaatcagagtcatctcgttggagttcccaaacctggggttcctcagactcctgtgaacaagatcgatgaacattttgttgcagattcaagagcccagaaccagccctcgtctatctgtagcactacaacttccacaccagcagctgtccccgtgcagcagagtaaaagaggcactatgggctggcagaaggctgggcacccaccctctgacggccaacagagagcaacacaacagggctctctcaggaccttgcttggagatggtgttggcagacagcagcctcgggccaaacaagtgtgcaatgtggaggtgggccttcagacccaggagaggccacctgccatggcggccaagcacagcagcagcggacactgtgttcagaactttcctccatccctagcttcaaaacccagcctggtccagcagaaaccgaccgcgtatgtgaggccaatggacggccaagatcaggcccctgatgagtctcctaagctgaagtcgtcttcggaaaccagcgtgcactgcacatcatacaggggagtccctgccagcaagccggagcctgccagagccaaggccaagctctccaagttcagcatccccaagcagggggaggagagtagatctggagaaaccaacagctgtgttgaagaaataatccgggagatgacctggcttccaccactttctgctattcaagcacctggcaaagtggaaccaaccaaatttccatttccaaataaggactctcagcttgtatcctctggacacaataatccaaagaaaggtgatgcagagccagagagtccagacaatggcacatcgaatacatcaatgctggaagatgaccttaagctaagcagtgatgaagaggagaatgaacagcaggcagctcagagaacggctctccgcgctctctctgacagcgccgtggtccagcagcccaactgcagaacctcggtgccttccagcaagggcagcagcagcagcagcagcagcggcacgagcagctcctccagcgactcagagagcagctccggatctgactcggagaccgagagcagctccagcgagagtgagggcagcaagcccccccacttctccagccccgaggctgaaccggcatcctctaacaagtggcagctggataaatggctaaacaaagttaatccccacaagcctcctattctgatccaaaatgaaagccacgggtcagagagcaatcagtactacaacccggtgaaagaggacgtccaggactgtgggaaagtccccgacgtttgccagcccagcctgagagagaaggagatcaagagcacttgcaaggaggagcaaaggccaaggacagccaacaaggcccctgggagtaaaggcgtgaagcagaagtccccgcccgcggccgtggccgtggcggtgagcgcagccgccccgccacccgcagtgccctgtgcgcccgcggagaacgcgcccgcgcctgcccggaggtccgcgggcaagaagcccaccaggcgcaccgagaggacctcagccggggacggcgccaactgccaccggcccgaggagcccgcggccgcggacgcgctggggacgagcgtggtggtccccccggagcccaccaaaaccaggccctgtggcaacaacagagcgagccaccgcaaggagctgcgctcctccgtgacctgcgagaagcgccgcacgcgggggctaagcaggatcgtccccaaatccaaggagttcattgagacagagtcgtcatcttcatcctcctcctcggactccgacctggagtccgagcaggaggagtaccctctgtccaaagcacagaccgtggctgcctctgcctcctccgggaatgatcagaggctgaaggaggccgctgccaacgggggcagtggtcctagggcccctgtaggctccatcaacgccaggaccaccagtgacatcgccaaggagctggaggagcagttctacacactggtcccctttggccggaacgaacttctctcccctctaaaggacagtgatgagatcaggtctctctgggtcaaaatcgacctgaccctcctgtccaggatcccagaacacctgccccaggagccaggggtattgagcgcccctgccaccaaggactctgagagcgcaccgcccagccacacctcggacacacctgcagaaaaggctttgccaaaatccaagaggaaacgcaagtgtgacaacgaagacgactacagggagatcaagaagtcccagggagagaaagacagctcttcaagactggccacctccaccagtaatactttgtctgcaaaccactgcaacatgaacatcaacagtgtggcaataccaataaataaaaatgaaaaaatgcttcggtcgcccatctcacccctctctgatgcatctaaacacaaatacaccagcgaggacttaacttcttccagccgacctaatggcaacagtttgtttacttcagcctcttccagcaaaaagcctaaggccgacagccagctgcagcctcacggcggagacctcacgaaagcagctcacaacaattctgaaaacattcccctccacaagtcacggccgcagacgaagccgtggtctccaggctccaacggccacagggactgcaagaggcagaaacttgtcttcgatgatatgcctcgcagtgccgattattttatgcaagaagctaaacgaatgaagcataaagcagatgcaatggtggaaaagtttggaaaggctttgaactatgctgaagcagcattgtcgtttatcgagtgtggaaatgcaatggaacaaggccccatggaatccaaatctccttattacctgatgtattcagaaacagtagagctcatcaggtatgctatgagactaaaaacccactcaggccccaatgccacaccagaagacaaacaactggctgcattatgttaccgatgcctggccctcctgtactggcggatgtttcgactcaaaagggaccacgctgtaaagtattcaaaagcactaatcgactatttcaagaactcatctaaagccgcccaagccccatctccgtggggggccagtggaaagagcactggaaccccatcccccatttctcccaacccctttcccggcagctccgtggggtctcagggcagcctctccaacgccagcgccctgtccccgtcgaccatcgtcagcatcccacagcgcatccaccagatggcggccaaccacgtcagcatcaccaacagcatcctgcacagctacgactactgggagatggccgacaacctggccaaggaaaaccgagaattcttcaacgacctggatctgctcatggggccggtcaccctgcacagcagcatggagcacctggtccagtactcccaacagggcctgcactggctgcggaacagcgcccacctgtcatagggacctcaccctggggccagagtgggctctggtctccacagatggctcaacgtttttggacactgtgctactgaaactcccagccacagcatttatagactgcggtgaacatttcctca

SEQ ID NO: 3362 - DNA, 636 bp, Homo sapiens
  SIMILAR (7)..(234): 431254mologous to Homo sapiens LAF-4,accession number U34360,Smith-Waterman Score=156.
atgagatctccgagagtggagctgggccaggaggacagcgtgggagccacgggggaagagagtcagggggaaatgagcattcaaggaaatccaatgcccttgacaacagaaggagttatgtcagggctgcttctattgaaagtggttgctaaggagatgacctggcttccaccactttctgctattcaagcacctggcaaagtggaaccaaccaaatttccatttccaaataagctgatgttttcttggtggtacattgaaacaacaactgctagtgccaaagtaattggctataaacccagtgttctaaactgtgccactctgcgggtacaaataatgtcccattatcattcttaccggcatttggccagcctgcttgtggaggggtcagctaccttaccaggccactcccacattttaggtcctcttatcagacaccctgataaggtgtctgctggcaaacctcgggtcctggggctgcagcttttgaaggaggactgttcttcccagccagctgcaaaaccccaggggccccacaggctatgcagctctcttattcttcacagagccagagcaaggctgggtccagaacagagggagaccaaagttcctttctccaaagggaccacacactga

SEQ ID NO: 3363 - DNA, 988 bp, Homo sapiens
  SIMILAR (435)..(482): 811254mologous to Homo sapiens Human secreted protein, SEQ ID NO: 7420,accession number G03339,Smith-Waterman Score=67.
tcaggtgccaacaatggtggactgggctgggtggtccccaggtctctggaccacatgctctggtactggtggtgggggagcagagcaaggctgggcaaactggtccttagtcctcccaggggtacttgcaggtactagcctggagacattttccccattatcttgaggattaacattcagctccctgttacttatgcaaatatctgcagccagcttgaatttctcctcagaaaatgggattttcttttctaccacattgccaggctgcaaattttccaaatttttatgctctgcttcccttttaaaatggaatgcttttagcagcacccaagtcacctcttgaatgctttgttgctcagaaatttcttccacgagataccctaaatcatctctctgaagttcaaagttccacaaatctctagagcagggacagaatgctgccagtctctttgctaaaacataacaagagtcacctttgctccagctcccaacaagttcctcatctccatctgagaccacctcagcctggatttcattgtccatatcattatcagtatttttgtcaaagctattcgacaagtctctagaaagttccaaactgtcccacattttccagtgttctactgagccctccaaactgttccaacctctgcctgttaccaagtttcaaagttgcttgcacatttttgggtacttttttaaggagcacctcactccactggtatcaatttactgtattagtctgctttcaccctgctgataaagacatactcaagtctgagaagaaaaagaggtgtaaagaaaaagaactgtaattggacttaaagttccacatgggctggggaggcctcagaatcatggtgggaggcaaaaagacacttcttacatggcagcagcaagagaaaatgaggaggaagccaaagcagaaactcctgataaacccatcatatctcatgagacttattcactatcatgagaatagcacagg

SEQ ID NO: 3364 - DNA, 891 bp, Homo sapiens
  SIMILAR (257)..(385): 441254mologous to Homo sapiens Human secreted protein sequence encoded by gene 12 SEQ ID NO:73,accession number B24448,Smith-Waterman Score=84.
ttatttaaggcagttcttcacgaccctcatctgaaacttctgagcctgtatggcactagcctctcccatactgatgtcagccacctgtgtgagacattgaagcacacaacatgcaagatagaagagctgatgctgggaacatgtgacatctccgatgaaggttgtgaagacatcgcctctgtcctggcctgcaacagcaagctgatacatctctccttggtagaaaatcccgaaaaggacaaaagaatgatgttgctgtgccctggagacgctgatgttgatgtactgctgtctcatctgtgtctcctgtgaagacatttcccacgtccttttctgcagtaaatccctgtccctccttgacctggggtcaaatttcctggaagataatgaagtggcatctcctgtgtgaagcactgaagcactaagatgcctgcaaaacatggaggagcctgaacttcgactgggttggttaccttggatgctgatgtggtggtggtgctgtgtgaggctttgagccacccggactgtgcactgtggatgcttggtgtcactgtagctgaaaggaaacttaaccatcttccctacatcggaagatttaaggctgcacaaatctgcctgaggattggaaaacagtagccctgtgacttcatgcttcaccacggcagcattcccggggatgttcctggccaataccggtacttctaaatccattgcaaggacacggcttccatgataacaaggccctttagcgtctgtccgctgcggcatctccagggcctggcagacctggcactctacacatttctgctgaatgacagaaggcatgaactcactcatcccatttgatggtccacagtgcacggggagacgcaggggaggattccacaccat

SEQ ID NO: 3365 - DNA, 1893 bp, Homo sapiens
  SIMILAR (1690)..(1881): 811254mologous to Homo sapiens Human secreted protein, SEQ ID NO: 7870,accession number G03789,Smith-Waterman Score=253.
tttttaacaaaccctgttcttgggtgggttttgggtataatactaagttgagatggataccattttccgggggaaagccgctttgtggaagtaggccttattcctctttgccctttcgtacagggagggaatttgaagtagatagaaaccgacctggattactccggtctgaactcagatcacgtaggacttttaacccgttgaaaaaaacgaacctttaaatagcggctgcaccattgggatgtgcctgagtccaaacatcgagggtcgtaaacccctaaattgttgatatggacatctttagaataggattgcgctgttatccctagggtaacttggtcccgttggtcaagttaatggatcaaatgagtataagtagttccgctttgaactggtgaagtccttagcatgtactgctcggaggttgggttctgctccgaggtcgccccaaccgaaatttttaatgccaggtttggtagttttaggacctgtgggtttgtttaggtactgtttgcattaataaattaaagctccatagggtcttctcgtcttgctgtgtcatgcccgcctcttcacgggcaggtcaattttcactggttaaaagtaagagacagctgaaccctcgtggagccatttcatacaggtccctattttaaggaacaagtgattaatggctacccttggcacggttagggttaccgcggccgttaaaacatgtgtccactgggcaggcggtgcctctaatactggtggatggctagaggtgatgtttttggtaaacaggcggggtaagatttgccgagttccttttacctttttttaaccctttcccttatgaagcatgccctgtgttgggttgaccagtgagggtaataatgacttgttggttggattgaagatattgggcctgttaaattgccagtccagggtttaaacctggccgcaggctttatgccggagggagaatgttttccagggcaccttatactaacagttagttcttctataggggtgataggattggccccaaatggggtgttggagggagtcccagttaaaaggttttggggggacttttttagggtagtggggtgtttgagccttgaaccgctttcccttaaattgggtggcctgccttttaaggccctacttatgggtgtttaaaatttttttactctctctaacaaggttttttcccctagtgtcccaaaagagctggtccctctttgggactaaacaggttaaaatttacaagggggattttagagggttcctggtgggccaaaatttaaaagttgaactaaagaatcctaaccttggacaaaccagctaatcaccaggcctcgggtaggttttgtcgcctctacctataaatctttcccactatttttgctacatagaccgggtgtgctcttttagcatgttcttaggtagctcagtctggtttcgggggtcctttagctttggctctccttgcaaaagttatttctagttaattcaattatgccagaacggtataggggttagtcccttgctatagttatgcttggttcataatttttcatctttcccttgcggtactatatctaattgcgccaggtttcaatttctatccgccctatacttttatttgggtaaaatggtttggctcaaggttgtctggttagtcaaggtggagtgggtttggggctaggttcaagcgattctcctgcctcagcctcctgagtagctgggactacaggtatgtgccaccatacccggctaatttttgtatttttagtagagacagggtttcaccatgttggctaggctggtctcaaactcctgacctcaggtaatctacccgccttggcctcccaaagtgctgggattacaggcgtgagccaacttttc

SEQ ID NO: 3366 - DNA, 1549 bp, Homo sapiens
  SIMILAR (3)..(890): 701254mologous to Homo sapiens zinc finger protein,accession number L11672,Smith-Waterman Score=1141.
gtattgctgtctctaagcaagacccgatcaccagtctagagcaagaaaaagagccctggaatatgaagatatgtgagatggtggatgaatccccagctatgtgttcttcttttaccagagacctttggccagagcaagacataaaagattcttttcaacaagtgatactgagaagacatggcaaatgtgaacatgagaatttacagttaagaaaaggctccgcaagtgtagatgagtataaggtgcacaaagaaggttataatgagctaaaccagtgtttgacaactacccagagcaaaatatttccatgtgataaatatgtgaaagtctttcataaatttttaaatgcaaatagacataagacaagacatactggaaagaaacctttcaaatgtaaaaaatgtggcaaatcattttgcatgcttttacacctaagtcaacataaaagaattcatattagagagaattcttaccaatgtgaagaatgtggcaaagcttttaaatggttctcaacccttactagacacaagagaattcatactggagagaaacccttcaaatgtgaagaatgtggcaaagcttttaagcagtcctcaacccttactacacataagataattcatactggggagaaaccatatagatgtgaagaatgtggcaaagccttcaaccggtcctcacaccttactacacataagataattcatactggagagaagccctacaaatgtgaagaatgtggcaaagcttttaaccagtcttcaacccttagtacacataagttcattcatgctggagagaaaccctacaaatgtgaggaatgtgacaaagcttttaatcgattctcataccttactaaacataagataattcatgctggagagaaacctctacaattgtgaagaatgtggcaaaggctttaattggtcctcaacccttactaaacataaaagaattcatactggagagaaaccctacaaatgtgaagtgtgtggcaaagcctttaatgagtcctcaaaccttactacacataagatgattcatactggagagaaaccctacaaatgtgaagaatgtggcaaagcttttaaccggtccccacaacttactgcacataagataattcatactggagagaaaccttacaaatgtgaagaatgtggcaaagcttttagccagtcatcaatccttactacacataagagaattcacactggagagaaaccctacaaatgtgaagaatgtggcaaagcttttaaccgatcctcaaatcttactaaacataagataattcatacaggagagaaatcttacaaatgtgaagaatgtggtaaagcctttaaccaatcctcaactcttactaaacataggaaaattcatactagacagaaaccctacaactgtgaagaatgtgacaatacatttaaccagtcctcaaaccttattaaacaaaataattcatactggagagaaactctacaaatgtcaagaatgtgggaaagcctctaagcagtccttcactcttactaagcattaaatattgggcggg

SEQ ID NO: 3367 - DNA, 345 bp, Homo sapiens
  SIMILAR (126)..(344): 521254mologous to Manduca sexta antennal specific membrane protein AMP,accession number AF177390,Smith-Waterman Score=203.
ggcacgagacctgctctgtaactcacattgtgtccttctctctccctttccttaacccttcccatcccgcttcaactcctggccatacagagaatgaacagccttccctcgtttggtttgacagaggaaagttttatttgacttttgaaggttcttccaggggacccagccccctaaccatgggagctcaggacactctccctgttgcagcagcatttacagaaacagtcaatgcctatttcaaaggagcagacccaagcaaatgtatcgttaagattaccggagaaatcgggttgtcatttcctgctggcatcaccagacactttgccaacaacccgtccccag

SEQ ID NO: 3368 - DNA, 747 bp, Homo sapiens
  SIMILAR (339)..(548): 311254mologous to Homo sapiens Hepatocyte nuclear factor 4 alpha polypeptide (exon 8 product),accession number W71571,Smith- Waterman Score=82.
tttttagcaataaaaaaatgcatgttttatttgtaaattgtgcagagccattttaaactttaaaacagattttgacatgcctatgctgaaataaaatcctccagccacataactctaaggtaaacaagacagtgatgcaacatgagaaccaggcctcaattttgctttggttgaacaggcttggttgaagagcttttaatcctattcatattatataatcttgagtggggattttttcataaatcccttccaatttagcatttcctctcttctttgctcaggtgtacgatccatagcagaatttttggcaaagtctaagtcagaagagacccaggaggaagtgcaggttctgttggattctttggtccacggcaatcccaagtaccaaaatcaagtgtataaaggtctaatagctttgctgccctgcgagtccccaaaagcccagcagctgtccctgcagactctcaggactgcccagccaatcattgggaccacacaccccagcatcgtggactgcgtgctgaaggtgctgggcacgatgcacctggaagtccagtatgaagccatcgagttgatcaaagacctggtcggttacgatgtgcgccaggcgctgctcaagggcctcgtggcgctgctgataccgtcggtcaaggagatctccaaactgcaggccaagatcctcagtgacccctcggttctccagctcacccccagcctgccgatgtttttgcagcaggccgcggccgc

SEQ ID NO: 3369 - DNA, 1405 bp, Homo sapiens
  SIMILAR (911)..(1015): 571254mologous to Manduca sexta antennal specific membrane protein AMP,accession number AF177390,Smith-Waterman Score=115.
tatcaaaactcaatgtgccaatagagatgcccccaccgattccaggacgccaaaggcagggacctctaagcagggcacattacggctcctcaatggtttcattggacgtcagtctcccctatcttctttgaagacaggaaaagaagcatcaacagaacatctagctttaaacgtcactgtgatgcagctgtatatcttatggtatggtggtgtacgatccatagcagaatttttggcaaagtctaagtcagaagagacccaggaggaagtgcaggttctgttggattctttggtccacggcaatcccaagtaccaaaatcaagtgtataaaggtctaatagctttgctgccctgcgagtccccaaaagcccagcagctgtgcctgcagactctcaggactgcccagccaatcattgggaccacacaccccagcatcgtggactgcgtgctgaaggtgctgggcacgatgcacctggaagtccagtatgaaggtagggagcctccagattgcagaagggggcaccgagagccagacatatcagctctcaaaagctttctcttagtcacaaagagccttgatgttgagtgtctgagacagccttggcagatggaagatgctggttcagaaaatgtcagtcacacctatgccttgcgtcaaccacaggaaagtgctaaacttcaacattgcaaagtggaagagattatacggaaaatggagaaagtgcacaggaaggggagactggcctgcccgaacgcaggcttgctcactgcacatgattggcggaagtgcataggaggcaacctgattaaactcaggagaacaggcctacaaaatgggtatcatgacatcatccctgccaaagatcatttagataacaagtgtcagagacaggactcaatcccaggttcttccaggggacccagccccctaaccatgggagctcaggacactctccctgttgcagcagcatttacagaaacagtcaatgcctatttcaaaggagcagacccaagcaacactccctctgtcctagttgaacaattactttccaaaaggcgatcaaatcccataatggaccacgggggacataaggtgccttgctccttgccacctctcctcacccatcccaacaggcgacagagagaactaaagatgtatgggagtcacaaggcagtagcccaaccctctccactccaagaccgcctccagcagtgtgctgttccaacacctgtcactggctggaccaacagcagagctgcactgggggacatttttagcacctggggctcccttcttttgagaactagcacaccaaagaaggcagcagctagggcaaggcctatgtgcccatgccctggggcttacaacacctcttacccccttgccccatacttctggcgctga

SEQ ID NO: 3370 - DNA, 421 bp, Homo sapiens
  SIMILAR (1)..(420): 891254mologous to Homo sapiens Human endometrium tumour EST encoded protein 380,accession number Y60320,Smith-Waterman Score= 599.
  misc_feature (1)...(421): n = a,t,c or g
tttcggcacagcatgaatggctgcgagaaggacagctcgtccacagattctgctaacgaaaaaccagcccttatccctcgtgagaaaaagatctcgatacttgaggaaccttcaaaggcacttcgtggggtcacaggcccaaatattgagaaatcagtgaaggatttgcaacgctgcaccgtttctctaactagatatcgcgtcatgattaaggaagaagtggatagttccgtgaagaagatcaaagctgcctttgctgaattacacanctgcatcattgacaaagaagtttcattaatggcagaaatggataaagttaaagaagaagccatggaaatcctgactgctcgtcagatggaaagcagaagnactaaagagactcactgaccttggccagttcagatggcagagatgcagctgg

SEQ ID NO: 3371 - DNA, 471 bp, Homo sapiens
  SIMILAR (1)..(111): 1001254mologous to Homo sapiens Human endometrium tumour EST encoded protein 380,accession number Y60320,Smith-Waterman Score= 171.
atggaaatcctgactgctcgtcagaagaaagcagaagaactaaagagactcactgaccttgccagtcagatggcagagatgcagctggccgaactcagggcagaaattaagtgtggttttcagagaatgaattgggaaattcagatttatgcagctatagctgctattgcctggctgctcagaaattgtcctgtcagtgttatcttggtggaactgcacactctgcaccaggcattgcaaaaagaaaaacgtcccaacttatctagcctttgtgaacaaagaagcaaccagacccttcattctcccatacattgtcctgggtttgaaggaggaatgcgtttatggtttgggaatcttttcctggaggacagtcgcaaagttatttgcttctcctttaccatgacaagtacctatctttcccatcttaaagagtgccagaagaggagggcagtctcaagtctaatcaggtga

SEQ ID NO: 3372 - DNA, 759 bp, Homo sapiens
  SIMILAR (223)..(333): 971254mologous to Homo sapiens Human endometrium tumour EST encoded protein 380,accession number Y60320,Smith-Waterman Score= 167.
atgctgcaggaggaaaggcttctcttcccaatcctggtgaatgcttcgtggcaggcccctacagtgtgcatagtgtgtgcagcacccaagtcctacagtgagctgcagccactacctggcagctggcagcataagacacctcttatggttggcttccctccatacctttgcagcaagttccgaagcacagcaccaatcagcagactttgcagcaagttccaagtggaaatcctgactgctcgtcagaagaaagcagaagaactaaagagactcactgaccttgccagtcagatggcagagatgcagctggccgaactcagggcagaaattaaggactccctcccatcaggatacctacctgaggacactccatctccaacttttcaggtaaccttctcctgccctctctacagtccagccatcatacgaatgccttatatgtgcttcatctcatttgatattcactgccatatttatacatcgggaaaccgaggcataaagaaagcagtgaaggcatttgtctcaggacccgattggctgatggggcaaccgccaacggctgtggcgtttaaacccaagccgcagccgctgctgctcgccgagctcccggagctgggcgctgtccgcctcggtctccggctcgtcttccgccctctgtcctccgggatccgggacggcggcccctctccggctacgaggggttcgttgacggagtcctgttttggctttgagtcgctgcctcttgtttctgagatttga

SEQ ID NO: 3373 - DNA, 1850 bp, Homo sapiens
  SIMILAR (1236)..(1847): 671254mologous to Homo sapiens hypothetical protein,accession number AL110124,Smith-Waterman Score=635.
gcagaggaggcggcggaacaccccgggttggtcgggtttccaagggctgacccgagctccagcactttttccgcgcctgatttttcagagctcttcagaaaccaggctgctttcaggaacattgctgtggattcccagggcctattccactagaagcaagatggctgaactcaatactcatgtgaatgtcaaggaaaagatctatgcagttagatcagttgttcccaacaaaagcaataatgaaatagtcctggtgctccaacagtttgattttaatgtggataaagccgtgcaagcctttgtggatggcagtgcaattcaagttctaaaagaatggaatatgacaggaaaaaagaagaacaataaaagaaaaagaagcaagtccaagcagcatcaaggcaacaaagatgctaaagacaaggtggagaggcctgaggcagggcccctgcagccgcagccaccacagattcaaaacggccccatgaatggctgcgagaaggacagctcgtccacagattctgctaacgaaaaaccagcccttatccctcgtgagaaaaagatctcgatacttgaggaaccttcaaaggcacttcgtggggtcacagaaggcaacagactactgcaacagaaactatccttagatgggaaccccaaacctatacatggaacaacagagaggtcagatggcctacagtggtcagctgagcagccttgtaacccaagcaagcctaaggcaaaaacatctcctgttaagtccaatacccctgcagctcatcttgaaataaagccagatgagttggcaaagaaaagaggcccaaatattgagaaatcagtgaaggatttgcaacgctgcaccgtttctctaactagatatcgcgtcatgattaaggaagaagtggatagttccgtgaagaagatcaaagctgcctttgctgaattacacaactgcatcattgacaaagaagtttcattaatggcagaaatggataaagttaaagaagaagccatggaaatcctgactgctcgtcagaagaaagcagaagaactaaagagactcactaaccttgccagtcagatggcagagatgcagcctggccgaactcaggggcagaaattaagcactttgtcagcgagcgtaaatatgacgaggagctcgggaaaagctgcccggttttcctgtgacatcgaacagctgaaggcccaaatcatgctctgcggagaaattacacatccaaaagaacaactattcctcaagaactcccttgcaagctccctgctggcctctgctgaatgccgcacgcagcaaacctctggggaaaacagagtaactttttcccgaaaatcatccactcacaataagccctctgaaggcaaagcggcaacccccaaaatggtgagcagtctccccagcaccgcagacccatctctccgggccatgccggccaacaagcagaatggatcttctaaccaaagacggagatttaatccacagtatcataacaacagggttaaatgggcctgccaagtcgcagggcagtgggaatgaagccgagccactgggaaagggcaacagccgccacgaacacagaagacagccgcacaacggcttccggcccaaaaacaaaggcggtgccaaaaatcaagaggcttccttggggatgaagacccccgaggccccggcccattctgaaaagccccggcgaaggcagcacgctgcagacacctcggaggccaggcccttccggggtagtgtcggtagggtttcacagtgcaatctctgccccacgagaatagaagtttccacagatgcagcagttctctcagtcccggctgtgacgttggtggcctga

SEQ ID NO: 3374 - DNA, 489 bp, Homo sapiens
  SIMILAR (290)..(487): 951254mologous to Homo sapiens 23 kD highly basic protein,accession number X56932,Smith-Waterman Score=312.
atggcggaggtgcaggtcccagtcctccatggtcgaggccatctcctgggccgcctggcggccatcgtggctaagcaggtaatgttgggctggaaggtggtggtcgtacgctgtgagggcatcaacatttctggcaatttctacagaaataagttgaactgcagcttccggacccccagctgcatcttccggtggaccgtgcgaggcatgctgccccacaagaccaagcggggccaggccgtcctagaccacctccaggtgtttgacggcatctcaccgctctacgacaagaaagcggatggtggttcctgctgccctcaaggtcgtgcgtctgaagccgacaagaaagtttgcctatctggggcgcctggcgcacgaggttggctggaagtaccaggcagtgacagctaccctggagaagaggaaggaaaaggcctagatccactaccggaagaagaaacagctcatgaggctacggaaacaggctga

SEQ ID NO: 3375 - DNA, 460 bp, Homo sapiens
  SIMILAR (20)..(259): 1001254mologous to Homo sapiens 23 kD highly basic protein,accession number X56932,Smith-Waterman Score=406.
  misc_feature (1)...(460): n = a,t,c or g
tgcaggaattcggcacgagctcaaggtcgtgcgtctgaagcctacaagaaagtttgcctatctggggcgcctggctcacgaggttggctggaagtaccaggcagtgacagccaccctggaggagaagaggaaagagaaagccaagatccactaccggaagaagaaacagctcatgaggctacggaaacaggccgagaagaacgtggagaagaaaattgacaaatacacagaggtcctcaagacccacggactcctggtctgagcccaataaagactgttaattcctcnnnnnnnnnnnnnnnnnncctcgggggggggccgggcccccatttccccttatagggaggggttttacatttcctgggcgggggttttacaaggggggaaggggaaaaaaangtngntatttcccaggctgttcccctgattataattgtggcacagggcctatggactcggg

SEQ ID NO: 3376 - DNA, 802 bp, Homo sapiens
  SIMILAR (83)..(226): 891254mologous to Homo sapiens 23 kD highly basic protein,accession number X56932,Smith-Waterman Score=222.
gcggaggtgcaggtcctggtgcttgatggtcgaggccatttcctgtgccgcctggcggacatcgtggctaaacaggtactgcttgggccggaaggtggtggtcgtacgctgtgaaggcatcaacatttctggcaatttctacagaaacaagttgaagtacctggctttcctccgcaagcggatgaacaccaacccttcccgagggcccttaccacttccgggcccccagccgcatcttctggcggaccgtgcgaggtatgctgccccacaaaaccaagcgaggccaggccgctctggaccgtctcaaggtgtttgacggcatcccaccgccctacgacaagaaaaagcggatggtggttcctgctgccctcaaggtcgtgcgtctgaagcctacaagaaagtttgcctatctggggcgcctggctcacgaggttggctggaagtaccaggcagtgacagccaccctggaggagaagaggaaagagaaagccaagatccactaccggaagaagaaacagctcatgaggctacggaaacaggccgagaagaacgtggagaagaaaattgacaaatacacagaggtcctcaagacccacggactcctggtctgagcccaataaagactgttaattactctatgcggtgcctgcccttcctacattgttgccctggaatgtacgggacccaggggcagcagcagtccaggtgccacaagcagtcctgggacatacgatgctgggagcatggaaagggtcttagtcacttgcttccgaaggttgcttgaaagcactcggagaattgg

SEQ ID NO: 3377 - DNA, 1632 bp, Homo sapiens
  SIMILAR (188)..(373): 871254mologous to Homo sapiens RPB11b1beta protein,accession number AJ277740,Smith-Waterman Score=290.
  misc_feature (1)...(1632): n = a,t,c or g
cccacgcgtccgcccacgcgtccgggtagcggcggtggcggacacttggggtctggacgcaacggcggcgggagcatgaacgcccctccagccttcgagtcgttcttgctcttcgagggcgagaagtaagtgacgccggctgcggagggccgaggatcaccattaacaaggacaccaaggtacccaatgcctgtttattcaccatggaacaaagaagacccacacactgggaaacatcattaaatcacgtgcctgcttccccttcgccttctgccgtgattgtcagtttcctgaggcctccccagccacgcttcctgtacagcctgcagaactctgccccagagcacatcagctatgtgccccagctcttcaaacgacaccttggcggggaggctcaccctgtccaccttcacgctgggagcagcctctaggccagttcagcagccacaacatctctgacttggataccatctggctggtggtggccctcagcaacgccacccagagcttcacggccccacggacaaaccaggacatccctgctcctgccaacttcttcccagaggggcttactattttcacactgagggccaaccgggtgctgttaccagaccagaggccagctccatgtcctccgcgtcggcaatgatacccactgccaacccacaaaaattggctgcaaccatcccctaccaggacccggcccctacagggtgaagttcctgggtgatgaatgacgaaggacccgtggctgaaacaaagtgggtccagcgacacttcgcctgcagcaagcccagggcactttcgggctgttccccgggcccccagagcccggggcaccgtggttcatcatcgccatcctgtctatcctcctggccgtcctcctcacggtccctcccggctgtgcctcatatacacctgcttcaacagctgcaggagcacttccctatcaggcccagaggaggcagggagtgttaagaagatacaccacgtaccttcgcgtttagcacttcctgccgagggggcttcctgaggggttccagaggggcccacgtgtccctccacctcctccctgtcccatggctgcagagcctgagctgggacacgccctgaagcttctggaccctgagagagattgtttcttttctttactattttttttttttttttttgagacggagtctcactctgtcgccaggctggcgcgatcttggctcactgcaaacctctgcctcacgggttcaaagcaattttccctgcttcagcctcctgagtggctgggacctacaggcacacggccacccatgcccagctcatttttgtatttttagtagagatggggtttcacccatgtttgccaggatggcctccatctcttgaccttgtgatccgcccgactcggcctcccaagatgctgggattacaggcgtgagccatcaagtctggcgagagagattgtttctagatgagggtgggggcgggtgtccttagcccaaagcttgtgccagtctctatcagaaataaatgcccccaaaacctccctgcctgtccgtgacatcttannaaacnnnnnnnnnnnnnctatgaggcaaaaaaacaaagatttttaagacaagatgtgcctttcccccc

SEQ ID NO: 3378 - DNA, 966 bp, Homo sapiens
  SIMILAR (531)..(719): 331254mologous to Bacillus anthracis VrrB,accession number AF238891,Smith-Waterman Score=65.
ttaagttttcatttctacattcgtcccttcgttcagtcttgtaatgatggtctcaagtagtaacaatagtaactgtcgtagtgacagtctcaggtagtaatcatggcaaccacacacaggcgtcccatgaagggtacaggcatcccatgagggcacaggtgtcccatgagaatgcaggcgtcccatgaggggcacaggcatcccatgagaacacaggcatcccatgaggggcacaggcgtcccatgagaacacaggcatcccatgaggggcacaggcatcccatgagaacacaggcgtcccatgaggggcacaggcatcccatgaggggcacaggcgtcccatgagaacacaggcatcccatgagggcacaggcgtcccatgagaacacaggcgtcccatgagaacacagttgtcccatgagggcacaggcgtcccatgagggcacaggtgtcccatgagaacacaggtgtcccatgagaacacaggtgtcccatgagggcacaggtgtcccatgagaatgcaggcatcccatgcggggcacaggcatcccatgagggtacaggcatcccatgaggggcacaggtgtcccatgagaacacaggtgtcccatgaggggcacaggcgtcccatgagggtacaggcatcccatgagaacacaggcgtcccatgaggggcacaggcgtcccatgagggtacaggcgtcccatgagaacacagccatcccatgagggcacaggcatcccatgagaacacagacgtcccatgaggggtacaggcgtcccatgaggggtacaggcgtcccatgagaacacaggcctcccatgaggggcacaggtgtcccatgagggcacagacgtcccatgagaacacaggcgtcccatgagcggcacagtatcggccctgagaagcgggggcaccccagggagggcagggctggcaggagacgggggctgatcgcagcacat

SEQ ID NO: 3379 - DNA, 432 bp, Homo sapiens
  SIMILAR (17)..(430): 881254mologous to Homo sapiens herpesvirus associated ubiquitin-specific protease (HAUSP),accession number Z72499,Smith- Waterman Score=659.
ggtgtgaaattctaaattgccaccagtggttacatctcaacagatgagatttatgtatgacctcagacggaccaacatatgaagataattcccagagcagttaccacttgatgaatttttgcaaaaaacagatcctaaggaccctgcaaattatattcttcatgcagtcctggttcatagtggagataatcatggtggacattatgtggtttatctaaaccccaaaggggatggcaaatggtgtaaatttgatgacgacgtggtgtcaaggtgtactaaagaggaagcaattgagcacaattatgggggtcacgatgacgacctgtctgttcgacactgcactaatgcttacatgttagtctacatcagggaatcaaaactgagtgaagttttacaggcggtcaccgaccatgatattcctcagcagttggt

SEQ ID NO: 3380 - DNA, 2868 bp, Homo sapiens
  SIMILAR (1708)..(2823): 871254mologous to Homo sapiens protocadherin gamma C5,accession number AF152339,Smith-Waterman Score=1666.
atggggtatctgcaagatcccctcaaccttgaactgatctttcaggtgggattcaaagaagcacacaggctacgtcggcttaaagaatcagggagcgacttgttacatgaacagcctgctacagacgttatttttcacgaatcagctacgaaagaagctgctgatgggagctctaccctgggagggggcgctggcaccatgggtctgagcgctcgatacggaccccagtttaccctgcagcacgtgcctgactaccgccagaacgtgtacatccctggcagcaatgccacgctgaccaatgccgctggcaaacgagatggcaaggctccagcaggtggtaatggcaacaagaagaaatcgggcaagaaagagaagaaggagttgaatatgcaaagagagttctgctgggacccccctattcgatcagtgattgtacccacatggaaagttctcttccaccgtgttctagctgagacccgggatccttccagtttcacgaagaacgtgcagaagatgaaaagagtgagggacgcggacctagctgtagctgcactcagccgcctccgtggtaaagtctgggtgaaggcctgggtgagtgcagataggagagcagctcctcttactgttctctggctgggctctcgctccatccctgagaaactagaggcgaacgcctccaggaagccagccaggggcaaccagaaagtccttttggtgaagtctgacatcccgcgttggtttctctggacctggcagagtagcaaggaagggctgagaaacatggatgcactgaaacccatgcctagtcgccgatgcggcagtatcgccacgaaatcacacaaacggagcatcgacccaacccaaagaatcaaaaaaccaaacgacaacgaaccgaacggaccgattgtttcctcgggtccttttctaaacaaagaccaccgccagtacaccccacaaaacaagccgacaacagcagttaagccacacccggcttatgagatatttgataatggatgcctagaatcgggagcttctaagaggggaaagtccaatcggcagggtcaaagaggatccttgtgtcctgcaggtgaagttttacaggcgttcaccgaccatgatattcctcagcagttggtggagcgattacaagaagagaaaaggatcgaggctcagaagcggaaggagcggcaggaagcccatctctatatgcaagtgcagaacaggacactaaggcagcaaaaggctaatggccccaaaactggtccagtaagaagcaacaccaagatgtcaactctgaacacaaccccagtgttcatcaacaaagggcaattgctgggtgcgtgcaatggtgccagggcccctgatgctggctgcacctgctggggcattgcatgcacctgtgctggccctgcattatgtgggctgcatgatggacctgatgcggaacccatgctgggcttggccttgacgcaggagacaccttatgcactggcagctgctggcttcccctgccaagccccacagggcctggaagcagtgatgtaccagcaaatgattgagctcagtgataatgaaaacccttggacaatattcctggaaacagttgatcccgagctggctgctagtggagcgaccttacccaagtttgataaagatcgacattctccagtttccactctgatcgaagatggcatctcgaatcagtgcaccggagccaggttcccacggatagtgcccagaccagatgtggcaccatactgtgagcggtatactctcagccccaacagccacttctctctgcatgtgaagaccctaaaagatggaaagctcttcccagagctagtgctagagcaacagctagaccgtgagacccaggcaagacatcagctagtactcactgccgtggatgggggaaccccagcccgctcagggaccagccttatctcggtcattgtgctggacgtcaatgataatgccccaaccttccagtcctcggttctacgtgtgggactcccagagaacacacccccgggtacactgctgctccgtctcaatgccactgatccagacgagggcaccaatggccaactagactactcttttggagaccatacatctgaaacagtgaagaatctctttggcctggatcctagcagtggagcaatccatgtgttgggtccagtagattttgaggaatcaaatttctatgaaattcatgcaagagctcgagaccagggacagccagccatggagggccactgtgtaattcaagtagatgtaggggatgctaacgacaacccccctgaagtgctgctggcatctttggtcaaccctgtgctagagagcacacccgtaggcacggttgtggggttgtttaatgtgcgggaccgagactcaggtagaaatggtgaggtgagcctgaagacatctccaaacctgccatttcagatcaagccttctgagacgcactactcactgctcaccagccagcctctggaccgagaggccacatcccattataccatcgagctgctggccagtgatgctggatcaccccccctacatacccatctcaccctcaggctgaacatttcagacgttaatgataacgcaccccatttcacccaacagctctacactgcttatatcccagaaaaccgcccaccaggctctctcctctgtactgtggctgcctctgatccagacgagggggataatgcccgcctcacctattctattgtggggagtcaaatccagggagccccagcctcctcctttgtgtatgtcaacccccgaggatggacgatctttgcccagcggaccttgactagcccaaggccggcccttggtcaagtcctgtttgcctga

SEQ ID NO: 3381 - DNA, 3517 bp, Homo sapiens
  SIMILAR (960)..(992): 811254mologous to Homo sapiens herpesvirus associated ubiquitin-specific protease (HAUSP),accession number Z72499,Smith- Waterman Score=43.
gtacgtgcgcgtctccctgccgccgccgccgcccgccgcgggccgccccggggccgccgtcgccgacgacgcgcgggaggaggaggaggaggccgccccgccgccgccgccgccgccgccgccccggctcgccgccgcccgcccgccgggctcgcagccccggcccccggccgcaggcgaggcccaggccgcggccgacatgaaccaccagcagcagcagcagcagcagaaagcgggcgagcagcagttgagcgagcccgaggacatggagatggaagcgggagatacagatgacccaccaagaattactcagaaccctgtgatcaatgggaatgtggccctgagtgatggacacaacaccgcggaggaggacatggaggatgacaccagttggcgctccgaggcaacctttcagttcactgtggagcgcttcagcagactgagtgagtcggtccttagccctccgtgttttgtgcgaaatctgccatggaagattatggtgatgccacgcttttatccagacagaccacaccaaaaaagcgtaggattctttctccagtgcaatgctgaatctgattccacgtcatggtcttgccatgcacaagcagtgctgaagataataaattacagagatgatgaaaagtcgttcagtcgtcgtattagtcatttgttcttccataaagaaaatgattggggattttccaattttatggcctggagtgaagtgaccgatcctgagaaaggatttatagatgatgacaaagttacctttgaagtctttgtacaggcggatgctccccatggagttgcgtgggattcaaagaagcacacaggctacgtcggcttaaagaatcagggagcgacttgttacatgaacagcctgctacagacgttatttttcacgaatcagctacgaaaggctgtgtacatgatgccaaccgagggggatgattcgtctaaaagcgtccccattagcattacaaagagtgttcctatgaattacagcatagtgataaacctgtaggaacaaaaaagttaacaaagtcatttgggtgggaaactttagatagcttcatgcaacatgatgttcaggagctttgtcgagtgttgctcgataatgtggaaaataagattaaaggcacctgtgtagagggcaccatacccaaattattccgcggcaaaatggtgtcctatatccagtgtaaagaagtagactatcggtatgatagaagagacgattattatgatatccagctaagtatcaaaggaaagaaaaatatatttgaatcatttgtggattatgtggcagtagaacagctcgatggggacaataaatacgacgctggggaacatggcttacaggaagcagagaaaggtgtgaaattcctaacattgccaccagtgttacatctacaactgatgagatttatgtatgacccctcagacggaccaaaatatcaagatcaatgataggtttgaattcccagagcagttaccacttgatgaatttttgcaaaaaacagatcctaaggaccctgcaaattatattcttcatgcagtcctggttcatagtggagataatcatggtggacattatgtggtttatctaaaccccaaaggggatggcaaatggtgtaaatttgatgacgacgtggtgtcaaggtgtactaaagaggaagcaattgagcacaattatgggggtcacgatgacgacctgtctgttcgacactgcactaatgcttacatgttagtctacatcagggaatcaaaactgagtgaagttttacaggcggtcaccgaccatgatattcctcagcagttggtggagcgattacaagaagagaaaaggatcgaggctcagaagcggaaggagcggcaggaagcccatctctatatgcaagtgcagatagtcgcagaggaccagttttgtggccaccaagggaatgacatgtacgatgaagaaaaagtgaaatacactgtgttcaaagtattgaagaactcctcgcttgctgagtttgttcagagcctctctcagaccatgggatttccacaagatcaaattcgattgtggcccatgcaagcaaggagtaatggaacaaaacgaccagcaatgttagataatgaagccgacggcaataaaacaatgattgagctcagtgataatgaaaacccttggacaatattcctggaaacagttgatcccgagctggctgctagtggagcgaccttacccaagtttgataaagatcatgatgtaatgttattttttgaagatgtatgatcccaaaacgcggagcttgaattactgtgggcatatctacacaccaatatcctgtaaaatacgtgacttgctcccagttatgtgtgacagagcaggatttattcaagatactagcctttatcctctatggaggaagttaaaccgaatttaacagagagaattccaggactatgacgtgtctccttgataaagccccttgatgaactaatggatggtgacatcatagtatttcagaaggatgaccctgaaaatgataacagtgaattacccaccgcaaaggagtatttccgagatctctaccaccgcgttgatgtcattttctgtgataaaacaatccctaatgatcctggatttgtgggtacgttatcaaatagaatgaattattttcaggttgcaaagacagttgcacagaggctcaacacagatccaatgttgctgcagtttttcaagtctcaaggttatagggatggcccaggtaatcctcttagacataattatgaaggtactttaagagatcttctacagttcttcaagcctagacaacctaagaaactttactatcagcagcttaagatgaaaatcacagactttgagaacaggcgaagttttaaatgtatatggttaaacagccaatttagggaagaggaaataacactatatccagacaagcatgggtgtgtccgggacctgttagaagaatgtaaaaaggccgtggagcttggggagaaagcatcagggaaacttaggctgctagaaattgtaagctacaaaatcattggtgttcatcaagaagatgaactattagaatgtttatctcctgcaacgagccggacgtttcgaatagaggaaatccctttggaccaggtggacatagacaaagagaatgagatgcttgtcacagtggcgcatttccacaaagaggtcttcggaacgttcggaatcccgtttttgctgaggatacaccagggcgagcattttcgagaagtgatgaagcgaatccagagcctgctggacatccaggagaaggagtttgagaagtttaaatttgcaattgtaatgacgggccgacaccagtacataaatgaagacgagtatgaagtaaatttgaaagactttgagccacagcccggtaatatgtctcatcctcggccttggctagggctcgaccacttcaacaaagccccaaagaggagtcgctacacttaccttgaaaaggccattaaaatccataactga

SEQ ID NO: 3382 - DNA, 409 bp, Homo sapiens
  SIMILAR (36)..(230): 1001254mologous to Homo sapiens transmembrane 6 superfamily member 1,accession number AF255922,Smith-Waterman Score=321.
cccggaatttccgcgtcgacaatttcgtggctgcgatgagtgcctctgcggccaccggggtcttcgtgctgtccctctcggccatcccggtcacctatgtcttcaaccacctggcggcccagcatgattcctggactattgtaggggttgctgccctcatcctgttcctggtagcactgctggctcgtgtcctcgtcaaaagaaaaccaccccgggacccactgttctatgggtgaaccgtatctgaacaccgcatatgggcacatgatctgctactgggatggctctgctcattatctgatgtacctggtgatggtggcagccatagcatgggagtaagtcagttcacctggtgtgtgcctttgccaccttagcaaccgataagcgggttattcaagaagcccaagcg

SEQ ID NO: 3383 - DNA, 1605 bp, Homo sapiens
  SIMILAR (690)..(1571): 291254mologous to Herpesvirus papio NTR,accession number AF200364,Smith-Waterman Score=186.
atgcagactgaaaacaactgcgttttccagtccgtcctcaaggcacatcacagcttgcttaccaaggttctggcagatttgctcccttccgaagcaccttatacctccagaagctcctcctgtggggatgagctgaagaaggaggaagccagtgtgggtcaagagtatgatgctgggctgaagaatcccatgagggaagagagaccctcctacaacagccaagtgcaggacctgctcaccacaggaagaaacaggtcctgcagggactcagggacaggcggccaggcagctggagaggaggaagttaccaccctatgtacagacactccacggcctgaccagctgaagggggtttgcagcctacagactgatgcaatttccttagcaccaacagctgagagacatagcaggttacttcctcctccctccagacagcaaccaacatcagcaggaacagaggctggcgcctgtcccaacacccggcgaccctcaggccttcagctgccggctgcagtgccaaacaccgtcaggccagacaccgtcagtgccaaagccaggcctagaacccacgtctctgcctgttggttccgggctatttctgctagtcattcacaacagtttctaaaattaataagaaatgataagtatgcgaaagtccatacatggaaacgttcccgtgagatgcaaaaagaacaaggcacaaacgagctgacacggccaggcgcggggagcccctgcggccacgaacctctgtcccgcggcggacggtcccagccccctcggaaaagttgcgaggctcccgtcgcggcgagccaactcccgccgcccctcggcgcgacccccgccgcgccggctcactcactcatgctgggccgccaggtggttgaagacataggtgaccgggatggccgagagggacagcacgaagaccccggtggccgcagaggcactcatcgcagccgccgcgccgctcgcccttcaccgcatcccgctgggcgccccgccccagcttccggcggcgcccgcgcccccttggcgcttgcccttcgaggcgcctcagccgcgccccccgcgtggcgccctcagcggcgtcccctcagcggtgtctcctccgcgcgccctcccagcccgcagccgtcccccgcgcctggccccgtcgccccaagtgcgcagggccgcggtgcagtcccgggaggcgtccttgcagtgctcctgccaggggcgccacggctcagcggcaagcgcccggcggcgccgaggggcggcgacacccccgcgcagggacaggtgcccctggcggcgcgcgctccgagggagggcccggggcacggccgggaaccggtcatcgaagagctggagaggcgcggggctgagctgcggtccgggaaaggtggaaccagatccgagggtgtcagaggaggaagggcccgcgggatcgtctatgggggagcccacggcccagaagtgggaaaggacaaaatgcccctgaaacctcggaacctctccgctccagtagccatcggcgggctgctgcacggagccggcatccggtttttaaacctggctctccactcaccagctgttgactttggtcaaattacttaa

SEQ ID NO: 3384 - DNA, 498 bp, Homo sapiens
  SIMILAR (241)..(2): 521254mologous to Homo sapiens transmembrane 6 superfamily member 1,accession number AF255922,Smith-Waterman Score=125.
taataatagatccaacccaatataggccaatggttcctaataaagtttcctccccatgctaatggctgcccaccatcacccaggtacatccagataatgaagcagagcccatccccagtcagcgagatcatgtgcccccatatgcggtgttccagatacggttcacccctctctcaaagtagtgtgtcatgaacccgtcaatgattcccatcttgctcccagtccctatgatgaggttcacccacgctggtaaatccaaaaactgcatacacatagaacagtgggtcccggggtggttttcttttgacgaggacacgagccagcattgctacccaggaacaggatgagggcagcaacccctacaatagtccaggaatcatgctgggccgccaggtggttgaatgacataggtgaccggggtggccgagagggacaagcaccgaagaccccggtgggccgcagaggcactcactcgcagccgccgcgccgctcgccctt

SEQ ID NO: 3385 - DNA, 273 bp, Homo sapiens
  SIMILAR (1)..(270): 901254mologous to Homo sapiens high mobility group protein 14,accession number J02621,Smith-Waterman Score=421.
atgcccaagaggaaggtcagctccgccgaaggcgccgccaaggaagagaaacctcctgcaaaagtggaagcgaagccgaaaaaggcagcagcgaaggataaatcttcagacaaaaaagtgcaaacaaaagggaaaaggggagcaaagggaaaacaggccgaagtggctaaccaagaaactaaagaagacttacctgcggaaaacggggaaacgaagactgaggagagtccagcctctgatgaagcaggagagaaagaagccaagtctgattaa

SEQ ID NO: 3386 - DNA, 1902 bp, Homo sapiens
  SIMILAR (157)..(990): 351254mologous to Rattus norvegicus cis-Golgi matrix protein GM130,accession number U35022,Smith-Waterman Score=352.
atggggttttgccatattggccaggctggtctcaaactcctgacctcaaaggatctgcccgcctcagccttccaaagtgctgggattgcaggtttttggctcctggatggcatttctggacccatcctgggccagagagaagcctgctgccctgcaggcaacagcaataaggagctgaagcaggagaactcagctttggcagagcagcttcaagttgtactgattgacaaggcagggatgcagtgtgacttggaggagctgaaaaagaaactggaactcactgagctcacgcttcaacagttatctagctggtgtgaagcccctgacgctaaccagcagttacagcagcccacagacgaacgggcacagctggaagcacacctggggcaggtgatggagtggctgaagtatctgcaaatggagagagagcagtatgccgagtatctgcatggagagagtgccatgtggtggcagaggatgcgggagatgtcagagcagataggtcacttgattgttccaggcatctgtgaaatgggaggagcacagccagaggtggtcatgggtctgggctttgtggaggtgcacacgttgagggaggagagagtgcacagcatgagtcgagtacaggagctggagacgatcttggctgaactaaggaaccaggtggctgaacccctgcccccggagcctccagcagggccctccgaagtggagcagaagctacaagcagaggctgagcacctgtggaaggagctggagaatctggcaggacagcttcaagcccaagtggaagaaaatgagggcttgagtcacctgaaccaagagcaggaagaggttgctcaggttgttggagcaagaggagaagttgctggagcaagaggagaggttgctggagcaagaggagaggttgctggagcaagaggagaggctactggagctgcaggagagcctgctagagcagaagcggaaggccgcttcctttctcagctgaacccctactcccggagcccccagcagggccctccgaggaaagtacgtcacatcataccagagccagaggtcagtgctgaagacgtggaccgggagaatgagtacataagcaggctggctcaggacaaggaggagatgaaggtgaagctgctggagctggtgttgcagcttgtgggcgactgcaacaagtggcatggcagattcctggcagctgcccagaaccctgctgatgagcctgctccatgggacccagccccccaggagattggggctgccaacaagcagggtggcctgtttcctggatgctgcctggtgacacctgggggattccacggggactgccgtggtgcctatggggcacagtccagccctgacagccaacaggctcagaatcctgatctagcggtggccgggaaggcagcattttgggaatttaaggagcatcaggaaagcctcactttgttaaagagctggggacgcagaaagagtggcagcggccaggctgcccagcttcgtgaaggctctcggtgcgccgcggcccgcaggcacctggcacgcgccctccctgccgccaggatgcccaagaggaaggtcatctccaccgaaggggccgccaaggaagagcccaagaggacatcggcgagtttgtcagctaaacctcctgcaaaagtggaagcgcagccaaaaaaggcagcagcgaaggataaatcttcagacaaaaaaacgcaaacaaaagggaaaaggggagcaaagggaaaacaggcagaagtggctaaccaagaaactaaagaagatttacctgcagaaaatgagctgtcttcattatacagcttctatgccaggtctttgattttggcctttattattcatcttcgaatggagcacaagaattaccagtattacctcaattga

SEQ ID NO: 3387 - DNA, 701 bp, Homo sapiens
  SIMILAR (274)..(453): 631254mologous to Homo sapiens high mobility group protein 14,accession number J02621,Smith-Waterman Score=160.
  misc_feature (1)...(701): n = a,t,c or g
tgcaaaagtggaagcgacccgagcaaaggcagcagcgaagtgtaggtagaagtttagcactgcagtcatcagaagaggcaagattaatttccttgacattgaggagttgttggataattacntaaatttgtccttgttaaataaagattcttcaaacacctaaatgaaagtgataaattcaaaactgatccttttagttcctcattatatgatatgaagggattaactgtagcaggatagtcaacctgacccgtacggcatggtgctttttttcaggataaatcttcagacaaaaaaagtgcaaacaaaagggaaaaggggagcaaagggaaaacaggcccgaagtggctaacccaagaaactaaagaagacttacctgcggaaaacggggaaacgaaggactgaggagagtccagcctctttattgaagcaggagagaaagaagccaagtcttgatttaattaaccattttaccatgcttatcagtggtccctgtctcccttcttgtacaattccagaggaatatttttatcaactattttgtaaatgcaagttttttagtagccttagaaaccatttttaagaaggagggaatcccacctccatcccattttttaagtggtaaatgcttttttttaagaaggtgaaatcatttgctggttgttaattttttggtacaaccagaaaatagtgtgggatat

SEQ ID NO: 3388 - DNA, 238 bp, Homo sapiens
  SIMILAR (9)..(83): 351254mologous to Tetraodon fluviatilis receptor protein tyrosine kinase,accession number U58673,Smith-Waterman Score=41.
atggtgtctgccctcccagaggtaggtcgtgctcagattttaaggctgatagcttatattcgttcccctgcccctcccgttgtgggagttgagagagcagcacgcagacctgctcaggcttttggactggttgcactgccctccaccgttggagaggaatgcctgaaagatgccctccggagtccagagactcctaaactcggttccctcagtcctccctgccaggacacaagacctg

SEQ ID NO: 3389 - DNA, 789 bp, Homo sapiens
  SIMILAR (310)..(639): 661254mologous to Homo sapiens dJ138B7.3.2 (lethal (3) malignant brain tumor (l(3)mbt) protein (Drosophila) homolog (isoform 2) (KIAA0681)),accession number Z98752,Smith-Waterman Score=382.
gccatatccgtggtccacgttattcgggacatcacagtgcttttggctgcccgtattcagacatgaacttgaaaaaggaggcaacacttcacgatcgtttgagagaacaaacacaggcaaattttggaatcagactcttcacattcaaaatcaaaaagcctctgtagtttgaacttcaatggaaaacatgaaaaggtgaacagtcagcccagacttgtacagcaggcaaagtgtttgaaaatcaaaggaaaagaagatattgacttggataatctcttcagagaatactcggtggagcaggcgcagcaggtgcttcaccagtcagtgtccatgtccacggtgtcagcccacccttttcgggaccttcccctcggcagggagcaacactgcaagttgcttccaggcgtggctgacatccgggccagccaagtggcacgttggactgtggatgaggtggctgagtttgtacagtctcttctgggctgtgaagagcatgccaagtgctttaagaaagagcagatcgatggcaaagccttcctgcttctgacacagacggacattgtcaaagtgatgaagatcaaactgggcccagcactgaagatttacaactctatcctgatgttcaggcattcccaggaactccctgaagaagatattgcctcaggccaagaagtcaggggatgaatgggctccctgaacttcctctggcaccaagacctgcgctctttcagcaataaaagtggagcacattaaaaaaaaaaaaaaaaaaaaaaaaaaaaaaaaaaaaag

SEQ ID NO: 3390 - DNA, 984 bp, Homo sapiens
  SIMILAR (469)..(717): 471254mologous to Homo sapiens dJ138B7.3.3 (lethal (3) malignant brain tumor (l(3)mbt) protein (Drosophila) homolog (isoform 3) (DFKZp586P1522)),accession number Z98752,Smith-Waterman Score=179.
  misc_feature (1)...(984): n = a,t,c or g
atgggttactcctctctgagtgctgctagactcaagatccatggccaagtcttccagtgctgtggtccagggcctcttcagaccctgcagctggacacagagctgaacatatctgaacatattggccttggaaacttgagggtacagtatatctggcttgttttgtacatgccccttgtccagcctgacaacttcattaaaaaacattcacatttgccaacatactgccttttcaaggaagatgtgaagtttcctttcagaacctgcaggcttacatactgttggctgaactacacagaagagataacctatttacatactaaaaaggtcagtgttggacaatcagcagttagagaggaatttgctgctgcttgcacctggagcataagaattggggagaagctggcaattttgctgtctctttatctgtgtagacagcaagcactgttaaatatgaggatgtctgttccgatccacgagagtggtgttgcacagagaagcccagtgatggacaagctcgctcaatactcggtggagcaggcgcagcaggtgcttcaccagtcagtgtccatgtccacggtgtcagcccacccttttcgggaccttcccctcggcagggagcaacactgcaagttgcttccaggcgtggctgacatccgggccngccaagtggcacgttggactgtggatgagaatctgcatggcctaatccaaaccaagcagacacctcacttggatgagagcattagcaaaggagaaagtcctgccttggttgtcactgagcttaggatgtgcatgacagctactgagcctctagtacctacaaagaacccctaccaggagcgtggccacattggcgactccttcctgcattacactgatcaagaaccgcagccctgggaccagtccagtgttcacccaacaccagctcccatctactctgtctcttcaggctttagggtgactcgtggatctgacatctaa

SEQ ID NO: 3391 - DNA, 867 bp, Homo sapiens
  SIMILAR (658)..(807): 641254mologous to Homo sapiens dJ138B7.3.3 (lethal (3) malignant brain tumor (l(3)mbt) protein (Drosophila) homolog (isoform 3) (DFKZp586P1522)),accession number Z98752,Smith-Waterman Score=165.
atggtgtctgccctcccagaggtaggtcgtgctcagattttaaggctgatagcttatattcgttcccctgcccctcccgttgtgggagttgagagagcagcacgcagacctgctcaggcttttggactggttgcactgccctccaccgatgctactgtgtttgccaatcagccccttgcaagagcctgcattggggcagcaaggcacagggagcctgatgctccaggccagtcagcctgggttggagaggaatgcctgaaagatgccctccggagtccagagactcctaaactcggttccctcagtcctccctgccaggacacaagacctggaagggcaagcaatgacttttctttggagatgggttactcctctctgagtgctgctagactcaagatccatggccaagtcttccagtgctgtggtccagggcctcttcggaccctgcagctggacacagagctgaacatatctgaacatattggccttggaaacttgaggagcccagaaccagccctgagagtggcaagcagtggactgaggagcccctggactgttcagccacacattaggtgtctttccaagagtctgccccagcacccaaagcagataatttgcttccagaattatgaatactcggtggagcaggcgcagcaggtgcttcaccagtcagtgtccatgtccacggtgtcagcccacccttttcgggaccttcccctcggcagggagcaacactgcaagttgcttccaggcgtggctgacatccgggccagccaagtggcacgttggactgtggatgagccttattccagtgccccccgaggcccagagctatcagctggggctaattcaagcagaggggcttaa

SEQ ID NO: 3392 - DNA, 460 bp, Homo sapiens
  SIMILAR (435)..(49): 481254mologous to Mus musculus Gag polyprotein,accession number Y12713,Smith-Waterman Score=270.
  misc_feature (1)...(460): n = a,t,c or g
catcgagcccctatcgagagcactagaccangtggnggaattcgctgccactactggggatggggaagctgttccttctggccaaaaaggttcatcagagtttacaagctcagtgtccccagcttcatcaggtaactcccacacatccccattccaaggtgcagggtcccattcttttccaatcaatgccctcactttaacagcagacacctggcaaggctgtgcatgcacctttcattgcagatcagtcactgacataagagcttgtgtctgtttttccacaatttcagctgtttccctacaggagataagactctcactcaggaaaatcttagcagatttgaggctcagtatctgcttctgaagctgaaagacagaatccctgagttcatcattttctttcatcaatttgtccactgaacttaggggcaaaaaaacagcttcattacattcattggtn

SEQ ID NO: 3393 - DNA, 771 bp, Homo sapiens
  SIMILAR (373)..(687): 401254mologous to Mus musculus Gag polyprotein,accession number Y12713,Smith-Waterman Score=188.
atgattgtgagacctccccaaccacatggaactgtgagtccattaaacctttttttctttattaattacccagtctcagttctgcaggctgtacaggaagcatggctgggaagacctcaggaaacttacagtcatgcagaaggtgaaggagatgcagaggtctgcaaagtcaatggtattgagccctgtgcactgaatggagacagtgttctcaaatccagaacggatgtcacctttactccagtcaacattacaaccaaagtaaagtctgttgaaatgcacaatgaagctttgagtagagctcttcctggggataatgtaggcttcaagaatgtgtctaagatgtttgtcatggcaacactgctgtttagtgactgtatacataatacctttgaccaaatgtggagaaccaaggaacataatgaagctcgttggtcactccaaagttcaggggacaaagtgatgaaagaaaatgatgaactcagggattctgtctcccagcttcagaagcagacactgagcctcaaatctcctaagattgccctgggtgagagtcttatctcctgtagagaaagagctgaaattgaaattgtggataaacagacacaagctcttatcatgggagtggctgacctgcaaggaagggtgaatgcacagcttcatcaggtgtctactgttaaagtgagggattggaaaagaatgggaccctacaacttggaatgtggaactgtggggaggaccctaattaagctgtggacactgagtttgtaa

SEQ ID NO: 3394 - DNA, 2278 bp, Homo sapiens
  SIMILAR (1436)..(2137): 301254mologous to Homo sapiens COL4A6 (Collagen Alpha 6(IV)),accession number AL031177,Smith-Waterman Score=140.
ttagtctagttgaagtctggaagcaaacaggggtgttgggggtggctcctgaggagaatcaacattatcttgcctggcaactgcctcagaggaggccatcactgttgcttcaggcagcacagggtttatctcctcagtcaaaggtggaaaggctgatgacagcatgggccggggaggggatattgccactactggagatggggaagctgtttcttctggcaaaaaaagttcatcagagtttacaaactcagtgtccccagcttcatcagggtcctcccacacgttcccattccaagttgcagggtcccattcttttccaatcaatgccctcactttaacagtagacacctggcgaggctgtgcatgcaccttttgttggaggccagtcactcgcatgataagagcttgtgtctgtttttccacaatttcagctctttctctacaggagataagactctcacttagggcaatcttagcagattttaggttcaatatctgcttctgaagcctggagctagaatccctgagttcatcattttctttcatgactttgtccactgaacttaggagcaaccaactagcttcattatgttccttggttttccacgtatggtcaattgtattatgtatagtcactgaactccttgcctctcacgagcgatgattcaggtgtgtcaaatgcatttattttgcataactctctaaacagttcacaccaagctgcctctcctccactgtggtcaaccagaaactgtacttgtttgcaaagtagtggcaggtgcctcgggcaccactgcattcgatgaaaggagtggcccgaaagtcctctaggcaggagccaggtgagaccagggactggcctccaccctcggcaccagcggcagtgtgctgaaacagacaggagattagtgcatgagctgtgcctgccaagggttggtgtggggaggggatgggtgctctgtgcacagcaatggcttgcgagggtgcctcacacacagagcagcggctgatgtactggggaatctgggtctggctgacgggcatcatggggataggggcggtagtggagagccagtaagatttatcattgcgcctggcatagtggcacacctcgttgatgttgcagtagatgaagggcatggtgctgaagcggggcagacaggagccagcaaagcctggaaggagagaaagtgggcaagggcaggggaggtctggctgaggggctttgacgagatggtggtttgggatcccgatgggacacgggggcacctgttccgactggctgtgctttaccaacgtgtagcccactctcatgctctggccaggcattccaggcatcccgaaggggccttgctgccctggagctcctgagagagacagatcataaaaggtgagtgtggtgcagctaatgacaacatcagctactcacattgtaccaccactggggccatctttaccggggatgccaggtaaacctttggagcctgcaggagagaaagcccaaaggagggtactcaatgtagagggtccccaggcaccttccccaggaaaggggcccaagggtccaggaggaacctggacagcttctgcagttggtgtttgtccaggatcaccttggaggccagaagagcctgtgggcaggtgggggaaataagaacatcaggctgaggcagagggaggtgacgggggccccagaagccttcccatgaagccaggctcacctctcatgcctgacaaagcccaaaggaagcaagtcaggtcccggcatggtaggggtggtaggggtggaggataggcagggccaggaattccagggaagccagggtctccggtgtcgccttgattcgaggatggcccagggggacctgggggtccagcggggcctgggcggcctagggataagatcggaagaggggcgaggggcaggtgaacaggtagtagccactgcagaaggcctagggaccctggggcaccggggagaccagcagggccctggagacctgggaaacctgtaaagaataaataaaaggggctggataggctctgtgtgcccagaagatggccaggctctttcagagaatctcctttgggtccagggagaccagcaggcccaggcacaccggtgatactaggtcctaggaggagatgcaggggtagggggcagacctcagtggaggtgaggccttcctgcctaactcactcgcctcctgaggggagagaatgtcaaaaatggctccagcaactctgaatcatgaagcatcagcaagaggtagctacc

SEQ ID NO: 3395 - DNA, 1776 bp, Homo sapiens
  SIMILAR (1381)..(1584): 801254mologous to Mus musculus Pro-Pol-dUTPase polyprotein,accession number Y12713,Smith-Waterman Score=299.
atgtcggctgcctctcctcaagcggcccctgccagctgtgatcagtgttaccaggcaaagccctctcaactgccctctgaatctgaaatcctcctttgggtttttcctgtgctcagtgcaatcagtccagagacgttaggccctcgaagttggcatagacacagtcatgatttttcacctgctaagtggctctgggactttttccagtcctcaagatctaacaaaccgcactctgcaatcacagctttgctgaagttccgccaccagcaaaagaagtcagaacaggctcgcctagtaggagcagagcccactgggctgctgggaagcctagcagagacagcaggaagcagggcagctcctgaaaggctggagcagcattctactggcgttcacatttgttccattctggacattacactggtctctaatgagcctctaccgaaaaaaaaagactccaccccagatcaccatcacagatcagacttacatatagacatgtgtgggcttatccaatgcagatcaggtaaaaacaacttcctgagagaatatatcgcgacagaagaagagaagttagagccagcaatcgatcctgattgcggatgttggcataaactgtctaggaagttatgcaaaataaatgcatttgacattcctgattccctgcttgtgagaggcaaggagtttagtgactctatacataatacttttgaccatatgtggagaaccaaagaacataatgaagatggttggttgctcctaagttcagtggacaaagtgacgaaagaaaattatgaactcagggattctgtctcctggcttcagaagcagatactgagcctcaaatctgctaagattgccttgagtgagagtcttatctcctgtagagaaaaagctggaattgtggaaaaacagatacaagctcttatggcactgattagaaaagaatgggaccctgcaactggaatggggacatgtgggaggatcatgatgaagctggggacactgagtatgtcaactctgatgagtctttttgccagaaggaacagcttccctatccccagtagtggcaacatcccctccctgacccatgctgccatcagcctttccaactttcaggaaataaaccctgtgctgcctgaggcaacagtgatggcctcccctgaggtagttgccaggcaaaataatgttgattctcctcaggagccaccaccaacacccccatttgcttctagacctataactagactaaagtcctggtgggcccctagagatctaacagtggaaaccacagtcactcaactacacaacttaaatacagtgggaataattgagtcgcgaggtggcaggggccatgtggcagcactcaacagtcaaaggcaaggtgaatcacagcagaggcttctgggattttggagcaaggccctgccattttctgcagataactactcttcttttgagagacagctcttggcctgttactgggctttggtggaaactgaacatttaactatgggtcatcaagtcaccatgcagtctgaactgcctatcatgaactgggtgatttctgacccatctagccataaacacacaatgcttctgccgaaactaccatcagtggactcacagaatgccttatccaccgtcatggtattccacacagcattgcctctgaccaaggcactcactttatggctaaagaagtgtggcagtgggctcatgctcatggaattcactggtgttaccttgttccccatcatcctgaagcagctggattga

SEQ ID NO: 3396 - DNA, 1884 bp, Homo sapiens
  SIMILAR (1501)..(1818): 751254mologous to Mus musculus Pro-Pol-dUTPase polyprotein,accession number Y12713,Smith-Waterman Score=404.
atgcggaggcttgcattgtacattttagctccagatcgactgcaagaacaaaccagcaatcctgagaggacccacagaccctctgaaggaagcggactgctactgcaggacttgggagagaccccaaatacttctacccaaatgggaaggaaccagaaaaccaatcctggtaatatgacaaaacaaggctcatcaacatgcccctcaaatcacactacttcaccagcaatgaatccaaaccaagaagaaatacctgatttacctgaaaaagaattcaggagtttagttattaagctaatcagggagagaccagagaaagctatgtttgtggccccaccatctactaatctgtgtaagacacttgagggctaccctgaacatttccttttattcccctctcctcattcaatgtactaccaaagttcagtggacaaagtgatgaaagaaaatgatgaactcagggattctttctccaagcttcagaagcagatactgagcctcaaatctgctaagattgccctgagtgagagtcttatctcctgtagagaaagagctgaaattgttgaaaagcagacacaagctcttatcatatctaatggtgggaacagcagtcactcaactacaaaatgtacgtacaatgggaataattggatcctgaggtggcatgggccaagtggcagcactcaactgtcaaaggcccacagaagcaatttgccttcagctggcaaggccagcaatatacctttacaggcctacctcagggatatatcaactctctgtctttgtgttataatcttattccgagagaccctgatctctttgcttctgcaaaatatcacactggtccattacattgatgacattatgctgattggatccagtgagcaagaattagcatacacactggacttactggtgagacgtttgtgtgccaaaggatgggaaataaatctgactgaaattcaggaagcttctacctcagtaaaatttctacgggtccagtggtgtggggcctgtcaagatattccttctaagatgaaggataagttactgcatttgttccctcctacaaccaagaaaaaggcatccctatttggatttcgaaggcagtgcattcctcatttggagtgtggtccagaacaagagaaggctctgcaacaggcgcaggctgctgtgcaagctgctgtgccacttgagcgatatgacccagcagatccaatggttcttgaggctgacctggctatggccactgctgagtgcccaatttgccagcagcggagaccaacactgagccctccatatggcaccgttccttggggtggtcagccagctacctggtggcaagttgattatattggatatcttccatcatggaaagggcagagttttgttctcactggaatagacacttactccggatatgggtttgcctatcctgcacataatgctattgccaagactaccatctgtgaactcacaaaatgccttatccaccgtcatgccaggattcacaggtccaggaatcaaggggtggaagtggcaccactcaccgtcacccctagtgatccattagcaaaatttttgcttcctgttcccatgacattacgttctgctggcctagaggtcttagttccagaggaaggaaccctgccaccaggagacatgacaatgattccattaaactggaagttaaggttgccaactggacactttgggctcctgctacttttaagtcaacaagctaagaagggagttacagtgttggctggggtgattgacccagactatcaagatgaaatcagtctactactccataacagagaactgctggatgaagagatcccctgtcaaaagaaggaaaatcttagagctggaggaggctga

SEQ ID NO: 3397 - DNA, 2226 bp, Homo sapiens
  SIMILAR (421)..(1500): 811254mologous to multiple sclerosis associated retrovirus polyprotein,accession number AF009668,Smith-Waterman Score=1517.
atggttctcttccatgacccacagcttctaatagagctacaacagtcaccacatggcccaaggttccattccttggaatgtgtgaggccaagaaccccaggtgagagaacaaaaggcttgccaccaccttgggagcagcccgccaccatcttgggagctctaagaacaaagacccgccgggccttagaactgatgacccagtactttaacaactggaactgggtctacaacaacataacagatcaggatgaaagtgaattgaatgggaaacgttctccacaaggcaaaaacacccctaagatgtattctggagaattcagcccagtcagagtgcatgtacctttttccctctcagacttgaagcaaattaaaatagacctaggtaaattctcagatgaccctgatggctatattgatgttttacaaggagaggacattctagcaaaagcaggggccattagacacctgaacataggagaaggaacacacgtttgttgtcccctacttgaggaaggaattaatcctgaagtctgggcaacagaaggaaaatatggacgagcaaagaatgctcatcccattcaagttaaactaaaggattctgcctcctttccctaccaaaggcagtacccacttagacccgaggcccagcaaggactccaaaagattgttaaggacctaaaagcccaaggcctagtaaaaccatgcagtagcccctgcaatactccaattttaggagtacagaaacccaatggacaatggaggttagtgcaagatctcaggattatcaatgaggccattgtccctctatacccagctgtacctaacccttatactccactttcccaaatactagaggaagcagagtggtttacagtcctggaccttagggatgcttttttctgcatccctgtacatcctgactctcaattcttatttgcctttgaagatcctttgaacccaatgtctcaactcacctggactgttttaccccaagggttcagggatagcccctatctgtttggccaggcattagcccaagacttgagccagttctcatacttggacactcatgtcctttggtacatggatgatttacttctagctgcccgttcagaaaccttgtgccatcaagccacccaagcgcttttaaacttcctcgccacttgtggctacaaggtttccaaaccaaaggctcagctctgcttacagcaggttaaacacttacggctaaaattatccaaaggcaccagggccctcagtgaggaacgtatccagcctatatcggcttatcctcatcccaaaaccctgaagcaattaagaatgttccttggcataacaggcttctgccaaatatggattaacaggtatggcaaaatagccaggccattatacacactaattaaggaaactcagaaagccaatacccatttagtccgaaggaccagcttgcaacccgtggcatacctgagtaaggaaactgggaccagcttgcaacccgtggcatacctgagtaaggaaattgatgtagtggcaaagcgttggcctcactgtttacgggtagtggcagcaatagcagtcttagtatctaaagcagttaaaatgatacaaggaagagctcttactgtgtggacatctcatgatgtgaacagcatactcactgctaaaggggacttgtggctgtcagacaaccacaatgaagaaaaaatagaacataactggcaacaagtaattgctcaaacctatgccgctcaaggggaccttttagaggttcccttgactgatcccgacctcaacttgtatactgatggaagctcctttgtagaaaaaggacttcgaaaggcggcttacgcagtgttcagtgataatggaatacttgaaagtaatcccctcactccaggaactagcactcagctggcagaactaatagccgtcactcaggcactagaattagaaggaaaaagggaacccgaaaatccagcagacaatgctagctattcctgtgaacctctagaggatctgcgcctgctcttcaggcgacaaccaatcgaagctgtaaaactacaaatggttcttcaaatggagccccagatgcagtccatgactaagatctaccgcggacccctggactggcctgctagcccatgctccaatgttgatgacattgaaggcacccctcccaaggaaatctcaactgcacgacccctactatgccccaattcagcatga

SEQ ID NO: 3398 - DNA, 1389 bp, Homo sapiens
  SIMILAR (76)..(894): 831254mologous to multiple sclerosis associated retrovirus polyprotein,accession number AF009668,Smith-Waterman Score=1168.
atgaacaaagaaatgagtggacaaacttttgtaggaaaacaaaactctgtgagaatgccgaagatcatttcaggactaggagtacagaaacccaacagacagtggaggttagtgcaagatctcaggatcatcaatgaggctgttgtccctctataccaagctgtacgtaacccttatactctgctttcccaaataccagaggaaacagggtggtttacagtcctggaccttaaggatgcccttttctgcatcgctgtacatcctgactctcaattcttgcttgcctttgaagatcctttgaacccaacgtctcaactcacctggactgttttaccccaagggttcagggatagcccccatctatttggccaggcattagcccaagacttgagccagttctcatacctggacactcttgtccttcggtacgtggatgatttacttttagccgccccttcagaaaccttgtgccatcaagccacccaagtactcttaaatttcctcgccacctgtggctacaaggtttccaaactaaaggctcagatctgctcacagcaggttaaatacttagggctaaaactatccaaaggcaccagggccctcagtgaggaacgtatccagcctatattggcttatcctcatcctaaaacccgaaaacaactaagagggctccttggcatcacaggcttctgccaaatatggattcccaggtacagcgaaatagccaggccattacatacactaattaagaaaactcagaaagccaatacccatttagtaagatggacacctgaagcagaagcagcttttcaggtcttaaagaaggccctaacccaagccccagtgttaagcttgccaacggggcaagactttttccttatatgtcacagaaaaaacaggaatagctctaggagtccttacacagcactatggagaggaaaggaattcctgacttccgacggaatacctatcaaacatcaggaagccattaggagattattattggctgtacagaaacctaaagaggtggcagtcttacactgccagggtcatcagaaaggaaaggaaagggaaatagaagggaaccgccaagtggatattgaagccgaaaaagctgcaacgcaggaccctccattagaactgcttatagaaggacccctagtatggggtaatcccctctgggaaaccaaaccccaaatcgaagctgtaagactacaaattgttcttcaaatggagccccagatgcagtccatgactaagatctaccacggacccctggactggcctgctagaccgtgctccaatgttaatgacatggaaggcacccctcctgaggaaatctcaactgcacgacccctactatgcctcaattcagcaggaagcagttaa

SEQ ID NO: 3399 - DNA, 1680 bp, Homo sapiens
  SIMILAR (286)..(687): 731254mologous to Cloning vector pEX100T levansucrase,accession number U17500,Smith-Waterman Score=491.
atggagatacatcttgcagttttttctgcaggcaaagatgagaacaggcaaggcattttaagtggaggaaaggacatgaacaaagatggagaaatgcatggtgagtctctgctttcagctggaaccagagttcagagtacaccaggaggagcgactcaagccttcgcgaaagaaaataaccaaaaagcatacaaagaaacgtacggcgtctctcatattacacgccatgatatgctgcagatccctaaacagcagcaaaacgaaaaataccaagtgcctcaattcgatcaatcaacgattaaaaatattgagtctgcaaaaggacttgatgtgcaattatacatccggcgacaaccatacgctgagagaccctactacgttgaagacaaaggccataaataccttgtattcgaagccaacacgggaacagaaaacggataccaaggcgaagaatctttatttaacaaagcgtactacggcggcggcacgaacttcttccgtaaagaaagccagaagcttcagcagggcgctaaaaaacgcgatgctgagttagcgaacggcgccctcggtatcatagagttaaataatgattacacattgaaaaaagtaatgaagccgctgatcacttcaaacacggtaactgatgaaatcgagcgcgcgaatgttttcaaaatgaacggcaaatgggattttgccgatttcggaaccaccatcaaacaggattttcgcctgctggggcaaaccagcgtggaccgcttgctgcaactctctcagggccaggcggtgaagggcaatcagctgttgcccgtctcactggtgaaaagaaaaaccaccctggcgcccaatacgcaaaccgcctctccccgcgcgttggccgattcattaatgcagctggcacgacaggtttcccgactggaaagcgggcacaactttaaggatgatgagtaccctcagagaccatgtcctttgcctatgtctgagtaccgtctaggcagcacccccccgcaaaacatgatagagactgaaggaaacaataaggaatgtggcactattttatactcaacttgtggaataaaattgattcctgctagaagaattaccaatgttctccgcatcctgtcttcacagcatgattttctgccgacacgtcccttccgttccctgcaaggccatttccagggaggcttacgaagacagcagatgatggtgatggaaggagtctgggtgctgagctgtgccatggacctgctgtgccgctcagctgtgtgtcctctggcacccacaaaatcaaacacctgccttccagatgtttgcacctataggccggcaaagctgactgcagcaagtccttcagaagggagacagtctctattacttgaagggccagtgctgcgactgcgcacttgtgcaactcttaacccagacacatttcttccagacaatgaagaaaagatagaacataactgtcaacaagtaattgctcaaacaatcaaagctataaaactacaaattgttcctcaaatggaaccccagatgcattccatgactaagatctaccgcagacccctggatcagcctgctagcccatgctctgatgttaacgacattggagccacccctcctgaggatatctcaattgcacgacccctactatgccccaattcagcaggaagcagttag

SEQ ID NO: 3400 - DNA, 2055 bp, Homo sapiens
  SIMILAR (1274)..(1357): 531254mologous to multiple sclerosis associated retrovirus polyprotein,accession number AF009668,Smith-Waterman Score=63.
atggtattagtagtagtagcagtagtagtggtggttttggtagtagcagtaattgtagtcgtagtagtagtagtagcagcagtagtggtaggagcagtagtagtagtggtggtggtggtaatggtagtagtggtggtggtagtggtagtagaggaggacaaccagcacaaaactggtgcaataaacaacaataatacagctaagaaccctcaacagagtccatttcactcccctgccacctccactggagcagaggctactcaaatgagaaggaaccagaaaaccaatcctcataatatgacaaaacaagtctctttaacaccccccaaaatcacactagctcaccagcaatggatccaaaccaagaagaaatacctgatttacctgaaaaagcattcaggagtgaataaaatacctaggaatccaacttatgagggatgtgaaggaccttttcaaggagaactacaaaccactgctcaacaaaataaaggaggacacaaacaaacggaagatcattccatgctcatggataggaagaatcaatattgtgaaaatggccatactgcccaagctgtacctaacccttacactctgctttcccaaataccagaggacgcagagtggtttacagtcctggaccctaagcatgccgttttctgcatccctgtacatcctgactctcaattcttgtttgcctttgaagatccttcaaacccaatgtctcaactcatctggactgttttaccccaagggttcaggaatagcccccatctatttggccaggcattagcccaagacttgagccaattctcctacctggacactcttgtccttcggtacatggatgatttacttttagccacccattcagaaaccttgtgccatcaagccacccaagcactcttaaatttccttgctacctgtggctacaaggtttccaaaccaaaggctcagctctgctcacagcaggttaaatacttagggctaaaattatccaaaggcaccagaaccctcagtgaggaacgtatccagcctatactgggttatcctcatcccaaaaccctaaagcaactaacagcgttccttggcataacaggtttctgccaaatatggattcccaggtacagcaaaatagccagaccattaaatacacgaattaaggaaactcaaaaagccaatacccatttagtaagatggacacctgaagcagaagtggctttccaggccctaaagaaggcgctaacacatgccccagtgttaagcttgccagtggggcaaaacttttctttatatgtcacagaaaaaaacaggaatagctctaggagtccttacacaggaactagtgctcagctggcagaactaatagccctcactcgggcaccagaattaggagaaggaaaaagggtaaatatatatgcaaactcaatagggagagaaagggaattcctaacttccaagggaacacttgtcaaacatcaggaagccattaagagattattattggctgtacagaaacctaaagaggtggcagtcttacactgctggggtcatcagaaaggaaaagaaagggaaatagaagagaaccgccaagcggatattgaagccagaagagccgcaaggcaggaccctccattagaaatgcttacagaaggacccctagcattcgagctggcaatggctacggctcgagctgagctttcactcgccatccaccactgctgtttgccgccgccaccgcagacccgctgctggcttccatcccttcggatccggcagggtgtctgctgcattcctgatccagcgagagctataacactcaccgcatggcccaagattccattccttggaatccgtaaggccaagaaccccaggtcagagaaaacgaggcttgccaccatcttggaagcggcctgctgccattttggaagtggcccaccaccatcttgggagctctgggagcaaggacccccggtaacagtacaaactcacattctaaggtcacacctcaaggaactagggaaaccaaaccaaaacccagcagaagaaaggaaataa

SEQ ID NO: 3401 - DNA, 2343 bp, Homo sapiens; identical to SEQ ID NO: 2096
  SIMILAR (334)..(1041): 741254mologous to multiple sclerosis associated retrovirus polyprotein,accession number AF009668,Smith-Waterman Score=862.

SEQ ID NO: 3402 - DNA, 352 bp, Homo sapiens
  SIMILAR (2)..(193): 871254mologous to multiple sclerosis associated retrovirus polyprotein,accession number AF009668,Smith-Waterman Score=292.
ctacaaggtttccaaaccaaaggctcagctctgctcacagcaggttaaatacttatggctaaaattatccaaaggcaccagggccctcagtgaggaacgtatccagcctatactggcttatcctcatcccaaaaccctaaagcaactaagagggatccttggcataacaggcttctgtcgaatatggattcccagtgtaaagctcgccaacggggcaagagtttctttatatgtcacagaagaaacaggaatagctctaggaatacttacacaggttcaagggaccagcttgcaacccatggaatacctgaataaagaaattgatgaactggatcaaggacggactcattga

SEQ ID NO: 3403 - DNA, 900 bp, Homo sapiens
  SIMILAR (238)..(897): 881254mologous to multiple sclerosis associated retrovirus polyprotein,accession number AF009668,Smith-Waterman Score=1019.
atgacatatggtgtgggcaaaggagatatggtagatggaacgaaggaaagaggtgagagaattgagtctgcattgggcacctcacacatcatgagagtggcagagccacagggaagtcaaagctggtgccccgatgaagaactgaggccagtgggctccccagccaccgccgctcagaagctgccaagcacccccggtgctttgggccccacgcacagcactgagtgctgcagtatccccttagaccccaaggcccaacaaggactccaaaagattgttaaggacctaaaagcccaaggcctagtaaaaccgtgcaatagcccctgcaatactccaattttaggagtacagaaacccaacggacagtggaggttagtgcaagatctcaggattatcaatgaggcccttgtccctctatacccagctgtacctaacccttacactctgctttctcaaataccagaggaagcagagtggtttacagtcctgggccttaaggatgactttttctgcatccctgtacatcctgactctcaattcttgtttgcctttgaagaaccttcaaaccccacatctcaactcacctggactgttttaccgaaagggttcagggatagcccccatctatttggccaggtattagcccaaaacttgagccaattctcatacctggacactcttgtccttcggtacgtggatgatttacttttagctgcccgttcagaaaccttgtgccatcaagccacccaagcactcttaaatttcctcactacctgtggctacaaggtttccaaaccaaaggctcagctctgctcacaggaggttacgtacttagggctaaaattatccaaaggcaccagggccctcagtgaggaacgtatccagcctatactggcttaa

SEQ ID NO: 3404 - DNA, 432 bp, Homo sapiens
  SIMILAR (229)..(429): 681254mologous to Homo sapiens envelope protein,accession number AF072508,Smith-Waterman Score=221.
ctgtgccgctcagctgtgtgtcctctggcacccacaaaatcaaacacctgccttccagatgtttgcacctataggccggcaaagctgactgcagcaagtccttcagaagggagacagtctctattacttgaagggccagtgctgcgactgcgcacttgtgcaactcttaacccagacacatttcttccagacaatgaagaaaagatagaacataactgtcaacaagtaattgctcaaacaatcaaagctataaaactacaaattgttcctcaaatggaaccccagatgcattccatgactaagatctaccgcagacccctggatcagcctgctagcccatgctctgatgttaacgacattggagccacccctcctgaggatatctcaattgcacgacccctactatgccccaattcagcaggaagcagttag

SEQ ID NO: 3405 - DNA, 1020 bp, Homo sapiens
  SIMILAR (168)..(902): 821254mologous to multiple sclerosis associated retrovirus polyprotein,accession number AF009668,Smith-Waterman Score=1042.
tgaataaaatacctaggaatccaacttatgagggatgtgaaggaccttttcaaggagaactacaaaccactgctcaacaaaataaaggaggacacaaacaaacggaagatcattccatgctcatggataggaagaatcaatattgtgaaaatggccatactgcccaagctgtacctaacccttacactctgctttcccaaataccagaggacgcagagtggtttacagtcctggaccctaagcatgccgttttctgcatccctgtacatcctgactctcaattcttgtttgcctttgaagatccttcaaacccaatgtctcaactcatctggactgttttaccccaagggttcaggaatagcccccatctatttggccaggcattagcccaagacttgagccaattctcctacctggacactcttgtccttcggtacatggatgatttacttttagccacccattcagaaaccttgtgccatcaagccacccaagcactcttaaatttccttgctacctgtggctacaaggtttccaaaccaaaggctcagctctgctcacagcaggttaaatacttagggctaaaattatccaaaggcaccagaaccctcagtgaggaacgtatccagcctatactgggttatcctcatcccaaaaccctaaagcaactaacagcgttccttggcataacaggtttctgccaaatatggattcccaggtacagcaaaatagccagaccattaaatacacgaattaaggaaactcaaaaagccaatacccatttagtaagatggacacctgaagcagaagtggctttccaggccctaaagaaggcgctaacacatgccccagtgttaagcttgccagtggggcaaaacttttctttatatgtcacagaaaaaaacaggaatagctctaggagtccttacacaggaactagtgctcagctggcagaactaatagccctcactcgggcaccagaattaggagaaggaaaaagggtaaatatatatgcaaact

SEQ ID NO: 3406 - DNA, 1303 bp, Homo sapiens
  SIMILAR (186)..(893): 741254mologous to multiple sclerosis associated retrovirus polyprotein,accession number AF009668,Smith-Waterman Score=862.
acttgaagcatattaaaatagacctagataaattctcagataaccctgatggctatattgatgttttacaagggttaggacaatcctttgatctgacatggagagatataatgttactgctagatcagacactaaccccaagtgagagaagtgccgccataactgcagctcgagagtttggcaatctctggtatctcagtcagtctgggcaacagaaggacaatatggacggacaaagaatgcccgtcctgttcaagttaaaggattctgcttcctttccctaccaaaggcggtacccccttagactggaggcccaacaaggactccaaaagattgttaaagacctaaaagcccaaggcttagtaaaaccattcaatagcccctgcaatactccaattttaggagtacagaaacccaacggacagtggaagttagtacaagatctcaggattatcaatgaggccattgtccctctatacccagctgtacctaacccttatactctgctttcccaaataccagaggaagcagagtggtttacagtcctggaccttaaggatgcctttttctgtatccctgtacatcgtgagtctcaattcttgtttgcctttgaagatccttcaaacccaacatctcaactcacctggactgttttaccccaagggttcaggaatagccctcatctatttggccaggcattagcccaagacttgagccagttctcatacctgaatactcttgtccttcggtacctggatgatttacttttagctgcccatttagaaaccttgtgccatcaagccacccaaaaaaaaacaggaatagctctaggagtccttacacaggttcaagggaccagctttcaacccgtggcacacctgagcaaggaaattgatgtggtggcaaagggttggcctcattgtttatgggtagtggctgcagtagcagtcttagtatctgaagcagttaaaataatacagggaagagaacttactgtgtggacatctcatgatgtaagtggcacactcactgctaaaggagacttgtggctgtcagacaaccttttgcttaatcaggctctattatttaaaaggccagtgctgcgactgcacacttgtgcaactcttaacccagccacatttcttccaaacaataaagaaaagatagaacataaccatcaacaggtgattgttcaaacctacaccattcaaggggaccttctagaggttcccttgactgatcccgacctcaacttgtatactaatggaagttcctttgtagaaaaaggacttcgaaaagcggg

SEQ ID NO: 3407 - DNA, 1650 bp, Homo sapiens
  SIMILAR (622)..(1254): 761254mologous to multiple sclerosis associated retrovirus polyprotein,accession number AF009668,Smith-Waterman Score=814.
atgaacaaagaagattataatgatgatgatgataatggtgatattaagtacctaccagatataaaaactggatacaacaaaacagtacagattccaattacttcagaaaacagtactgtgggtttgtctaatacagaagcagatgaaatggacaggctcaagtgtgaaagagatgatgccttgaaagaagtaaatacacttaagaggagaacgaaaggagggaagcacctgactctaaaggttacctacaccctctctgaaacgaatttgcataagaactatttatgggaatgcatcttgatggggcagctgggttgttatgaaatactcaggaaacccagcccagctctaggactcacccctgagcacaaaggcaacgttgggcacactggtgagaaaacaggtgcaggactgctacatcgcgtccccccgactccttccccaactaataaggaccccctttcaacccaaacggtacaaaaggagatagacaaaggggtaaacaacaaaccaaagagtgccaatattccccgattatgcccactccaagcagtgggaggaggagaatttggtccagccagagtgcatgtacctttttctctctcagacttaatagacctagctgtacctaacccttatactctgctttcccaaataccagaggaagcagagtggtttacagtcctggaccttaaggatgtctttttctgcatccctgtacatcctgactctcaattcttgtttgcctttgaagatcctttgaacccaatgtctcaactcacctgcactgttttaccccaagggttcagggatagcccccatctatttggccaggcattagcccaagacttgagtcagttatcatacctggacactcttgtccttcagtatgtggatgatttacttttagctgcctgttcagaaaccttgtgccatcaagccacccaagcactcttaaatttcctcgccacctgtggctacaaggtttccaaagagaaggctcagctctgctcacagcaggttaaatacttaggactaaaattatccaaaggcaccaaggccctcagtgaggaatgtattcagcctatactggcttatcctcatctcaaaaccctaaagcaactaagagagttccttggcataacaggcttctgccgaatatggatttccaggctctattacttgaaaggccagtgctgcaactgtgcacttgtgcaactcttaacccagtcacatttcttccagacaatgaagatagaatataactgtcaacaaataatttctcaaacctatgccactcgaggggaccttctagaggttcccttgactgatcctgacctcaacttgtatactgatggaagttcctttgtagaaaaaggacctcaaaaagcgggtgaaagaagagctgtgttagcttctcagacttccctcacaccactgggaaggaatggacgtagcatcccagcaacgctggcgcttgaatctaaggaacttgttaaatctgttcgtgccttacttgatatggattgtgcaataccattcttagtgggaacctctattgttgatccttatttaaaatatgaaccaacaaccaagaatcacctaataatggtccagggggagaagaactgcataacagggagattctga

SEQ ID NO: 3408 - DNA, 2220 bp, Homo sapiens
  SIMILAR (7)..(1065): 1001254mologous to Cloning vector pSacBII SacB,accession number U09128,Smith-Waterman Score=1866.
atgaacatgaacatcaaaaaaattgtaaaacaagccacagttctgacttttacgactgcacttctggcaggaggagcgactcaagccttcgcgaaagaaaataaccaaaaagcatacaaagaaacgtacggcgtctctcatattacacgccatgatatgctgcagatccctaaacagcagcaaaacgaaaaataccaagtgcctcaattcgatcaatcaacgattaaaaatattgagtctgcaaaaggacttgatgtgtgggacagctggccgctgcaaaacgctgacggaacagtagctgaatacaacggctatcacgttgtgtttgctcttgcgggaagcccgaaagacgctgatgacacatcaatctacatgttttatcaaaaggtcggcgacaactcaatcgacagctggaaaaacgcgggccgtgtctttaaagacagcgataagttcgacgccaacgatccgatcctgaaagatcagacgcaagaatggtccggttctgcaacctttacatctgacggaaaaatccgtttattctacactgactattccggtaaacattacggcaaacaaagcctgacaacagcgcaggtaaatgtgtcaaaatctgatgacacactcaaaatcaacggagtggaagatcacaaaacgatttttgacggagacggaaaaacatatcagaacgttcagcagtttatcgatgaaggcaattatacatccggcgacaaccatacgctgagagaccctcactacgttgaagacaaaggccataaataccttgtattcgaagccaacacgggaacagaaaacggataccaaggcgaagaatctttatttaacaaagcgtactacggcggcggcacgaacttcttccgtaaagaaagccagaagcttcagcagagcgctaaaaaacgcgatgctgagttagcgaacggcgccctcggtatcatagagttaaataatgattacacattgaaaaaagtaatgaagccgctgatcacttcaaacacggtaactgatgaaatcgagcgcgcgaatgttttcaaaatgaacggcaaatggcagtacccccttagacccaaggctcaacaaggactccaaaagattgttaaggacctaaaagcccaaggcctagtgaaatcatgcaatagcccctgcaatactccaattttaggagtacagaaacccagcagacagtggaggttagtgcaagaactcaggattatcaatgaggccgttgtccctctagacccagctgtacctaaccctcatactctgctttcccaaataccagaggaagcagtgtggtttacagtcctggaccttaaggatgcctttttcagcatccctgtacatcctgactctcaattcttgtttgcctttgaagatccttcaaacccaacgtctcaactcacctggactgttttaccccaagggttcagggatagcccccatctatttggccaggcattagcccaagacttgagccaattctcatacctggacactcttgtccttcggtacatggatgatttacttttagctgccagttcagaaaccttgtgccatcaagccacccaagcgctcttaaatttccttgctacctgtggctacaaggtttccaaaccaaacgctcagcactgctcacagcaggttaaatacttagggctaaaattatccaaaggtaccaaggcccttggtgaggaacgtatccagcctatactggcttaccctcatcccaaaaccctaaagcaactaagagggttccttggcataacaggtttctgccaaatatggatattcccagtaagatggacacctgaagcagaagcagctttccaggccctaaagaaggccctaacccaagccccagtgttaagcttgccaacagagcaagacttttctttatatgtcatagaaaaaacaggaatagctctaggagtccttacacagatccaagggacaagcttgcaacccatggcatacctgagtaaggaaattgatgtagtggcaaagggttggcctcattgtttacgggtagtagcggcagtagcagtcttagtatctgaagcagttaaaataatacagggaagagattttattgtgtggacatcttatgatgtgaatggcatactgactgctaaaggagacttgtggctgtcagacaaccgtttacttaaatatcaggctctattacttgaagggccagtgctgtga

SEQ ID NO: 3409 - DNA, 1446 bp, Homo sapiens
  SIMILAR (238)..(645): 841254mologous to multiple sclerosis associated retrovirus polyprotein,accession number AF009668,Smith-Waterman Score=614.
atgaatcaaagtgaccaggaaatgactggagcgtttgtccacatgaaaagttatacgggcctgatctcaggggtggcagtaaagatggaaagacacatttatcaagacagacgaattgcaatagagaaagagtttaattcatgtagaactggctgtatgggagactggagttttactattactcaaatcagactcctggaaaacacagggatcagggtttttaaggataatttggtagaggaagcagagtggtttacagtcctggaccttatggatgcctttttctgcatccctgtacatcctgactctcaattcttgtttgcctttgaagatccttcgaacccagcatctcaacttacctggactgttttaccccagaggttcaagaatagtccccatctatttggccaggcattagcccaagacttgagccagttctcatacctggacactcttgtccttcggtacatggatgatttacttttagctgcctattcagaaaccttgtgccatcaagccaccgaagctctcttaaatttcctcgccacctgtggctacaaggtttccaaaccaaaggctcagctctgctcacagcaggttaaatacttagggctaaagttatccaaaggcaccagggacctcaccacatttcttccagtcaatgaagaaaagatagaacataactgtcaacaagtaattgctcaaagctacgctgctcgaggggaacttctagaggttcccttggctgatcctgacctcaacttgtatactaatggaagttcctttgtagaaaaagcacttgaaaagtggatctatgtggttcctctcattcttagcgcccccatgatcatctacactgaacaagatttatacaattatgtcatacctaagtcccataacaaaagagtacccattctttcttttgttattggagcaggagtgctagacggactaggtgctggcattggtggtatcaaaacctctactcagttctactataaactatctcaagaactaaatggtgacatggattgggtcaccaactcactggtcaccttgcaagatcaacttaactccctagcagcagtagtccctcaaaatcgaagagctttagacttgctaactgctgaaagagggggaacctatttatttttaggggaagaatgttattatgctaatcaatccagaatcatcactgagaaagttaaagaaattcaagatcgaatacaacatagaccagaggagcttcaaaacaccagacgctggggcctcctctgccaatggatgcactggattctccccttcttaggacctctagcagctataatattgttactcctctttggaccctgtatctttaatctctttgttaagtttgtctcttccagaatcaaagctgtaaagctacaaatgttcttcaaatggagtcccagatgcagtccatga

SEQ ID NO: 3410 - DNA, 1493 bp, Homo sapiens
  SIMILAR (262)..(1191): 831254mologous to multiple sclerosis associated retrovirus polyprotein,accession number AF009668,Smith-Waterman Score=1340.
atgcctcttctccaaatgattgcaacacctctccagcaatctctgatttctacggaggatgagatggatgaattgacagaagtaggctttgaaaggtgggtaataacaaacttcactgaggaacccagcccagctctaggattcacccctgagcacaaaggcaatgttgggcatgctggtaaaggaccactagaatccagcagcccagacccctttctttgtggtcaagaaaagcaggaaaagggtgcaggactgctacatcggcagtacccccttagacttgaggccaaacagggactcaaaaaaattgttaaggacctaaaagcccaaggcctagtaacaccatgcagtagcccctgcaatactccaactttagcagtacagaaacccaacggacagtggaggttagtgcaagatctcaggattatcaatgaggctgttgtccctctatacccagctgtacctaacccttacattctgctttcccaaataccagaggaagcagagtggtttacagtcctggaccttaaggatgcctttttctgcatccctgtacatcctgactctcaattcttgtttgcctttgaagatccttcaaacccaatgtctcaactcacctggactgttttaccccaagggttcagggatagcctccatctatttggccaggcattagcccaagacttgagccagttctcatacctggacactcttgtccttcagtatatggatgatttacttttagtgacccattcagaaaccttgtgccatcaagccacccaagtactcttaaatttcctcgccacctgtggctacaaggtttccaaactaaaggctcagatctgctcacagcaggttaaatacttagggctaaaactatccaaaggcaccagggccctcagtgaggaacgtatccagcctatattggcttatcctcatcctaaaacccgaaaacaactaagagggctccttggcatcacaggcttctgccaaatatggattcccaggtacagcgaaatagccaggccattacatacactaattaagaaaactcagaaagccaatacccatttagtaagatggacacctgaagcagaagcagcttttcaggtcttaaagaaggccctaacccaagccccagtgttaagcttgccaacggggcaagactttttccttatatgtcacagaaaaaacaggaatagctctaggagtccttacacagcactatggagaggaaaggaattcctgacttccgacggaatacctatcaaacatcaggaagccattaggagattattattggctgtacagaaacctaaagaggtggcagtcttacactgccagggtcatcagaaaggaaaggaaagggaaatagaagggaaccgccaagtggatattgaagccgaaaaagctgcaacgcaggaccctccattagaactgcttatagaaggacccctagtatggggtaatcccctctgggaaaccaaacccca

SEQ ID NO: 3411 - DNA, 2862 bp, Homo sapiens
  SIMILAR (1606)..(2799): 641254mologous to multiple sclerosis associated retrovirus polyprotein,accession number AF009668,Smith-Waterman Score=1223.
atgacagtggattatcataagcttaaccaagtggtgactccaattgcagctgctgtaccagatgtggtttcattcattgagcaaattaacacatctcctggtatctggtatgcagccattgacttggcaaatgtctttttctccattcctgtccataaggcccaccagaagcaatctgtcttctgctggcaaggccaggaatatacctttactgtcctacctcaggtgcatatcaactgtccagctttgtgtcataatcctattctgagagattttgatcacttttcccttccacaagatatcacactggtccattacattgatgacattatgctgattggttccagtgtagaatatgttgctgcatttggtccctcctacaaccaagaaagagacacaacacctagaggtcctatttggattttggaggcaacacattcctcatttggccaccccgtcatcacccaatggacccatgaacaaagtgaccatgatggcaggaatgtaggttatgcatgggatcagaaacatggacttccactcaccaaggctaacctggttatggccattggtgaatgctcagtttaccagcagcagagactaacactgagccctcaatatggcaccattcctcaggccaggattcacaagtccaggaatcaaagggtggaaatggaagtggcaccactcaccatcacccctagtgatccactagtaaaatttttgcttcctgttcccatgacattacattctgctggcctagaggtcttagttctagagggagaaatgctgccactaggagacacaacaacaatttcattaaacctgaagttaagattgctttctggacactttgggatcctcctacctttaagtcaacaggctaagaaaggagttaaagtgttggctggtgggattgacatgaactaccaagataaaatcagtctactactccacaagggagtgtctccatcattccccatgggcagccacctcaccaattatttggcgtggctaaggcaagaacctttggcattacatgatgagaaacaaattcactgtgcactttctaaaaatgtctgtccagtgaaacaggacgcacttatccacaagtttgtctcttccagaatcgaagatgtaaaactacaaatcgttcttcaaatggagtcccagatgcaatccatgactaagatctaccacggacccttggactggcctactagcccatgctctgatgttaatgacatcaaagtcacccctcctgaggaaatctcaactgcaccaccccactacgccccaattcagcacgaagcagttaaagcggtcatcggccaacctccccagcagcatttgggttttcctgttgagagcagggtgtccgctgtgctcctgatccagcgagcttctaatagagctataacactcaccacatggcccaagattccattccttggaatccgtaaggcccagaaccccatgtcagagaatacgaggcttgccaccatcttggaagcggcccgccaccatcttggaagaggctcgccaccatcttggaagctctgtgagcaaggacccccggtaacattttggcgatcacaaagggacctccaaagtgctgtacctagcccttatactctgctttcccaaataccagaggaagcagagtggtttacagtcctggacgttaaggatgcctttttctgcatccctgtacatcctgactctcaattcttgtttgcctttgaagatccttcaaacccaacgtctcaactcacctggactgttttaccccaagggttcaaggatagcccccatctatttggccaggcattagcccaagacttgagccaattctcatacatggacactcttgtcctttggtatggggatgatttaattttagccacccattcagaaaccttgtgccatcaagccacccaagtgctcttaaatttcctcactacctgtggctacaaggtttccaaacgaaaggctcagctctgctcacagcaggttaagtacttagggctaaaattatccaaaggcaccacggccctcagtgaggaatgtatccagcctaaactggcttatcctcatcccagaaccctaaagcaactaagagcattccttggcataacaggcttctgccaaatgtggattcccaggtacagcaaaatagccaggccattatatacactaattaaggaaactcagaaagccaatacccatttagtaagatggacacctgaagcagaagcagctttccataccctaaagaaggccctaacccaagccccagtgttaagcttgccaacagggcaagacttttctttatatgtcacagaagaaaaaggaatagctctaggagtccttatacaggtccgagggacgagcttgcaacctgtggcatacctgaataaagaaaatgatgtagtagcaaagggaactagtgctcagctggcagaactaatagccctcactcgggcactagaattaggagaagggaaaagtgtaaatatatatacagactctaagtatgcttacctagtcctccatgccaaggaagcaatatggagagaaagggaattcctaacttccaaggaaacacctatcaaacatcaggaagccattaggagattactactagctgtacagaaacctaaagaagtgacagtcttacactgcccgggtcaccagaaaggaaaggaaaaggaaataggaaggaaccaccaagcggatattgaagccaaaagagccacaaggcaggactctccattagaaatgcttatagaaggacccttagtatggggtaatcccctccaggaaaccaagccccagtactcagaagaagaaatagaatga

SEQ ID NO: 3412 - DNA, 1428 bp, Homo sapiens
  SIMILAR (159)..(1238): 811254mologous to multiple sclerosis associated retrovirus polyprotein,accession number AF009668,Smith-Waterman Score=1517.
atgggaaacgttctccacaaggcaaaaacacccctaagatgtattctggagaattcagcccagtcagagtgcatgtacctttttccctctcagacttgaagcaaattaaaatagacctaggtaaattctcagatgaccctgatggctatattgatgttttacaaggagaggacattctagcaaaagcaggggccattagacacctgaacataggagaaggaacacacgtttgttgtcccctacttgaggaaggaattaatcctgaagtctgggcaacagaaggaaaatatggacgagcaaagaatgctcatcccattcaagttaaactaaaggattctgcctcctttccctaccaaaggcagtacccacttagacccgaggcccagcaaggactccaaaagattgttaaggacctaaaagcccaaggcctagtaaaaccatgcagtagcccctgcaatactccaattttaggagtacagaaacccaatggacaatggaggttagtgcaagatctcaggattatcaatgaggccattgtccctctatacccagctgtacctaacccttatactccactttcccaaatactagaggaagcagagtggtttacagtcctggaccttagggatgcttttttctgcatccctgtacatcctgactctcaattcttatttgcctttgaagatcctttgaacccaatgtctcaactcacctggactgttttaccccaagggttcagggatagcccctatctgtttggccaggcattagcccaagacttgagccagttctcatacttggacactcatgtcctttggtacatggatgatttacttctagctgcccgttcagaaaccttgtgccatcaagccacccaagcgcttttaaacttcctcgccacttgtggctacaaggtttccaaaccaaaggctcagctctgcttacagcaggttaaacacttacggctaaaattatccaaaggcaccagggccctcagtgaggaacgtatccagcctatatcggcttatcctcatcccaaaaccctgaagcaattaagaatgttccttggcataacaggcttctgccaaatatggattaacaggtatggcaaaatagccaggccattatacacactaattaaggaaactcagaaagccaatacccatttagtccgaaggaccagcttgcaacccgtggcatacctgagtaaggaaactgggaccagcttgcaacccgtggcatacctgagtaaggaaattgatgtagtggcaaagcgttggcctcactgtttacgggtagtggcagcaatagcagtcttagtatctaaagcagttaaaatgatacaaggaagagctcttactgtgtggacatctcatgatgtgaacagcatactcactgctaaaggggacttgtggctgtcagacaacc

SEQ ID NO: 3413 - DNA, 5154 bp, Homo sapiens
  SIMILAR (2489)..(3382): 861254mologous to multiple sclerosis associated retrovirus polyprotein,accession number AF009668,Smith-Waterman Score=1311.
atgcagtgggaagaggctgagaaagacccttctggcagttgtgtgttccagcggcctcctgtggcccttgtcttccccctacactccaagtggacgttggtgaacagcccaccaagctcaggcgatccctacgtgccaggacgaccagcacagtcaggacagctttccctcagccctgcacctccatatgttcttcctggccccgggaaaataaagcaagcaggcaacaacccatcactgacaagcatctaccgttcagaagtcttctgtgcccaccgccacctccaccccccgcagctggtgtgtgcccgtggacacattggatcagcgcatctcagtgtggacaggggcagcctcatctgggaagtgttagaaagcacagtctgggcgcgcaccaatgagtggagtccagtgacccggacggttctcatttcagctttggcatctacacacattccacagccctgcgagtctcgtccacccgtccctccagaatatgaggtgacagtccttcggagtcaaggcactgctcagctcccgccctggtcctcttccaccagctggaggctgacagatccttcctgcccaaaacatgctgcctggctgactgaccttgcctccagcaaaggcccagcggctggtggaactggctccttctcccagccaggcaccttgacatccacaagaacaaatcctcttaagaaagaaaaaagtcccgaggacttaaagcaaattaaaatagacctaggtaaattctcagataaccctgatggctatattgatgttttacaagggttaggacaatcctttgatctgacatggagagatataatgttactgctaaatcagacactaaccccaaatgaaaaagtgccaccattactgcagcctgagagtttggcgatctctggtatctcagtcagagatcaggaggagcaggcagaacaggacaaacaggataaaaaaaaggccatcactttagtcatggccctcaggcaagtggactttggaggctctgtaaaagggaaaagctgggcaaatcgaatgcctaatagggcttacttccagtgcggtctacaaggacactttaaaaaagattgtccaagtagaaagccccaggtatgcttgaccattgagagccaagaggttaactgtctcctggacgccggtgcggccttctcagtcttactctcctgtcccggacaactgtcctccagatctgtcactatccgaggggtcctaggacagccagtcactagatacttcttccagccactaagttgtgactggggagctttacccttttcacatgctttcctaattatgcctgaaagcctcactcccttgttagagagagagattctagtaaaagcaggggccattatacacctgaacataggagaaggaacacccatttgtcgtctcctgtttgaggaaggaattagtcctgaagtctgggcaacagaaggacaatatggacaagcaaagaatgcccattttgtccaagttaaactaaaggattccacctcctttccctatcaaaggcagtaccccctcagacccgaggcccaacaaagactccaaaagattgttaaggacctaaaagcccaaggcctagtaaaaccatacagtagcccctgcaatactccaattttaggagtacagaaacccaaaagacagtggaggttagtgcaagatctcaggattatcaatgaggctgtttttcctctatacccagctatacctagcccttatactctgctttcccaaataccagaggaagcagagtggtttacagtcctggatcttaaggatgcctttttctgcatccctgtacatcctgactctcaattcttgtttgcatttgaagatccttcaaacccaacatctcaactcacctggactgttttaccccaagggttcagggatagtccccatctatttggccaggcattagcccaagacttgagccagttctcatacctggacactcctgtccttcagtgcatggatgatttacttttagctgcccgttcagaaaccttgtgccatcaagccacccaagcgctcttaaatttcctcactacctgtggctacaaggtttccaaaccaaaggctcagctctgctcacagcaggttaaatgcttagggctaaaattatccaaagtcaccagggccctcagtgaggaacgtatccagcctatactggcttatccttatcccaaaaccctaaagcaactaagagggttccttggcataacaggtttctgccgaatatggattcccaggtacggcaaaatagccagaccgttatatacgctaattaaggaaactcagaaagccaatacccatttagtaagatggacacctgaagcagaagcagctttccatgccctaaagaaggccctaatgcaagccccagtgctaagcttgctaacggggcaagacttttcctcatatgtcacaaaaaacaaacaaacaaagaaaaaaaaaaacatgaatagctctaagagtccttgcgctggtctgagggacgagtttgcaacccgtggcatacctgagtaagaaaactgatgtagtggcaaagggttggcctcattgtttatgggtaatggcagcaatagcagtcttaatatctaaagcagttaaaatgatacagtgaagagatcttactgtgtggacatctcatgatgtgaatggcatactcactgctaaaggagacttgtggctgtcagacaactgtttacttaaatgtcaggctctattacttgaagggccagtgctgcgactgtgcacttgtgcaactcttaacccagccacatttcttccagacaatgaagaaaagataaaacataactgtcaacaagtaatttctcaaacctatgccactcgaggggaccttttagaggttcctttgactgatcccgacctcaacttgtatactgatggaagttcctttgtagaaaaaggacttcgaaaagtggggtatgcagtggtcagtgataatggaatacttgaaagtaatcccctcactccaggaactagtgctcagctagcagaactaatagccctcacttgggcactagaattaggagaaggaaaaagggtaaatatatatacagactctaagtatgcttacctagtcctccatgcccatgcagtaatatggagagaaagggaattcctaacttctgagggaacacctatcaaacatcaggaagccattagggaattattattggccgtacagaaacctaaagaggtggcagtcttacactgccggggtcatcagaaaggaaaggaaagggaaatagaaaggaaccgccaagcagatattgaagccaaaagagctgcaaggcaggaccctccattagaaatgcttatagaaggacccctagtatggggtaatcccctctgggaaaccaagccccagtattcagaagaagaaatagaatggggaatctcacgaggacatagttttctcccctcaggatggcaagccaccgaacaaggaaaaatacctttgcctgcagctaaccaatggaaattacttaaaaccactcaccaaaactttcacttatgcattgatagcacccatcagatggccaaattgttatttactggaccaggacttttcaaaactctcaagcagatagttggggcctgtgaagtgtgccagagaaataatcccctgccttatcgccaagctccttcaggagaacaaagaacaggccattaccctggagaagactggcaactgattttacccacaagcccaaacctcagggatttcagtatctactagtctgggtagatactttcacgggttgggcagaggccttcccctgtaggacagaaaaggcccaagaggtaataaaggcactagttcatgaaataattcccagattcggacttccccgaggcttacagagtgacaatagccctgctttccaggccacagtaacccagggagtatcccaggcgttaggtatacgatatcacttacactgcgcctgaaggccacagtcctcagggaaggtcgagaaaatgaatgaaacactcaaaggacatctaaaaaagcaaacccaggaaacccacctcacatggcctgttctgttgcctatagccttaaaaagaatctgcaactttccccaaaaagcaggacttagcccatacgaaatgctgtatggaaggcccttcataaccaatgaccttgtgcttgacccaagacagccaacttagttgcagacatcacctccttagccaaatatcaacaagttcttaaaacattacaaggaacctatccctgagaagaggaaaagaatattccacccaagtgacatggtattagtcaagtcccttccctctaattccccatccctagatacatcctgggaaggaccctacccagtcattttatctaccccaactgcggttaaagtggctggagtggagtcttggatacatcacacttgagtcaaatcctggatactgccaaaggaacctgaaaatccaggagacaacgctagctattcctgtgaacctctagaggatttgcgcctgctcttcaaacaacaaccaggaggaaaaatcgaagctgtaaaactacaaatggagcccaagatgcagtccaagactaagatctaccgcagacccctggaccggcctgttagcccacgatctgatgttaatgacatcaaaggcacccctcctgaggaaatctcagctgcacaacctctactacgccccaattcagcaggaagcagttagagcggtcgtcggccaacctccccaacagcacttaggttttcctgttgagatgggggactgagagacaggactagctggatttcctaggctgattaagaatccctaagcctagctgggaaggtgaccacatccacctttaaacacggggcttgcaacttagctcacacctgaccaatcagagagctcactaaaatgctaattaggcaaagacaggaggtaaagaaatagccaatcatttattgcctgagagcacagcaggagggacaatgatcgggatataaacccaagttttcgagccggcaacggcaaccccctttgggtcccctccctttgtatgggagctctgttttcatgctatttcactctattaaatcttgcaactgc

SEQ ID NO: 3414 - DNA, 444 bp, Homo sapiens
  SIMILAR (63)..(158): 841254mologous to Homo sapiens C protein,accession number M16342,Smith-Waterman Score=134.
tacagtctggtggaattccacactcttgtgctccagaaatctgatgtggaggcagtcttttaaagtattgttttattgtgggctgctctgttcataagggctttgcctttgtttagtatgtgaatgagagaaatgcccgggccgctgtaggtggagatgtacagctcctcttttgacttggaccatgactttcaacgggattattatgataggatgtacagttacccagcacatgttcctcctcctcctattgctcgggctgtagtgccctcgaaatgtcagcatgtatcaggaaacatgaaggggaaaaagtggcttcaattctaagagaggacagcggggatcttccaagtctggaaagttgaaaggagatgaccttcaggccattaagaaggaattgacccagataaaacaaaaagtggattctctcttagaaaacctaag

SEQ ID NO: 3415 - DNA, 124 bp, Homo sapiens
  SIMILAR (3)..(89): 1001254mologous to Homo sapiens C protein,accession number M16342,Smith-Waterman Score=160.
  misc_feature (1)...(124): n = a,t,c or g
gggactattatgataggatgtacagttacccagcacgtgtacctcctcctcctcctattgctcgggctgtagtgccctcgaaacgtcagcntgaagaaagatgagactaatgtgaagatggagt

SEQ ID NO: 3416 - DNA, 316 bp, Homo sapiens
  SIMILAR (153)..(314): 901254mologous to Homo sapiens hnRNP C2 protein,accession number M29063,Smith-Waterman Score=260.
cccgggtggccgcgttgccgacctccagcagcagtcggcttctctacgcagaacccgggagtaggagactcagaatcgaatcttttctccctccccttcttgtgagatttttttgatcttcagctacattttcggctttgtgagaaaccttaccatcaaacacgatggccagctcctcttttgacttggactatgactttcaacgggactattatgataggatgtacagttacccagcacgtgtacctcctcctcctcctattgctcgggctgtagtgccctcgaaacgtcagcgtgtatcaggaaacacttcacg

SEQ ID NO: 3417 - DNA, 1740 bp, Homo sapiens
  SIMILAR (123)..(392): 771254mologous to Homo sapiens C protein,accession number M16342,Smith-Waterman Score=334.
ggaattccaaacccgggagtaggagactcagaatcgaatctcttctccctccccttcttgtgagatttttttgatcttcagctacattttcggctttgtgagaaaccttaccatcaaacacgatggccagcaacgttaccaacaagacagatcctcgctccatgaactcccgtgtattcattgggaatctcaacactcttgtggtcaagaaatctgatgtggaggcaatcttttcgaagtatggcaaaattgtgggctgctctgttcataagggctttgccttcgttcagtatgcttatgagaagaaatgcccgggctgctgtagcaggaagaggatggcagaatgattgctggccagggttttagatattaacctggctgcagagcccaaaagtgaaccgaggaaaagcaggtgtgaaacgatctgcaagcggagatgtacgggtcagtaacagaacacccttctccgtcccctctactcagctcctcttttgaccttggacctatgactttcaacgggactattatgataggatgtacagttacccagcacgtgtacctcctcctcctcctattgcctcgggctgtagtgccctcgaaacgtcagcgtgtatcaggaaacacttcacgaaggggcaaaaagtggcttcaattctaagagtggacagcggggatcttccaagtctggaaaagttgaaaggagatgaccttcaaggccattaaggaaggagctgacgccagataaaacgaaaaagtgggattctctcctgggaaaacctggaaaaaatttgaaaaggaacagagcaaacaagcagtagagatgaagaatgataagtcagaagaggagcagagcagcagctcccgtggaagaaagatgagactaatgtgaagatggagtctgaggggggtgcagatgactctgcctgaggagggggacctactgggatgaatgaatgataatgaaagatcggggggatgaccagctggagtttgatcaaggatgatgaaaaagaggctgaggaaggagaggatgacagagacagcgccaatggcggaggatgactcttaagcacatagtggggtttagaaatcttatcccattatttctttacctagggcgcttgtctaagatcaaatttttcaccaagatcctctcccctagtatctttcagcacatgctcactggttctccccatccttgtccttcccatgttcattaaattcatatttgccccgcgcctaagtcccattttcacttcctttgacgctcctagtagttttgttaagtcttaccctgtaatttttgcttttaattttgatacctctttatgacttaacaataaaaaggatgtatggtttttatcaactgtctccaaaataatctcttgttatgcagggagtacagttcttttcattcatacataagttcagtagttgcttccctaactgcaaaggcaatctcatttagttgagtagctcttgaaagcagctttgagttagaagtatgtgtgttacaccctcacattagtgtgctgtgtggggcagttcaacacaaatgtaacaattatttttgtgaatgagagttggcatgtcaaatgcatcctctagaaaaataattagtgttatagtcttaagatttgttttctaaagttgatactgtgggatttttgtgaacagcctgatgtttgggaccttttttcctcaaaataaacaagtccttattaaaccaggaatttggag

SEQ ID NO: 3418 - DNA, 509 bp, Homo sapiens
  SIMILAR (426)..(1): 581254mologous to Homo sapiens precursor polypeptide (AA -29 to 315),accession number X16396,Smith-Waterman Score=478.
  misc_feature (1)...(509): n = a,t,c or g
gacgcacaatcttccaatattgataatatganatccatctacatctttttctggggcaattccattgcatattgttcgctcatcaacgtggtctggtagtggtaactgaactaatataccgctgactcttgggtccatattcaattgatcagttacgtccaaaagttcttcctgagaaacatccttaggttttagaatgagctcactacaaatacctacagcagaggcagctcttatcttattcctgacatatgtatggcttgctgggttatctcccactaaaattatactgaggtgaggtcttctgtttccaagggaaacccatgattccacacctcgctgtatttctttctggatatgcttggccatttcggttcctgatataataatggcttcatgtctcacaccgctgctccgaaagccccggaacgcactcccgggctctcccggtgcccttacggagggtgctgtgcttctgcccaacgccggcgctcggccaaggcggccgc

SEQ ID NO: 3419 - DNA, 655 bp, Homo sapiens
  SIMILAR (139)..(38): 451254mologous to Homo sapiens Human secreted protein, SEQ ID NO: 7153,accession number G03072,Smith-Waterman Score=74.
cggggatccgcggccatgacggtgccggtccgcggcttctcgctgctccgcggccgccttggccgagccgccgccgttggggcagaagcacagcaccctccgtaagggcaccgggagagcccgggagtgcgttccggggctttcggagcagcggtgtgaggaccagcagagagaagagattccatcttccagaggttgccactgtctgcctccccacttgtccccatccacagtcatcctttttatatatataatgacacattagttgtctagttcttcatagttaatgtggtttaagtctgacatcttttcttttgccatgaaatttacaccttagtgttattctcactgaaaattgcctttgagtttgataaactcttatcccagtgatattgactgttttaaattaacagatttatcaccatttctgagctgtgtagggccttaattgaaaaagtatctttgattattttttcacattttggccacatgcctataataatggaatatttacagtactttttagtggagaacttttttaagtagaatttcaataattaatgtttgatggagtttggaagttaccgtattttgaagtatcgtttaacattcttctctcaatgagttttcctttaaaatgtgcagtgaatttgtt

SEQ ID NO: 3420 - DNA, 2061 bp, Homo sapiens
  SIMILAR (459)..(364): 561254mologous to Homo sapiens Human secreted protein, SEQ ID NO: 4473,accession number G00392,Smith-Waterman Score=89.
gactgtgactatggtacgaaggatgctacacttggttctcttgacaacgctctgtgtctgacacagtgtgggactgttcctactgccgtgaaaggttctgatgttccatgcatcatcaggaaagatttctccaatagtacaggccatcatactccaaatggtcaagcaactggagcctcagacaatgaccccttctgccggggacccttagataggcttctgagggagactggactgacatttccccaaaacagcaccctctgtcagcagcaagcagttaagattggtctttgtccttatcacaatccttattctaatggcaatagggtgcctcttgaagaaaaactacctgagatacactttttccaaagggcagctagtactagcaagtcgcagcaggcaaagaaggattggagtggacctccagcaaactccagcagacctgcagcagaggggcctgttagaaggaaaactaccaaacagaaaggagtagcatcaacaccaacaaacaggacgtccacacaaaaaccccatccgaaggacaccaacatcaaagaccaaaggtaccaggtcttcccctgcagatctaggtaccagggccattccagaggaccctgggcaagcctagtccccacagacttgggaccagacccattccaatgccaggctggtccccatggactcaggctcaagacctaccccagtgccaggatggcccctatgaacctaggcttcaggtctgtatttgcagaccaaggctccaggactactcctatatacccagttgacagcccaccccagtggacccatgcaccggaattagccccctgtgacattttttggctagccgacatttctctacggatgacacagtgtgaagagttacattcagaagtgacctcattgacccaagtagtgaaaccagaaagctgtccagtcatggcagtcggtccgtccatgcatatactgacacaaaatgaccaattgagttttcctgatatgcaatcattcaaagacttgaatagttctgcagctatggtattagttggcaacaaaagtgcacataacatatcctcatgcacatcttctgaaaaatatattgcacaaaatgcctcaaatgtcttcctaaatcaagtgcacctgctgcaaagatggaacattctggtgcgagagcccagagcagagcacgttttcgttccccaagctgaggcaactgcgactcgcccgcgcgaccggcaaggccacctcacagacaaggctgtcctcgacccagcccgccgccgcgcggccgcccacgagccttgggccccacgcgcgcgagcgccgcccgcgcccccgccgacctcccaccgccagcggctccgcacccggcgcccgcagccctcgtacctcacaccgctgctccgaaagccccggaacgcactcccgggctctcccggtgcccttacggagggtgctgtgcttctgcccaacgccggcgctcggccaaggcggccgcggagcagcgagaagccgcggaccggcaccgtcatggccgcggatccccggcttccggactggggctccacctcccgcgactccagtcctcgcggctggaggcctggctccgccctcacccgggctggcagggcagcaagtagcgcttcccagccaggttccggcagacacgcagagtggggtaaagagcggttcccaggaccggggacggaactgacagagtgccgggtccgcagggggcggggccaggacccaagtcccgggccctctgaggatgtggaagcgtgcagtgtggcctggcgactgggccccgcacccagccaacatatagctggcattcccatagcgacggcacagagaaggcctccaaactatcactttaggcagcacgccccactttccaccaagccagagatcctgcccaacagtctccgtgactacgtggaattggatttaaagcaggaaagaagtaataggttcattgtttcccacttcctttgtgagattccttggaagttggagaaaagaacaaaggtgtgtggagaaggagcaaaacctggctga

SEQ ID NO: 3421 - DNA, 2349 bp, Homo sapiens
  SIMILAR (1)..(2346): 1001254mologous to Homo sapiens myosin-IE,accession number X98411,Smith-Waterman Score=4141.
caggagaagctgaccagccgcaagatggacagccgctggggcgggcgcagcgagtccatcaatgtgaccctcaacgtggagcaggcagcctacacccgtgatgccctggccaaggggctctatgcccgcctcttcgacttcctcgtggaggccatcaaccgtgctatgcagaaaccccaggaagagtacagcatcggtgtgctggacatttacggcttcgagatcttccagaaaaatggcttcgagcagttttgcatcaacttcgtcaatgagaagctgcagcaaatctttatcgaacttaccctgaaggccgagcaggaggagtatgtgcaggaaggcatccgctggactccaatccagtacttcaacaacaaggtcgtctgtgacctcatcgaaaacaagctgagccccccaggcatcatgagcgtcttggacgacgtgtgcgccaccatgcacgccacgggcgggggagcagaccagacactgctgcagaagctgcaggcggctgtggggacccacgagcatttcaacagctggagcgccggcttcgtcatccaccactacgctggcaaggtctcctacgacgtcagcggcttctgcgagaggaaccgagacgttctcttctccgacctcatagagctgatgcagtccagtgaccaggccttcctccggatgctcttccccgagaagctggatggagacaagaaggggcgccccagcaccgccggctccaagatcaagaaacaagccaacgacctggtggccacactgatgaggtgcacaccccactacatccgctgcatcaaacccaacgagaccaagcacgcccgagactgggaggagaacagagtccagcaccaggtggaatacctgggcctgaaggaaaacatcagggtgcgcagagccggcttcgcctaccgccgccagttcgccaaattcctgcagaggtatgccattctgacccccgagacgtggccgcggtggcgtggggacgaacgccagggcgtccagcacctgcttcgggcggtcaacatggagcccgaccagtaccagatggggagcaccaaggtctttgtcaagaacccagagtcgcttttcctcctggaggaggtgcgagagcgaaagttcgatggctttgcccgaaccatccagaaggcctggcggcgccacgtggctgtccggaagtacgaggagatgcgggaggaagcttccaacatcctgctgaacaagaaggagcggaggcgcaacagcatcaatcggaacttcgtcggggactacctggggctggaggagcggcccgagctgcgtcagttcctgggcaagaaggagcgggtggacttcgccgattcggtcaccaagtacgaccgccgcttcaagcccatcaagcgggacttgatcctgacgcccaagtgtgtgtatgtgattgggcgagagaagatgaagaagggacctgagaaaggtccagtgtgtgaaatcttgaagaagaaattggacatccaggctctgcggggggtctccctcagcacgcgacaggacgacttcttcatcctccaagaggatgccgccgacagcttcctggagagcgtcttcaagaccgagtttgtcagccttctgtgcaagcgcttcgaggaggcgacgcggaggcccctgcccctcaccttcagcgacacactacagtttcgggtgaagaaggagggctggggcggtggcggcacccgcagcgtcaccttctcccgcggcttcggcgacttggcagtgctcaaggttggcggtcggaccctcacggtcagcgtgggcgatgggctgcccaagaactccaagcctaccggaaagggattggccaagggtaaacctcggaggtcgtcccaagcccctacccgggcggcccctggcgccccccaaggcatggatcgaaatggggcccccctctgcccacaggggggggccccctgccccctggagaaattcatttggcccagggggcacccacaggcctccccggccctccgtccacatccctgggatgccagcagacgaccccgggcacgtccgccctcagagcacaacacagaattcctcaacgtgcctgaccaggggatggccggcatgcagaggaagcgcagcgtggggcaacggccagtgcctgtgggccgacccaagccccagcctcggacacatggtcccaggtgccgggccctataccagtacgtgggccaagatgtggacgagctgagcttcaacgtgaacgaggtcattgagatcctcatggaagatccctcgggctggtggaagggccggcttcacggccaggagggccttttcccaggaaactacgtggagaagatctga

SEQ ID NO: 3422 - DNA, 617 bp, Homo sapiens
  SIMILAR (358)..(399): 571254mologous to Homo sapiens PRO2492,accession number AF119882,Smith-Waterman Score=39.
agtgattcggcacgagcccggaagcagattacgtggagtgacggtcatgctgcggcgtggacacttggcattcagggacgtggccatagaattccctcagggaggagtggaaatgtcttggaccctgctcaagaggactttatacagggaagtgatggtggagaacttacaggaacctcggtctttctgggaatcctgtcttcctgaccctgagtgttatctcccatgtttggagcaaaggagagatccccggaatcttcagagtgaagtgaaaatagcacacactccacggtggcacgggagtgcatcaaaggtgtgaacgcaggtaagagcttggatggccagagtggaggccccataatttttttttttttttttaaacagggtcttgctctgtcacccaggctgtcgtagagtggcaatcatcagtggcaatcgtggcttaactcatagcctcaaactcctggtctcaagtgatcctccttcctctgcttccgaaagtggtgggattacaagcatgagccactgtaccctgcaaaaccacactttgagtttctgtttgggagctctctgcaagtgagagaattctttgggaaaataaaagtttaaatcctgtg

SEQ ID NO: 3423 - DNA, 612 bp, Homo sapiens
  SIMILAR (154)..(579): 351254mologous to Xylella fastidiosa hypothetical protein,accession number AE003908,Smith-Waterman Score=181.
atgacagtcatgtcattggctgactctgtcgttggctggggtacccgagaatcagaagttcacagccagctgaccaaccggactgcactcagcattcaccattatgaaacacaccctgaggaccctggctctggtcaacggcatcactcccagcacacgctgcagggcttgacacttactgcctatagaccacaggtctccgagttcacgtctcacggcgcccaccccacgacggctctctcacatccacaggtctccgagttcacgtctcacggcgcccaccccacgacggctctctcacatccacaggtctctgagttcacgtctcacggcgcccaccgcacgacggctctctcacatccacaggtctccgagttcatgtctcacggcgcccaccccacaatggcactgtcacatccacaggtctccgagttcatgtctcacggcgcccaccccacgacggctctctcacatccacaggtctccgagttcacgtcccacggcgcccaccccacgacggctctctcacatccaccaggtctccgagttcatgtcccacggcgcccacccacaacagctctctcacatcctcctggacgtcagtatttgtag

SEQ ID NO: 3424 - DNA, 2208 bp, Homo sapiens
  SIMILAR (1031)..(1105): 601254mologous to Mus musculus putative secreted protein ZSIG37,accession number AF192499,Smith-Waterman Score=73.
atgccaagctacaagggctgcggtgagactcagagacacgctaccaatggcaccgcggccccacctcgccgaagcagctgccggggagacgcgataaaactgccccacgcggaaaagaaggaagggcggcccccagcctcaacttcatatcctttgagactgggcactcgctctgcccggagctcctcccactgctggtgcaccagctgggaggatcctccagaggccactgctggagaggaaaaacgccaccccaagtctcctgctgtttgctgtggggaggggacggtgctgactgccagcacggtcacctggcgggcggagcctgcacggggagaaatctgggcgaggctgtgtccccgggaccgcccagggagcagggcagctgctgtgatttgggagaggccgtgctgcgataggctcattgctgaccggaccgggccccccaacagctcggagccccactgccgggcagcaacgattcctctgcccacctggcccctcccagaggggcagaccctgaccctgaaagccctggccaagatggcagcccccgccctgctgctcctagcactgctgctgcccgtgggggcctggcccgggctgcccaggaggccctgtgtgcactgctgccgcccggcctggccccctggaccctatgcccgggtgagaagggtgaggccggcgtccgaggtcgggccggcaggagcgggaaagagggtgccgccaggctgcccggggcctgcagggccgcagagtgccagaaggggcagtgtggggccgccgggcgccgcgtgccgacgtgcctacgccgccttctccgtgggccggcgcgagggcctgcacagctccgaccacttccaggcggtgcccttcgacacggagctggtgaacctggacggcgccttcgacctggccgcgggccgcttcctctgcacggtgcccggcgtctacttcctcagcctcaacgtgcacacctggaactacaaggagacctacctgcacatcatgctgaaccggcggccgcggcgtgctctacgcgcagcccagcgagcgcagcgtcatgcaggcccagagcctgatgctgctgctggcggcgggcgacgcctgtctggagtgttcctgaagaacttccagcagtacttccaggacaggacgagctgggaagtcttcagctacatgcccaccatcctctggctgatggactggtcagacatgaactccaacctggacttgctggctcttctcggactgggcatctcgtctttcgtactgatcacgggctgcgccaacatgcttctcatggctgccctgtggggcctctacatgtccctggttaatgtgggccatgtctggacggatggtggctccacttcaaagagtactgagagcagcgccagggctggaggggacgctgggaggccgccagcacccagggacaccgccctcggtgcttcatttctcactgacgatgaacagcatgtttgggctccaggacttcaatgtaactcccctggcagctcaagcaacgcttcctccgggaagcccgggccgccccacacttgttccgtcgaccgctgcccccaacagcctgcagatgttcacaggaggccacggggcctgattccctcgctggcaaccccaaccaccttcaggtgtgtctgccacggggcacccccaggtgtgcctcattactgccgtcaggggcgttcaccagggaaacgtgcagaggaaatggttggagagcgaagtccaggcacaggggccatgagagccggaccccacgcagctgcagacctcgacccgaactgcatgcggctgaggacccccaagccaggcagaccccgacccagaccccacgcggccgcggacccccgacctcgacccaaactgcatgcggctgaggacccccaagccaggcagacgccaatccagaccccacgcggccgcggaccccaacccagacagaccccgacccacccgtgcagcccccagccccagaagtcaaaccccagcgtcccccagggcggcccgggctccctcagatacagcagcttcctgaggtggcctcacctgcaactccagaccaatcagagaaggccaaatgggctccccaagcccagcaggaagcctcctccttggagctctgtagccatcgtgggcttgcaagagtcaaagggcctggcccacagcggcgcccggcactga

SEQ ID NO: 3425 - DNA, 2067 bp, Homo sapiens
  SIMILAR (353)..(1189): 281254mologous to Streptococcus parasanguinis fimbriae- associated protein Fap1,accession number AF100426,Smith-Waterman Score=251.
atggatggacagtgctcccattactgtgtgaaaaccgacctcagagtacatagtccattcactacaggagcagtacatgctgaccaaagctgctgtaagacaacgtcggcgagatgggaagatacttgtgatttgacgggaagtaaaaaaactttggttatttccaatattgtcataaggaccaggtcagatgacaaactggaaaatgagtgggagacgcagtctcagaaccgcaaccgtgttaaacctactgcagctgatccctgcaggaatgaaaagaacactcttcttaggaaaaacacccggaagtactgcaggagtcagccaacgacagacttagagacaacgagagagtcagccaacgacagagtcagccaacgacagtcagccaacgacaaagtcagccaacgacagagtcagagccaacgacagagtcagccaacgacagagtcagagacaacgacagagtcagccaatgacagagtcagagacaatgacagagttacagaaaatgacagagtcagccaacgacagagtcagccaacgacagagtcagagccaacgacagagtcagccaacgacagagtcagagacaacgacagagtcagagccaatgacagagtcagagccaacgacagagtcagagccaacgtcagagtcagccaacgacagagtcaaagccaacgacagagtcagccaacgacagagtcagagacaacgacagagtcagagacaatgacagagtcagagccaatgacagagtcagccaacgacagagtcagagccaacgacagaagtcagccaacgacagaatcagagacaacgacagagtcagccaacgacagaatcagagacaatgacagagtcagccaacgacagaatcagagacaacgacagagtcagccaatgacagagtcagagacgacagagtcagagccaacgacagagtcagccaacgacagagtcagagccaacgacagagtcagccaacgacagagtcagccaacgacagagtcagagccaacgacagagtcagccaacgacagagtcagagccaatgacagagtcagccaacgacagagtcagccaacgacagagtcagccaacgacagagtcagagccaaggacagagtcagagccaacgacagagtcagtcaacgacagagtcagccaacgacagattcagagccaacaccaagaagacagacccccaaagtaccaaaacaaaaacgtgcaagtccacgctgcgacaaaccacgctcagacccccagaggcggcggaacctcacacctccagtgaagactgcagagcgacgtcctcaccaagagcatgtggtgaagggagaaaaagccacttcaccgtccagacactcaacaagcacagcccccaccaggccaccgtcagcagagacagctcatgtgaacgtgatgtgcgggggagacatggcccacattaaccagggacatgtagaggccccacagggcagccatgagaagcatgttggcgcagcccgtgatcagtacgaaagacgagatgcccagtccgagaagagccagcaagtccagaccacaggtctccgagttcacgtctcacggcgcccaccccacgacggctctctcacatccacaggtctccgagttcacgtctcacggcgcccaccccacgacggctctctcacatccacaggtctccgagttcatgtctcacggcgcccaccccacaatggcactgtcacatccacaggtctccgagttcatgtctcacggcgcccaccccacgacggctctctcacatccacaggtctccgagttcacgtcccacggcgcccaccccacgacggctctctcacatccacaggtctccgagttcatgtcccacggcgcccacccacaacagctctctcacatcctctggacgtcagtatttgtagaacactgaatgcttacccagagatgctgacaggtgagagaagcacattcccatgtgtaaacgtgaagaatgaaaaagcagttgaaagtaaaaaagatacaccattcaaatgtgaatcaaaagaaagctggatctaa

SEQ ID NO: 3426 - DNA, 448 bp, Homo sapiens
  SIMILAR (78)..(31): 501254mologous to Homo sapiens Human calcitonin-Leu dimer,accession number R44919,Smith-Waterman Score=50.
ggcaaagctgagaaaccaggtttctcctcagcaagaaggaaaatccctgcaacgtggatgcgcctctacaggagccccaggctgacaacaaccttcctgatctggtttcaaccctggatgcttttacctggtgtgtccatcagggatttcagggactccagtgagttattaccctcgaatgctcggttctgcctgacaacccagaaatctctgccaagatgcctggtggtcttggggaaggctcagcaagtggttgaggttgataaccaagtacctaggagacacttttctctccctccaggaggagctgtgggtcagacacaccctgggatcattcacaagtggtcaataaaggcttggggagggccaggttttctaggccttctcaacggggtgggtgtttgtggatacacaagaagcctgtgaaacttctgatattggcaggaaa

SEQ ID NO: 3427 - DNA, 492 bp, Homo sapiens
  SIMILAR (113)..(253): 311254mologous to Homo sapiens small proline rich protein,accession number M21302,Smith-Waterman Score=74.
atggatgagtcgtcatttaggggctccatcactcagagtggcagcgccaagacagccggcctcactgggttttgtaagctgtgcaagaccagcagctggcacacaggagctgctcagatacttgaaggaggaatggagaaggcaaacagcccccagtatgcagacccccagacccatctgtcctggcacacattgccccctgggtcccaagcaacctcagccaatgagtccaacgtcaacttcctgtccttgcctgacactaacagccctgagatcagacctgaccattcacctccagtaccagataggtccgtcagtcctttggaacatatcccacgaacattccccaaaccaggcaccggactccacacatcaacaccgtcacgaatccctctgcaggagccccaagatgagaataaccttcctgatctggtttcaaccctggatgctttcaactggtgcgtccatcaaggatttcagggactccagtga

SEQ ID NO: 3428 - DNA, 543 bp, Homo sapiens
  SIMILAR (291)..(515): 401254mologous to Human herpesvirus 4 BKRF1 encodes EBNA-1 protein, latent cycle gene,accession number V01555,Smith-Waterman Score=101.
atgcaaaccccagccgcctggttccagactcgcgttcccaaggtcccactacacttggtcactccactgcattctggtatcctggtctttggcagtgtccacgtaaaagagggagggatggaaagaggagagcgatttttgggatggaagccatctgcctcctctcaactctcgctgctcaacaagaaagggaagaaaaacaggaagatgcggggcagcaacagccgcagcctcttctcctcgggagggacgtcgtcctcctccctcctgggccggccatccctgcctcgggtcttgccagtggcttcggagctgccggaaggactggccatggctccgggggctctgcctgcacttggggaagaggaaggacccggcgcgagcggcctctcggctgagctggggcatctgagcgcgggctcgggcagggcttgggacctgcagccctccattcctgagcctcccccactccgtgggctcctgtgcggcccgagcctccccgacgagcaccaccccctgctccatggcgcccagtcccattga

SEQ ID NO: 3429 - DNA, 1153 bp, Homo sapiens
  SIMILAR (1048)..(878): 481254mologous to Homo sapiens ANG2,accession number AF024631,Smith-Waterman Score=113.
ctaaaagggcactctgttcttcttgatccactcagacatggcctgtgagtgaagaaacgggctctcctcctcaaagaaatcgctgctgatcctcacaccagcctgacactgcttcatgggttcttcaaagagagtattcccatagaaaagggacagcgccccgggggatgcaaggaactttgcctctctgtccctctctgtctgggtgccggtctccttcctgcccggctgcggcgcgtcctccccgtcctcgggctgtgcgcttcccccctccagcaacagccgcagcctcttctcctcgggagggacgtcgtcctcctccctcctgggccggccatccctgcctcggggcttgccagtggcttcggagctgccggaagggctggccatggctccgggggttctgcctgcactgtttgggtccacactgcctttataagctgtaacactcactgagaatgtctgcagcttcactcctgaagccagcaagaccatgaacccaccgggagaaatgaacaactccagacgtgcagccttaagagctgtaacactcaccgtgaaggtctgcagcttcactccaggagggtccgcagcttcattcttgaagtcagtgagaccaagaacccaccaattctggacacacttatacacttggcactgggaggtagttttacactgtttgtcaatttctgtggctgggatgaacttatcgtagttctcatagaccagggtttgcatgtcgctgtctagagcccggatctgcggcaccatgtccgtctcactgtctatcagctgggccagagggcactctctaggcagcttgtctaggtaaagttccgggtcgaagtgcgccccgttcagatcagtggagtccagggggtcgggccccgcggggagtcccaccgcctcccctttcgagaggccattgtaaagctttagcatcctgtgcgccttccgccgacgctccgtgagcctccacatcgggcccttctggggagtcccaaggtccacaccccgggctaggcccagtgacagctgccgccgccatagctccaatgaactgcccttcccctttgctgggtcatgaccacggagaacaggtccactgtcctcctgcgtggtgcaccatggaggctcagatccgtcctcgagg

SEQ ID NO: 3430 - DNA, 1471 bp, Homo sapiens
  SIMILAR (1141)..(908): 411254mologous to Oryza sativa DNA binding protein,accession number X88799,Smith-Waterman Score=115.
atgggaatgcgaaaagaaatgtactgcagcatgctgaattggtggtcatttgtgggctccatccctcagagtggcagcgccaagacagccggcctcactgggttttctaagctgtgcaagaccagcagctggcacacaggagctgctcagatacttgaaggaggaatggagaaggcaaacagcccccagtgtgcagatgtgagggtctcccagcggcaccatcctttgccatctcatgccaagggacaaagccagagcagggctctccaccaaggctgggttctcctccaaggaaatgtgataacaggacagaaagcatcgtggaaggataggggctttggagtcccacaaaccacagtttgcaagaccaggagcatcctgcacttccttgcacacatcctggcaacctcagccaatgagaccaatgccaacttcctgtccttgcctgacactgtcagccctgagatcagacttgaccattcacctccagtacctgataggtccatcagtcctttggaacatatcccacgaaaattccccaaaccaggcaccggactccacacatcaacaccgtcacctgagaaatccaggtttctcctcagcaagaaggaaaatacctgcaacgtggatgcacctctacaggagcctcaggctgacaataaccttcctgatctggtttcaaccctggatgcttttacctggcacaacgctaagtgcttctatggacgagcttcccttaatctcagcagcaacaaccccaggcaatggagcctgttgacagatccatttgccactgaagacagtaaggctcagacaggctacagccccagcctcttctcttcgggagggacgtcctcctcctcctcccttctgggccggccatccctgcctcggggcttgccagtgtcttcggagctgctggaagggctggccatggctccgggggctctgcctgaacttggggaagaggaaggacacggcgcgagcggcctctcggcggagctggggcgtctgagcgcgggctcggtgggtccgcgtggcgcggagctgggtatcggggccggtgcgggctcctccgcgggcggctcctggcactctggcgccctcttctggccgctgtcgcgcacctccgccacgccgggcccaggcctgcgtagctctcacatgtcctggcccaggaggtcgctgtcccttgcccatggacaggcccgctctggcaatgccctgcacctcctccccgccccggccaggttgcaccccgatggtctccctgctcaaggaggagagaagagaagggacgccacgagagggtggacatcggccacagccaccttgtctttgctcttaccctgtttcttccatgatttggaggtggtgggaaaaccgaggctgctcaaaactcgtggagaattcctcctgcaggatgacatgaatgcaccttcccattgcctaccaacagatcttttttgag

SEQ ID NO: 3431 - DNA, 1473 bp, Homo sapiens
  SIMILAR (4)..(147): 791254mologous to Homo sapiens bA486O22.3 (similar to RPS3A (ribosomal protein S3A)),accession number AL356115,Smith-Waterman Score=189.
ctagtgtttgaaatgagtcttgctgatttgcagaatgatgaagttgcatttagaaaattcaagctgattactgaagatgttcagggcaaaagctgcctgtctaacttcaatggcatgggtcttacctcctctgtcattgattgttctggtaattctgagccctggttcctttattttgcagataaccttcactcttctcgagcccgtgctcagacgccccagctccgccgagaagccgcttgagccgggtccttcttcttccccaagttcaggcagagcccgcggagccatggccagcccttccagcagctccgaagccactggcaagccccgaggcagggatggcagtcccaggatgggggaggaggacgtccctcccgaagagaagaggctggggctgtagcctgtctgagccttactgtcttcagtggcaaatggatctgtcaacaggctccattgcctggggttgttgctgctgagattaagggaagctcgtccatagaagcacttagcgttgtgccaggtaaaagtatccagggttgaaaccagatcaggaaggttattgtcagcctggggctcctgtagaggtgcatccacgttgcagggattttccttcttgctgaggagaaacctgggtttctcagctttggcacagtcagaatatttgtggtgagaccattcgtggtgctggtggtggggctgtcctcttctgctgaactctatttgcttcttttcccatacgtctttatccagaagagcttttagcaacaaagttacccaatgcccttccctagtctctccttgcaactggctctcagcagggggtgggaggaaattcgagcccgcgctcagacgccccagctccgccgagaggccgctcgcgccgtatccttcctcttctccaggtgcaggcagagccccccagccgtggccagcccttccggcagctccgaagccactggcaagccccgaggcagggatggccggcccaggagggaggaggacgacgtccctcccgaagagaagaggctgcggctgtagccgtcccgcatcttcctgtttttcttccctttctggttgggcagcaagagttgagaggaggcagatggcttccatcccagaaatcgctctcctctttccatcccctctctgagccttactgtcttcagtggcaaatggatctgtcaacaggctccattgcctggggttgttgctgctgagattaagggaagctcgtccatagaagcacttagcgttgtgctggaatccctgaaatccctgatggatgcaccaggtaaaagcatccagggttgaaaccagatcaggaaggttattgtcagcctggggctcctgtagaggtgcatccacgttgcagctattttctttcttgctgaggagaaacctggatttctcagctttggcacagtcacaacatttggggtgagaccattcgtggtggtggtgggggggcat

SEQ ID NO: 3432 - DNA, 1271 bp, Homo sapiens
  SIMILAR (19)..(690): 251254mologous to Neurospora crassa neurofilament triplet H1 related protein,accession number AL355931,Smith-Waterman Score=131.
tttcgtccggccccgatacccagctccgcgccgcgcggacccaccgagcccgtgctcagacgccccagctccgccgagaagccgcttgagccgggtccttcttcttccccaagttcaggcagagcccgcggagccatggccagcccttccagcagctccgaagccactggcaagccccgaggcagggatggcagtcccaggatgggggaggaggacgtccctcccgaaaagaagaggctggggctgtagctggaggggggaagcgcacagcccgaggactgcgaggacggggaggacccgccgctaccgggcaggaaggagaccggcacccatacaggtggcgacggcaaaggagcggaattctccacgagttttgagcagcctcgggtttcccaccacctccaaatcatggaagacacacggtgcaggcagagcccccggagccatggccagcccttccggcagctccgaagcccctggcaagccccgaggcagggatggccggcccaggagggaggaggacgacgtccctcccgaagagaagaggctgcggctcttgctgtaggggggaagcgcacagcccgacgactgcgagaaccggggaggacgcgccgcggccaggcagggaggagaccggcacccagacaggtggcgaccgcagaggagcagcacgggcagccctcctcgccgtgggcggcatcagagcccccctgcccagtcttggggttgctcctggatgccgtctgggaggcttgctcatggtgacatccttatctccccgtgcacgttaccgcattcagagcttgggtcacctggacactgaactcaggcgaattttctctgagatcctgggagaaggaggacagttctctggaaggttttccagggccgatcacggaaaggatgagaagggagaggtcctggtcggggacacaattacgatggcagtgtaacgccgggaaactttattgcatgaagtccctctcactccctctacctccttcttttacgtggactctgccaaagaccaggataccagaatgcagtggagtgaccaagtgtagtgggaccttgggaacccgagtctggagccaggcagctggggtttgcatcctggttctgcccctccttagctggctgacatggcacaagccacttaccctctctgagccttactgtcttcggtggcaaatggatctgtcaacaggccccattgcctggggttgttactgctgagattaagggaagctcatccatagaagcacttagcg

SEQ ID NO: 3433 - DNA, 1166 bp, Homo sapiens
  SIMILAR (1155)..(886): 421254mologous to Homo sapiens COX7RP,accession number AB007618,Smith-Waterman Score=105.
  misc_feature (1)...(1166): n = a,t,c or g
agcggccgccctttttttttttttttcattcaggtatttatgtccacagtcaaaataaatcaaaatttaaagctataaccatttttaaaagataaagggagaatttgtggcacagctgcattaacaaaacagacacccagtctaaagtgcaacactgagagaggtattctctgttcccacggtggaataaatacacacaattacacataagatttcactaaagataggagatgaggcaaaatacccctttgaaattaccctggcccaacaaatagagggcaggctacattaatttaacattttactgcaaaatgggaaaaaatccccgaaggtgactaactcaaactcctcattttcatggcacatggaccttgggcttctgtgttctttccataggccacatcccaaatccagaaaggctcctggcacccccatggctccaaaaatggcaaccttcaagtccctggaggtcctcagcacagactggacattaacaaagcctgtgttcagccttcatccagaacctcccagggaaatcaggagcacaaacacagagcaaagcaccgtttctttaaacaaatggctttaactgtcgaatgagctctgacaagccatatgcatttcataaaccaaacccaaaacatcatctttcatatcttccctattttttctggccaaaaatgtttaagccatccaaagtaaaaaaaaaaaatttttaatttaaccaatgaaaaaaggaaacttcaaaagggtttaagcccaaaaaaacaaaacccaatccctcctgnaagccctaaactccatttgttttttgggcctgcgaaagcccatgtaagagggccgaatccaggcagtaagatggtcccctccccacagtcaagcgcccatggtggtccgggtaaagcattttggtcaaggcaggccttcgtttcaggttagacggggcacaccatcagcttttctggaaaaaaactttttgtagctctggaaactttgtttttcccagcataatcataccctgtgggaatcggaggtccagtttagttggtgtggcaaatatgataggtggtgctttctgtggaaaccacaggctttaatacatgcgggctataggccttccgaagcccatgctcctgccaacttctgcgtgaagcccactaaacttg

SEQ ID NO: 3434 - DNA, 468 bp, Homo sapiens
  SIMILAR (7)..(231): 441254mologous to Caenorhabditis elegans cysteine-rich, similar to D. melanogaster shuttle craft protein (SP:P40798) and human NFX1 protein,accession number U41534,Smith-Waterman Score= 175.
atggtcacaactacttgttactgtaagaaagcaaaacctatccctcgtaggtgcagtgccaaggaatggtcttgtcagctgccatgtggacagaagttgctttgtgggcaacataagtgtgaaaatccttgtcatgcaggaagctgtcagccttgtccaagagttagtagacaaaagtgtgtctgtggcaaaaaagtagctgaaagaagttgtgcaagtccactatggcactgtgatcaaataaaagaagcagaagccaaagctgctcttgaagaagaaaaacgaagacaacaggctgaactagaagcttttgaaaacagactgaagggtcgtcggaagaagaacaggaaaagagatgaagtggcagttgagctatcactatggcaaaaacataaatattatctcatttcagtgtgtggagttgtggttgtagtgtttgcctggtacatcacccatgatgtcaattaa

SEQ ID NO: 3435 - DNA, 444 bp, Homo sapiens; identical to SEQ ID NO: 3414
  SIMILAR (63)..(158): 841254mologous to Homo sapiens C protein,accession number M16342,Smith-Waterman Score=134.

SEQ ID NO: 3436 - DNA, 265 bp, Homo sapiens
  SIMILAR (59)..(139): 961254mologous to Homo sapiens C protein,accession number M16342,Smith-Waterman Score=125.
  misc_feature (1)...(265): n = a,t,c or g
tntacctcctcctcctcctattgctcgggctgtagtgccctcgaaacgtcagcttgtatcaggaaagttgaaaggagatgaccttcaggccattaagaaggagctgacccagataaaacaaaaagtggattctttcctgggaaaacctgggaaaaanttgaaaaggaacagagcaaacaagcagtagagatgaagaatgataagtcagaagaggagcagagcagcagctncgggaagaaagatgagactaatgtgaagatggagt

SEQ ID NO: 3437 - DNA, 316 bp, Homo sapiens; identical to SEQ ID NO: 3416
  SIMILAR (153)..(314): 901254mologous to Homo sapiens hnRNP C2 protein,accession number M29063,Smith-Waterman Score=260.

SEQ ID NO: 3438 - DNA, 342 bp, Homo sapiens
  SIMILAR (36)..(341): 801254mologous to Homo sapiens hnRNP C2 protein,accession number M29063,Smith-Waterman Score=396.
ccgggagtaggagactcagaatcgaatctcttctcccctccccttcttgtgagatttttttgatcttcagctacattttcggctttgtgagaaacccttaccatcaaacacgatggccagcacgtgtacctcctcctcctcctattgctcgggctgtagtgccctcgaaacgtcagcgtgtatcaggaaacacttcacgaaggggcaaaagtggcttcaattctaagagtggacagcggggatcttccaagtctggaaagttgaaaggagatgaccttcaggccattaagaaggagctgacccagataaaacaaaaagtggattctctcctggaaaacctgg

SEQ ID NO: 3439 - DNA, 1402 bp, Homo sapiens
  SIMILAR (388)..(1092): 861254mologous to Homo sapiens hnRNP C2 protein,accession number M29063,Smith-Waterman Score=1002.
tcgaagactgagcggttgtggccgcgttgccgacctccagcagcagtcggcattctctaacgcagaaacccgggagtaggagactcagaatcgaatctcttctccctccccttcttgtgagatttttttgatcttcagctacattttcggctttgtgagaaaccttaccatcaaacacgatggccagcaacgttaccaacaagacagatcctcgctccatgaactcccgtgtattcattgggaatctcaacactcttgtggtcaagaaatctgatgtggaggcaatcttttcgaagtatggcaaaattgtgggctgctctgttcataagggctttgccttcgttcagtatgttaatgagagaaatgcccgggctgctgtagcaggaagaggatggcagaatgattgctggccaggttttagatattaacctggctgcagagccaaaagtgaaccgaggaaaagcaggtgtgaaacgatctgcagcggagatgtacgggtcagtaacagaacacccttctccgtcccctctactcagctcctcttttgacttggactatgactttcaacgggactattatgataggatgtacagttacccagcacgtgtacctcctcctcctcctattgctcgggctggtagtcccctcgaaacgtcagcgtgtatcaggaaacacttcacgaaggggcaaaaagtggcttcaattctaagagtggacagcggggatcttccaagtctggaaaagttgaaaggagatgaccttcaggccattaagaaggagctgacccagataaaacaaaaagtggattctctcctggaaaacctggaaaaaatggaaaaggaacagagcaaacaagcagtagagatgaagaatgataagtcagaagaggagcagagcagcagctccgtgaagaaagatgagactaatgtgaagatggagtctgaggggggtgcagatgactctgctgaggagggggacctactggatgatgatgataatgaagatcggggggatgaccagctggagttgatcaaggatgatgaaaaagaggctgaggaaggagaggatgacagagacagcgccaatggaggatgactcttaagcacatagtggggtttagaaatcttatcccattatttctttacctaggcgcttgtctaagatcaaatttttcaccagatcctctcccctagtatcttcagcacatgctcactgttctccccatccttgtccttcccatgttcattaattcatattgccccgcgcctagtcccattttcacttcctttgacgctcctagtagttttgttaagtcttaccctgtaatttttgcttttaattttgatacctctttatgacttaacaataaaaaggatgtatggtttttaaaaaaaaaaaaaaa

SEQ ID NO: 3440 - DNA, 1349 bp, Homo sapiens
  SIMILAR (123)..(434): 691254mologous to Xenopus laevis C protein,accession number J03831,Smith-Waterman Score=329.
ggaattccaaacccgggagtaggagactcagaatcgaatctcttctccctccccttcttgtgagatttttttgatcttcagctacattttcggctttgtgagaaaccttaccatcaaacacgatggccagcaacgttaccaacaagacagatcctcgctccatgaactcccgtgtattcattgggaatctcaacactcttgtggtcaagaaatctgatgtggaggcaatcttttcgaagtatggcaaaattgtgggctgctctgttcataagggctttgccttcgttcagtatgttaatgagagaaatgcccggggttgctgtagcaggagaggatggcagaatgattgcctggccagggttttagatattaaccccggcctgcagagcccaaaagtgaacccgaggaaaagccaggtgtgaaacggatctgcaagcggagatgtacgggctcctcttttgaccttggacctatgactttcaacgggactattatgataggatgtacagttacccagcacgtgtacctcctcctcctcctattgcctcgggctgtagtgccctcgaaacgtcagcgtgtatcaggaaacacttcacgaaggggcaaaagtggcttcaattctaagagtggacagcggggatcttccaagtctggaaagttgaaaggagatgaccttcaaggccattaagaaggagctgacccagataaaacaaaaagtggattctctccctggaaaacctggaaaaaattgaaaaggaacagagcaaacaagcagtagagatgaagaaatgataaagtcagaaagaggagcagagcagccagctccggtgaaagaaagatgagacttaatgttgaagattggaagtcttgaaggggggtgcagatggactctgcctgaggaaggggggacctacttggatgatgatgataattgaagatccggggggattgaccagctggaagttgatcaaaggatgatgaaaaagaggctgaggaaaggagaggatgacagaggacagcgcccaatgggaggggatgactccttaagcacatagttggggtttagaaatcttatcccattatttcctttacctaggcgcttgtctaagattcaaatttttcaccagatcctctcccctagtatcttcagcacatgctcactgttctccccatccttgtccttcccatgttcattaattcatattgccccgcgcctagtcccattttcacttcctttgacgctcctagtagttttgttaagtcttaccctgtaatttttgcttttaattttgatacctctttatgacttaacaataaaaaggatgtatggtttttatcaaaaaaaaaaa

SEQ ID NO: 3441 - DNA, 482 bp, Homo sapiens
  SIMILAR (179)..(400): 321254mologous to White clover mosaic virus 13 kDa protein,accession number M18920,Smith-Waterman Score=73.
  misc_feature (1)...(482): n = a,t,c or g
tttttaaaataagatgaattattttatttctgaattctgaaggtctgctgggcttggccaggtgattctcattcttgtggtctcttatgaggtcagtggtggctagggctgaaaccatctcaaagccttcctcactcacatctcatgggtgatcgccagctgttgctcgnacacccacatctgggactatcggccaaaacactcagaacttctccatgtgtctgggcttcctagaagacactgttcaagtagagggcaagacaatcaagaatctcaagctctatttcaaaacatttcttcccactccactactgctctatatatttttcacaatactttataccttctaaccgtaatagttattatagaggtacatgtatggtcttactataacataaactccatgagggaagatatttttagttttggctcaatgaaatatccccagtgccaaggaagcactggccctacacattcatcca

SEQ ID NO: 3442 - DNA, 3051 bp, Homo sapiens
  SIMILAR (52)..(681): 781254mologous to Homo sapiens Tsg24 protein,accession number AJ278357,Smith-Waterman Score=793.
atggggttaatggttttgaatgtagaaaattgttcttcgtttggctggatagggcgtgcccctcctcggaacacaacagtagaccttaatagtggaaacatcgatgtgcctcccaacatgacaagctgggccagctttcataatggtgtggctgctggcctgaagatagctcctgcctcccagatcgactcagcttggattgtttacaataagcccaagcatgctgagttagccaatgagtatgctggctttctcgtggctctgggtttgaatgggtaccttaccaagctggcgactttcaatatccatgactacttgaccaagggccatgaaatgacaagcattggactgctacttggtgtttctgctgcaaaactaggcaccatggatatgtctattactcggcttcttagcattcgcattcctgctctcttacccccaacgtccacagagctggatgttcctcacaatgtccaagtgggctgcagtggttgggcattggccttgtatatcaaggggacagctcacagacatactgcagaaggtcctgttgggctgagataggacggcctcctgttcctgaaatgtaatactgcactgacagggagtcatactccttaggctgctggcttggccctgggcatggtctgcttgggggaacaaggaccctgctgtggcgtatgggaagaattgggggagagggaaaccttcaaggacttaatattcaatagaaaggctccagaaggttctaatgccacttcctgtgcatttatctccctcatcctgtacagaagcatcaggggcactgtcccccactcctggctcctcccactaggctccttgtctcagcagcagccgcagcctggcatgaggacgcctccaggactggaaggtggaggaaacagtgtaagaatgcaggctacactgcgtgaccaggattccaaaggctacggaagttctaggagggcagctgttccaactggctgtagcattctgaagcttcccagaggctccccagagtgcaagctaacagcgctctgtggagcaggacggttgtggcttgctggtgctatctgccctgactttgctgccaagaccggcccaggacccagtagacaggatgcccagccaataggcctccagctatcctgctgcacagccagtcccttctggtcaagccttctctctactcctaatcgtgagaccatgtctccttctcagcccccgagtcctctgtcagccccagatgtagtagaagatcacagagctttggtaggttctcacagtgaatatcagagaaaaaaaatccatgcttctggaaggagaaaggaaaaagttattttgaaatatgccagagcattcaatgataaagaaaaaattcttggaagagccagaggagaaaagtaccttacctatagaagaacaaaggtcaaacccatttgggctgaaagtagaaaggaagaacctactgcagagaaagagggggaagatctggacaggggtgagaggcagcccgcaggccccaacggctgtcttggaaagggagaagggactcctggtcctttgggacggcctcctggtcctgaaatggaatactgcactgacagagagtcatactccttagctgctggcttggccctgggcatggtctgcttggggcatggcagcaatttgataggtatgtctgatctcaatgtgcctgagcagctctatcagtacatggttggaggacgtaggcgctttcaaacaggaatgcatagggagaaacataaatcaccaagttatcaaatcaaagaaggagataccataaatgtggatgtgacttgtccaggtgctactctagctttggctatgatctacttaaaaaccaataacagggacttaaaattggggccttatgtagatcattactatagagactacccaacgcttgtcagaactactggacaagtgtgcacaattgatccaggtcaaacaggatttatgcatcatccatcattttttacgtctgagccaccaagtatttatcagtgggtgagttcttgtctgaagggcgaaggaatgccgccttatccttacctccctggaatctgtgaaagaagcagacttgtagtcttgagtattgcactgtacatacttggtgatgagagctcggtttctgatgaatcctcacagtatttaaccagaataactgtaggattcactttaagagatttggaaactcttccctttggaattgctcttcccatcagagatgcaatttatcactgtcgtgagcagcctgcctcagactggccagaagctgtctgtctcttgattggacgtcaggatctttccaagcaggcctgcgaaggaaacttacccaaagggaagtctgctgagcttaccattggaactcaccttttcagaagtacaaaaagtaaagttgatcagaaagctcacagcactgacaaccggtatcatctccaggctctccggcacctctatgtgctggccgcggagcccaggcttctagtgcctgtggatgtggacacaaacacgccctgctatgccctcttagaagttacctacaagattaaagtaaaaggcccaagatactgggaactgctcatagatttaagcaaaggaacacaacacttgaaaactgttgcatcttgcagacctgagatctatacctgcaacaataacgcacaaccatcaccaccatccatctctagaactgttgcatcttgcagacctgagatctatacctgcaacaataacgcacaaccatcaccaccatccatctctagaactgttgcatcttgcagacctgagatctatacctgcaacaataacgcacaaccatcaccaccatccatctctagaactgttgcatcttgcagacctgagatctatacctgcaacaataacgcacaaccatcaccaccatccatctctagaactgttgcatcttgcagacctgagatctatacctgcaacaataacgcacaaccatcaccaccatccatctttccttaccttttcagtaacaattctagtttctggtag

SEQ ID NO: 3443 - DNA, 422 bp, Homo sapiens
  SIMILAR (24)..(407): 941254mologous to Homo sapiens dJ37E16.6 (novel protein),accession number Z83844,Smith-Waterman Score=604.
ggcacgagggcggcctcactgctatgggccgcaacaagaagaagaagcgagatggtgacgaccggcggccgaggctcgttcttagcttcgacgaggagaagaggcgggagtacctgacaggcttccacaagcggaaggtcgagcgaaagaaggcagccattgaggagattaagcagcggctgaaagaggagcagaggaagcttcgggaggagcgccaccaggaatacttgaagatgctggcagagagagaagaggctctggaggaggcagatgagctggaccggttggtgacagcaaagacggagtcggtgcagtatgaccaccccaaccacacagtcaccgtgaccaccatcagtgacctggacctctcgggggcccgggctgctcgggctgaccccacctgagggaggggctggagacag

SEQ ID NO: 3444 - DNA, 438 bp, Homo sapiens
  SIMILAR (119)..(310): 371254mologous to Homo sapiens keratin associated protein 4.12,accession number AJ406943,Smith-Waterman Score=92.
  misc_feature (1)...(438): n = a,t,c or g
tggtgcctattatgggccctccaagtggctctgggtgctcagcctgctgtgaagcaggaacagctgaagtccccaggggttcttgcacacagcagggctcgggtttgaaancccaggctctgcctgcttggtcgcctgcatgagcttcctgctgtgctgacctctctggtttgtctcgtcatgtgtaaggtgacaccagatacctacctcttagggctgccccgagactaaaataagaccatgtgcatgaaccacttaccaaagtgcctgttgctctccaggtgtgcctaccgcatgttgccgctgctgtttctgctgggacgtctgactccagttccttctcccctctccagtgacaaggtcatttacaacttacatttacaatttatagtgtttaccagtattaaattctcagccactccttaaaaaaaaaaaaaa

SEQ ID NO: 3445 - DNA, 826 bp, Homo sapiens
  SIMILAR (1)..(414): 451254mologous to Homo sapiens dJ37E16.6 (novel protein),accession number Z83844,Smith-Waterman Score=202.
gacgaggagaagaggcggtgagtggcaaagccggaccggactcccctcgagctgttcttcgcggccaaggccaggtctggggcgcagcggctgaaagaggagcagaggaagcttcgggaggaggtacgcagggggaaggtgggagggaggtctttgattcttagggcacttgcagccttggatttccctcctgacctggagaacagctgatgggcctggtttatacccttggtgggtgaccacacagtcaccgtgaccaccatcagtgacctggacctctcgggggcccggctgctcgggctgaccccacctgaggtgggtcccagtctcagccctgggaggaaggggcgtgggggcagaccagcttgtcagggttgctcaaggaagtccagagaccccctgctctctcagcggtgagtcttggcctgctgcctccccggtcccacccctcctggctggcagtagtgacctggcccttaacgggccccaggactccaaaaagcccccaagggcccctcgtaccagcaaggcccagcgccgccgtctcacaggcaaagcacggcacagcggggagtgagaccgagaacgaagcggtgccccagtttaggctgcggggacctgtccttgctcagcttggctgtccctgtagcccagcctgcacctaggtgtgcctaccgcatgttgccgctgctgtttttgctgggacgtctgactccagttccttctcccctctccagtgacaaggtcatttacaacttacatttacaatttatagtgtttaccagtattaaattttcagccactcctttcaaaaaaaaaaaaaaaa

SEQ ID NO: 3446 - DNA, 403 bp, Homo sapiens
  SIMILAR (168)..(224): 471254mologous to Mus musculus SPR2K protein,accession number AJ005569,Smith-Waterman Score=45.
  misc_feature (1)...(403): n = a,t,c or g
acctgatattcttccgccgtcgaccagggtttgaagatgcccactggataggaattcaccaattctcctctgagttcattttctcacaatgaccacaaccgctcacaagcgaaagacaagttcaattttggtaactgtgctggctccaaatacacagacagggaagaaaaccctgttcccccccaagtttgaaaggatgatgagccacatgcatgcccccaagacgcagaaaaggtggctttttgtcttcagtgagtatggatatcataacccatagtccagggaatgaaaaaattaaaatgccccccccaacaatgagcaaacaacccggggtgcttcaacaagactgcagggaaaagctctctcactgtttagtgtgcagtagcttagggnnnnnnnnnnt

SEQ ID NO: 3447 - DNA, 1860 bp, Homo sapiens
  SIMILAR (991)..(1857): 341254mologous to Ascaris suum putative,accession number M67507,Smith-Waterman Score=250.
tcaaagtctgtcacagctgaaggaggagaattcagtcatgtctggttcagtggccacactacctgtcaggccatacagggttctttccagggctgtttcattctggcattgcaagcattctgctgagaacgcattgttaccctcatttgcagaagaaggaacagaagttcccgagagtgcattattaggctgcccacatctcacttccacaatccgcaggttgctgtagcaatcagccggcacggggacatgtgaagagctcctgagactcccaggaaaatacttggtgaagcagggggctgtcggggtgacggtgacagacctgcttttcagcctgtgaggaacagcagaccttttctctctaagctccttgggcagtgtggtaggagcacactctgcaggttgtgtttccgctctctcaatcacctcttttggctttttccggggcctggctggaggggtcccggcggacactccactgaggatggcagtctccagggcaaagcaggacaggatttcagctgctagaacctcgagatctcttttttcccctaaccaagtccaacttgctctcccaccctgcactgtggccagaagccccgtgctgggcaggggcacctgcactctgtcaccaggagccccgtgctgggcagaggtacctgcactgttgccgcgccgggtgggtgatctcaggacctgatattcttccgccgtcgaccagggtttgaagatgcccactggataggaattcaccaattctcctctgagttcattttctaaaggatagagcgacaacacaaaataccgcacgcccaccaatgggctggcggcctctccagcagagccggcagatttccccagctgtgggaggaaagctctgttctcttcctgtgatgatataagcctctcctcatccgtcagcttcagttgtaggagagactcctgcctaaatcggtggttggggttggcttgaggtttccagctgattggcctccacacgtgagggggacgcagccgggcctcctcgagtcccgcgttccttctgtgagggggacgcagccaggccttccgggccttcccgagtcccgcgttccttctgtgaggcggacgcagccgggcctcctcgagtcccgcgttccttccgtgagggggacgcagccaggccttccgggccttcccgagtcccgcgttccttctgtgaggcggacgcagccgggcctcccagacgcccgcgttccttacgtgagggggacgcagccgggccttccgggccttcccgagtcccgcgttccttacgtgaggcggacgcagccgggcctcccagacgcccgcgttccttacgtgagggggacgcagccgggccttccgggcttccggccttcccgagtcccgcgttccttctgtgagggggacgcagccgggcctcccagacgcccgcgttcctacgtgagggggacgcagccgggccttccggccttcccaagtcccgcgttccttgtccgcgttccttccttgagggggacgcagccaggccttccgggccttcccgagtcccgcgttccttccgtgaggcggacgcagccgggcctcccagacgcccgcgttccttccgtgagggggacgcagccaggccttccgggccttccggagtcccgcgttccttccgtgagggggacgcagccgggcctcccagacgcccgcgttccttacgtgagggggacgcagccaggccttccgggccttcccgagtcccgcgttccttacgtgagggggacgcagtccagccttccgggccttcccgagtcccgcgttcctttcgtgagggggacgtagccgggcctccccgagttccgcggtcat

SEQ ID NO: 3448 - DNA, 497 bp, Homo sapiens; identical to SEQ ID NO: 3326
  SIMILAR (39)..(497): 981254mologous to Homo sapiens SWI1Lbeta protein,accession number AF259792,Smith-Waterman Score=818.
  misc_feature (1)...(497): n = a,t,c or g

SEQ ID NO: 3449 - DNA, 4458 bp, Homo sapiens
  SIMILAR (58)..(4455): 861254mologous to Homo sapiens SWI1Lbeta protein,accession number AF259792,Smith-Waterman Score=6436.
ccttctcctgggggccagatgcatgctggaatcagtagctttcagcagagtaactcaagtgggacttacggtccacagatgagccagtatggaccacaaggtaactactccagacccccagcgtatagtggggtgcccagtgcaagctacagcggcccagggcccggtatgggtatcagtgccaacaaccagatgcatggacaagggccaagccagccatgtggtgctgtgcccctgggacgaatgccatcagctgggatgcagaacagaccatttcctggaaatatgagcagcatgacccccagttctcctggcatgtctcagcagggagggccaggaatggggccgccaatgccaactgtgaaccgtaaggcacaggaggcagccgcagcagtgatgcaggctgctgcgaactcagcacaaagcaggcaaggcagtttccccggcatgaaccagagtggacttatggcttccagctctccctacagccagcccatgaacaacagctctagcctgatgaacacgcaggcgccgccctacagcatggcgcccgccatggtgaacagctcggcagcatctgtgggtcttgcagatatgatgtctcctggtgaatccaaactgcccctgcctctcaaagcagacggcaaagaagaaggcactccacagcccgagagcaagtcaaaggatagctacagctctcagggtatttctcagcccccaaccccaggcaacctgccagtcccttccccaatgtcccccagctctgctagcatctcctcatttcatggagatgaaagtgatagcattagcagcccaggctggccaaagactccatcaagccctaagtccagctcctccaccactactggggagaagatcacgaaggtgtacgagctggggaatgagccagagagaaagctctgggtcgaccgatacctcaccttcatggaagagagaggctctcctgtctcaagtctgcctgccgtgggcaagaagcccctggacctgttccgactctacgtctgcgtcaaagagatcgggggtttggcccaggttaataaaaacaagaagtggcgtgagctggcaaccaacctaaacgttggcacctcaagcagtgcagcgagctccctgaaaaagcagtatattcagtacctgtttgcctttgagtgcaagatcgaacgtggggaggagcccccgccggaagtcttcagcaccggggacaccaaaaagcagcccaagctccagccgccatctcctgctaactcgggatccttgcaaggcccacagaccccccagtcaactggcagcaattccatggcagaggttccaggtgacctgaagccacctaccccagcctccacccctcacggccagatgactccaatgcaaggtggaagaagcagtacaatcagtgtgcacgacccattctcagatgtgagtgattcatccttcccgaaacggaactccatgactccaaacgccccctaccagcagggcatgagcatgcccgatgtgatgggcaggatgccctatgagcccaacaaggacccctttgggggaatgagaaaagtgcctggaagcagcgagccctttatgacgcaaggacagatgcccaacagcagcatgcaggacatgtacaaccaaagtccctccggagcaatgtctaacctgggcatggggcagcgccagcagtttccctatggagccagttacgaccgaaggcatgaaccttatgggcagcagtatccaggccaaggccctccctcgggacagccgccgtatggagggcaccagcccggcctgtacccacagcagccgaattacaaacgccatatggacggcatgtacgggcccccagccaagcgccacgagggcgacatgtacaacatgcagtacagcagccagcagcaggagatgtacaaccagtatggaggctcctactcgggcccggaccgcaggcccatccagggccagtacccgtatccctacagcagggagaggatgcagggcccggggcagatccagacacacggaatcccgcttcagatgatgggcggcccgctgcagtcgtcctccagtgaggggcctcagcagaatatgtgggcagcacgcaatgatatgccttatccctaccagaacaggcagggccctggcggccctacacaggcgcccccttacccaggcatgaaccgcacagacgatatgatggtacccgatcagaggataaatcatgagagccagtggccttctcacgtcagccagcgtcagccttatatgtcgtcctcagcctccatgcagcccatcacacgcccaccacagccgtcctaccagacgccaccgtcactgccaaatcacatctccagggcgcccagcccagcgtccttccagcgctccctggagaaccgcatgtctccaagcaagtctccttttctgccgtctatgaagatgcagaaggtcatgcccacggtccccacatcccaggtcaccgggccaccaccccaaccacccccaatcagaagggagatcacctttcctcctggctcagtagaagcatcacaaccagtcttgaaacaaaggcgaaagattacctccaaagatatcgttactcctgaggcgtggcgtgtgatgatgtcccttaaatcaggtcttttggctgagagtacgtgggctttggacactattaatattcttctgtatgatgacagcactgttgctactttcaatctctcccagttgtctggatttctcgaacttttagtcgagtactttagaaaatgcctgattgacatttttggaattcttatggaatatgaagtgggagaccccagccaaaaagcacttgatcacaacgcagcaaggaaggatgacagccagtccttggcagacgattctgggaaagaggaggaagatgctgaatgtattgatgacgacgaggaagacgaggaggatgaggaggaagacagcgagaagacagaaagcgatgaaaagagcagcatcgctctgactgccccggacgccgctgcagacccaaaggagaagcccaagcaagccagtaagttcgacaagctgccaataaagatagtcaaaaagaacaacctgtttgttgttgaccgatctgacaagttggggcgtgtgcaggagttcaatagtggccttctgcactggcagctcggcgggggtgacaccaccgagcacattcagactcactttgagagcaagatggaaattcctcctcgcaggcgcccacctccccccttaagctccgcaggtagaaagaaagagcaagaaggcaaaggcgactctgaagagcagcaagagaaaagcatcatagcaaccatcgatgacgtcctctctgctcggccaggggcattgcctgaagacgcaaaccctgggccccagaccgaaagcagtaagtttccctttggtatccagcaagccaaaagtcaccggaacatcaagctgctggaggacgagcccaggagccgagacgagactcctctgtgtaccatcgcgcactggcaggactcgctggctaagcgatgcatctgtgtgtccaatattgtccgtagcttgtcattcgtgcctggcaatgatgccgaaatgtccaaacatccaggcctggtgctgatcctggggaagctgattcttcttcaccacgagcatccagagagaaagcgagcaccgcagacctatgagaaagaggaggatgaggacaagggggtggcctgcagcaaagatgagtggtggtgggactgcctcgaggtcttgagggataacacgttggtcacgttggccaacatttccgggcagctagacttgtctgcttacacggaaagcatctgcttgccaattttggatggcttgctgcactggatggtgtgcccgtctgcagaggcacaagatccctttccaactgtgggacccaactcggtcctgtcgcctcagagacttgtgctggagaccctctgtaaactcagtatccaggacaataatgtggacctgatcttggccactcctccatttagtcgtcaggagaaattctatgctacattagttaggtacgttggggatcgcaaaaacccagtctgtcgagaaatgtccatggcgcttttatcgaaccttgcccaaggggacgcactagcagcaagggccatagctgtgcagaaaggaagcattggaaacttgataagcttcctagaggatggggtcacgatggcccagtaccagcagagccagcacaacctcatgcacatgcagcccccgcccctggaaccacctagcgtagacatgatgtgcagggcggccaaggctttgctagccatggccagagtggacgaaaaccgctcggaattccttttgcacgagggccggttgctggatatctcgatatcagctgtcctgaactctctggttgcatctgtcatctgtgatgtactgtttcagattgggcagttatga

SEQ ID NO: 3450 - DNA, 2302 bp, Homo sapiens; identical to SEQ ID NO: 3330
  SIMILAR (1648)..(1824): 1001254mologous to Homo sapiens SWI1Lbeta protein,accession number AF259792,Smith-Waterman Score=323.

SEQ ID NO: 3451 - DNA, 1498 bp, Homo sapiens
  SIMILAR (14)..(1357): 281254mologous to Herpesvirus papio NTR,accession number AF200364,Smith-Waterman Score=158.
ggaggagccgagccggagggagccgcggcgcccggccatgcaccgggcgcagtagcgggaggcgcgggcccgatggcgcgggccggggcgcggggactgctcggcggccgccgtcctcccggcctccggctcgcgctcgcgcttcggctcgcgttgctgctggcgcggccgccgtcgggccgcgcgggagcccccgaggcgcagggtcccgcggcgcccggcacgacagccccggaggggggcgaccgctgccgcggctactacgacgtgatgggccagtgggacccgcccttcaactgcagctccggagcctacagcttctgctgcggcacgtgcggctaccgcttctgctgccacgacgggccgcggcgcctcgaccagagccgctgttccaactacgacacgccggcctgggtccagacaggccggccgcccgcccgcgcccgcgacaccgcagcgccccgggaccccggccgcgagcgcagccatacggccgtctacgctgtgtgcggcgtcgcagcgctgctggtgacggtggtggccggggctggcttttgatgaggtgggagacagagggccacccctgactgctgtccccgcagggcgctgacagagcttctgaagcagccgggcccccaggagccactgcctcccaccctgggcctacggagaggtgacagcgagggcggagtgaaccggggcatcggaccgagccgcgtctcactcctcgctccagacaagaagcgcctcaacaacgcgccccgggggtcggccgccccggggcccccgcgcggcccgcggctgcagggcgccgggaccccttgtccagtcctgagcttgggtgctcggcgcggcgtcactcttccctgccctgtccccgcagaggccgccccgcgggacttctgtcagcgtttccccgccctcgagccgtccccgcggcaacccccggcgcgggctccgcgaccatccccggacttgcctgcgccgctggacgcctgcccctgggccccgccggtctacgcgccccctgccgcgccgggcccctatgccgcctggacctccagtcgcccggcccggcccgccccgctcagccacccgacggctcgggccttccaggtaccccggcgacccgggcacgcggcccggcgccagttcagtgtgaagatgcctgagaccttcaacccgcagctccccggcctttacggcagcgcgggccgcgggtcccggtacctaaggaccaatagcaagaccgaggtcaccgtgtgaagcggggccgcggtgccctcgaggcatgggctggggtcctgtctgcccgtcggagcctcaggccacagggagaggagcgcctgccgtaaggccagctcttctgtctgcctcaacggcagtggtgtcttggagcctgcaggccgcgggttcgtcttgtaaataagcccttttatgtggttcctgcccctgagaataaagaagccccagcgtggctgcgaggcaccattggtca

SEQ ID NO: 3452 - DNA, 262 bp, Homo sapiens
  SIMILAR (1)..(261): 681254mologous to Homo sapiens human non-muscle myosin heavy chain,accession number D11393,Smith-Waterman Score=295.
gagctagaggcccaccttgaggctgaggagggtgcgcggcagaagctgcagctggagaaggtgacgacagaggcaaaaatgaagaaatttgaagaggacctgctgctcctggaagaccagaattccaagctgagcaaggagcggaagctgctggaagatcgtctggccgagttctcatcccaggcagctgaggaggaggagaaggtcaagagcctcaataagctacggctcaaatatgaggccacaatcgcagacatggagg

SEQ ID NO: 3453 - DNA, 1921 bp, Homo sapiens
  SIMILAR (985)..(1503): 621254mologous to Homo sapiens cellular myosin heavy chain,accession number M81105,Smith-Waterman Score=539.
gtgcatgagctggaacgtagctgccgggtagcagaacaggcagccaatgatctgcgagcacaggtgacagaactggaggatgagctgacagcggccgaggatgccaagctgcgtctggaggtgactgtgcaggctctcaagactcagcatgagcgtgacctgcagggcagtgatgaggctggtgaagagaggcggaggcagctggccaagcagctgagagatgcagaggtggagcgggatgaggagcggaagcagcgcactctggccgtggctgcccgcaagaagctggagggagagctggaggagctgaaggctcagatggcctctgccggccagggcaaggaggaggcggctggagtgcagcgacgtgatctcagctcacagcaactctgcctcccaggcccagatgaaggagctatggcgtgaggtggaggagacacgcacctcccgggaggagatcttctcccagaatcgggaaagtgaaaagcgcctcaagggcctggaggctgaggtgctgcggctgcaggaggcccagcaggaccgggatgagatggcagatgaggtggccaatggtaaccttagcaaggcagccattctggaggagaagcgtcagctggaggggcgcctggggcagttggaggaagagctggaggaggagcagagcaactcggagctgctcaatgaccgctaccgcaagctgctcctgcagactgagcagaattgatgacatctccaattatgaggtcaatttagaacctggtgggcatgatgatatcacaagttgccaggggcggggccgtagcttgccgcagcgggcgccgattggcctctgctgctctcttgggggcggggctgtcctggcggacacgcccctctttctccccaggccgaagcctcgggacggtcctggaagccgggccttccagaagcgccagcagcagcagagcgccctgagggtgatgcagcggaactgcgcggcctaccctcaagctgagacactggcagtggtggcggctgtttaccaaggtgaagccactgctgcaggtgacgcggcaggatgaggtgctgcaggcacgggcccaggagctgcagaaagtgcaggagctacagcagcagagcgcccgcgaagttggggagctccagggccgagtggcacagctggaagaggagcgcgcccgcctggcagagcaattgcgagcagaggcagaactgtgtgcagaggccgaggagacgcgggggaggctggcagcccgcaagcaggagctggagctggtggtgtcagagctggaggctcgcgtgggcgaggaggaggagtgcagccgtcaaatgcaaaccgagaagaagaggctacagcagcacatacaggagctagaggcccaccttgaggctgaggagggtgcgcggcagaagctgcagctggagaaggtgacgacagaggcaaaaatgaagaaatttgaagaggacctgctgctcctggaagaccagaattccaagctgagcaaggttgggggcctgagggcagctgggaaagtggggatggggtgcattggtgggttaatgaatggtgaacttcacgccatgggggttaccacactgcggttctcaggagcggaagctgctggaagatcgtctggccgagttctcatcccaggcagctgaggaggaggagaaggtcaagagcctcaataagctacggctcaaatatgaggccacaatcgcagacatggaggaccgcctacggaaggaggagaagggtcgccaggagctggagaagctgaagcggaggctggatggggagagctcagagctgcaggagcagatggtggagcagcaacagcgggcagaggagctgcgggcccagctgggccggaaggaggaggagctgcaggctgccctggccaggaggcagaggttccagtga

SEQ ID NO: 3454 - DNA, 681 bp, Homo sapiens
  SIMILAR (508)..(627): 331254mologous to Hepatitis C virus polyprotein,accession number AF134744,Smith-Waterman Score=53.
taaaaatgagaagattgataaagtctaagaaagatatttaatcgggaacgccagaaatctctatcattaacacccagcccgctcagactccggtgaaggattccttcagctccctcatcaagacagtcaagatagtacttcagtaggtacaaactcttaagaaagatggccagacccagcatcccagaccgatttaagatgcacagtcctccgtatgttgtgctggttctcaacacggaatgtaagcaaatcactcccaagagtaaagatttccgtgcagtaacctcatggtcccaagatggaagtcctctgctgtccctgcagggttactttcgtattttgagaccggggaaatattccaggagcgacgccctcacggcacattgaccctgggacacctgatctcaagcggcctcccccgacggacgcgcagcacaccccaccccgctgggcctgtctcggcggtcgcttctaggggcctcacctcggggggctccacgacctcagtgtggatggccagggcaccgagccgctgctcgagcgccgctcccaactccgcgcccgccgtggagccgctatcgtggcgatgggcggaaaaacggcacggcttcccgcggctgcgcagaccgaagcctgaggcggaactgcccagagggatctcggccgacgccggcagcgtag

SEQ ID NO: 3455 - DNA, 311 bp, Homo sapiens
  SIMILAR (255)..(311): 781254mologous to Homo sapiens HSPC319,accession number AF161437,Smith-Waterman Score=84.
atggcggcgcacaggaagcacgtgtttgtggagaaggtgctgcagagactttttcctcctgttccaagtggccaaggaaagagggaaccccagacgctggccgtccaaaatccaccaaagaaagtgacctctgagaaagtgagccagaaacatgctgagcctttgacagacactggctctgagaccccgactgcccgacggctctacactgccagcgggcctcctgagggctacgtcccctgttggcccggagcccagcagctgtgggagcccccgagaacgcctccagcggggatgacacagaagatcag

SEQ ID NO: 3456 - DNA, 1562 bp, Homo sapiens
  SIMILAR (897)..(601): 571254mologous to Homo sapiens HSPC319,accession number AF161437,Smith-Waterman Score=262.
tcacgtttgcacaagctttgcaataagcccagacggtctggcacaacaaacgctaagcgtgtgggtccagactgtcaccccatgggcagagaaggggcccgctaacaccacgcgctgagggggcgcaggggagaggcgggaacccgtggagggaggcagcggcgcagggagcaggactggagggaggcgggtcccggacccagggctgaagtcggcagaactgcggccagtgcccgccgcgcccgggggagcgcgccaggcccgcggggccctagccgaggccgtagtaggtggaatacggggcagccacggaggaatcgggggcgaggcgcggagaggccccggatgcagcggtcccgccccgagaacggagcgcgcggaaccggcgcaggcctccgaggcttccagccgagacggcacccaggtttcccgagcagggtctgaggctccaaggacatcccggcggcgagaaggcgcgtagagacctgcccgggtcccgagccccgaccgcagccccagctcccgccgaggccctggaaaggcgggggagacgcgcggggcgatccaaaatttcctcaggcacccaatgcagttcccggcttctgtgtcatccccgctggaggcgttctcggggctcccacagctgctgggctccggccaacaggggacgtagccctcaggaggcccgctggcagtgtagagccgtcgggcagtcggggtctcagagccagtgtctgctgtgtggcccagttccttacaggcaacagaccagtactggtccatgacccgggggttggggatccccgatctgatgtcccctgcagtgctctgatcagtggaactggctgtcaaaggctcagcatgtttctggctcactttctcagaggtcactttctttggtggattttggacggccagcgtctggggttccctctttccttggccacttggaacaggaggaaaaagtctctgcagcaccttctccacaaacactgtggcagtcttctctgatttctttattttcctggtgaagcaagggcaagggctgaagtgggccaggggctggctgtgagcccctccatagctgtcggctgccaggagcagcccagaggagctgaggggaacctgccccctaaaccagcagatccctgtgcaggaaccaaacagccacgtgcgcagaggggcgtgcagcaggggacgtcccagtagccatccacggtggtgatgacctctggtagaggggcacacagcaggggaggtcccgtgcgcagaggggcacacagcagggaggttccagccgccgtccacggtggtgatgacttctggtagaggggcacacagcagggagggttcagcaaccgtccacgggtggttgacctctggtagaggggccaccagcaggggaaggtccgtttgcagaggggcacacagcagggaggtccagccagctgtccacggtgttaacgaccttcttaccccacaggtgacttgcagatttcgaaggggaggagcagctttgcaggggggatccagctgctggcactgagcacccagacgggagg

SEQ ID NO: 3457 - DNA, 393 bp, Homo sapiens
  SIMILAR (3)..(392): 1001254mologous to Homo sapiens inducible nitric oxide synthase,accession number AB022318,Smith-Waterman Score=678.
ggggcagctactgggtcagtgacaagaggctgcccccctgctcactcagccaggccctcacctacttcctggacatcaccacacccccaacccagctgctgctccaaaagctggcccaggtggccacagaagagcctgagagacagaggctggaggccctgtgccagccctcagagtacagcaagtggaagttcaccaacagccccacattcctggaggtgctagaggagttcccgtccctgcgggtgtctgctggcttcctgctttcccagctccccattctgaagcccaggttctactccatcagctcctcccgggatcacacgcccacggagatccacctgactgtggccgtggtcacctaccacacccgagatggccagggtcccctgg

SEQ ID NO: 3458 - DNA, 1089 bp, Homo sapiens
  SIMILAR (337)..(1056): 751254mologous to Homo sapiens inducible nitric oxide synthase,accession number AB022318,Smith-Waterman Score=873.
tttgagattttgatttgtttttaatgatttgcccacctaccacccaaactgcctaggacacgacagctggggaaagtgccattcaacaaagatttgaccccagcccatgagttgctgacagtggaagtcacataagttagataagtgtaccggactgagttcctccaggacaggaactatttcttcttaagcttggtagtctcagcaccccggacagtgcctggcacatggacttgtttgttgagtgagtgaagaaatgaatgaatactgggttgtgacagccttttccccaaagcagggcaggcgccctgagtcgctcacatcacccttggctttcagtcctcagagtacagcaagtggaagttcaccaacagccccacgttcctggagttgctggaggagttcccatccctgcaggtgtctgctggcttcctgctctccctgctccccattctgaagcccaggttttactccatcagctcctcccaggatcacacgcccacagcgatccacctgactgtggccgtgctcatgtaccacactcgagggttgcaaccagcaagggccacgctcatgagcacgcacagcagtagccaccccgaggggccacttcctgctgctgtcagtggagctcagtgcgccagcggcttccggctccccgaggacccctcccatcctcgtgtcctcatcgggcctggcacaggcatccctcccttcctcagtttctggcagcagcggctccatgactcccagcaaaagggtgtggctggaggcttcccaggagtgcagggaggccgcatgaccccggtgttcgagtgccgcagcccaaatgaggaccacatctaccaggaggagatgctggagatggctcggaagggggtgctgcctgcggtgcccacagcctattcctgcctgcctggcaagcccaaggtctgtgttcaggacatcctgcagcagcagctggccagcgaggtgctccgtgtgctccacaaggagccgggccacctctatgtttgcagggctgtgtgcatggcctgggatgtggcccacaccctagcagctggtggctgcctagctgaacttgaatga

SEQ ID NO: 3459 - DNA, 478 bp, Homo sapiens
  SIMILAR (19)..(123): 471254mologous to Hepatitis B virus DNA polymerase,accession number U33190,Smith-Waterman Score=73.
aattgtagatcattagtccatgcggtggaattcgcctttccaccatcatccagagcaggacaaacacgccaggtggtgtcaggagcccaggtctccagctggagggaatgtcaaccctgcagtgggagcccatcatgcatcctaggcacagatgctaacgtaggcaccgcaggtaagctgggtttggtaccccttcctggcttcagaaagaagccaaacaaggagctttctgcagaatgaaacctcttttccatccacaagcactgctgactgtttggtggttgctgttagggcagtgagccttttgtccattctgagattgggctggtttctcctcttggccctggcctacagaccataaaggaaaacagcaagaggtccccagcaaacatctacagatggccctggacatcagccacattcagagaaacgtgtcatgttctgggagggctaaggcatcgagtaaggcctatggggc

SEQ ID NO: 3460 - DNA, 994 bp, Homo sapiens
  SIMILAR (329)..(520): 511254mologous to Homo sapiens cytochrome P450,accession number AF133298,Smith-Waterman Score=128.
atgggtttggctaaacaggctggaaaagtaaaagcaaaaggaccagagggtgcttggcttgaggagacccccagcattttccatgaactgcatgtggattcattgcctgcatcggatgacaaagacttgaatattgctactaagaccataaaggaaaacagcaagaggtcctcagcaaacatctacagatggccatggatatcagccacattcggagaaacgtgtcatgttctgggaggaataaggcatcgagtaaggcttatgggactggaggatctcagggcagggcctgcgacctggggcacaactttagacaccatcatcctgggagcggcactgcaccctcactagccagggtgttgatgacttcctcaatgccaaggccacgttcaagattttcgacttcagtgatgcgtttgtgctgagcaaggtgggcttctccgggatcttaattcaaaaggatgaaaataaggaggagttgtcagacaaggacatatacatggaggctggcatcttcgtgagtgccaatcgtggtcctggtgtggactactgtgggaacaggggtctctccatccagggacatggtggatggaccctacgtccctccattctggtttcacccggggtggaggtacgaggaaatgaggatagtgtggacactgctgcctgcatcccagcagccccagctcctgctccgaccttggctgaaagatgcacaggtacagcttgggtcactgcctcagagggtgcaagctataggccttggttgcttctacatagtgttaagccagtgagtccacacagcactagtctagagacttgggagcctccatatatatttcagaagatgtatgaaaatgcctggtgtccagacagaaggctgccaaaaaagcagagtctcatgggaaacctctacttgggcagtgcagaaggaaaatatggggttggagcccccacactggagaccaccatcatgcagaccccagattcatag

SEQ ID NO: 3461 - DNA, 407 bp, Homo sapiens
  SIMILAR (239)..(361): 581254mologous to Zea mays cytochrome P450 monooxygenase,accession number AJ004810,Smith-Waterman Score=92.
  misc_feature (1)...(407): n = a,t,c or g
accgctgattgcgccaagcccgttcccttggctgtggtttcgctggatagtaggtacggacagtgggaatctcgttcatccattcatgcgcgtcactaattagannnnnnnnnnnnnnnnnnnnnnnnnnnnnnnnnnnnnnntcccgccgtttacccgcgcttcattgaatttattcactttgacattcagagcactgggcagaaatcacatcgcgttaacacccgccgcgggccttcgcgatgctttgttttaactaaacagtctgattcccctggtccgcaccagttctaagtcggctgctaggcgccggccgaggcgaggcgcctcgcggaaccgcggtcccgggggcggacccggcgggggggaccaggccgcggncccttctccgtctgacgccgacgccg

SEQ ID NO: 3462 - DNA, 367 bp, Homo sapiens
  SIMILAR (290)..(228): 851254mologous to Mus musculus ribosomal protein L7,accession number X57960,Smith-Waterman Score=97.
cagtaataaatcttaaactacaagatatattaataaatgggataaaagccataataaatgtatcccccagaaaactaataaatatctaaccgccttaataataaaacctattctctattatatataagatattttttatatattataatattctatttattcaatttgagagcaggtactgtttattaaccaaccagcttagaaaaataatcatggtagacaccttagttcattcttctaataagcctgttgatctggtcatccctgttgccagcatctccacctctcatgtctcttcaccgtgccagactagcgtcaagctcaacagggtcttctttcccagctgattccgccaagccctcgtgcc

SEQ ID NO: 3463 - DNA, 810 bp, Homo sapiens
  SIMILAR (118)..(276): 331254mologous to Zea mays cytochrome P450 monooxygenase,accession number AJ004810,Smith-Waterman Score=58.
  misc_feature (1)...(810): n = a,t,c or g
cccttctgctccacgggaggtttctgtcctccctgagctcgccttatgacacctgcgttaccgtttgacaggtgtaccgcccccagtcaaactcccccacctggcaaacttgttccccccgggaagactgtgtgctcggcgcgcggtccgggcgcttggcgccagaagcgtagacgcacctcggcgcgcgcccacccgcctcaccgggtcagtgaagagcggatcagagtagtggtatttccccgctggccgcgcagggccggcggaccccggccccgggcccctcgcggggacaccgggggcgggcgccgggggcctccccacttattctacacctctcagagtctcttcacccgtgccaagactagagtcaagctcaacaggggtcttctttccccgctgattccgccaagcccggttcccttgtgctgtggtttcgctggatagtacggtagggacagtgggaattctcgttccttccattcatggggcgtcattaattagatgacgaggcatttggtccactaggcactngcattccacgcccggctccacgccagcgagccgggcttcttacccatttaaagtttgagaataggttgagatcgtttcggccccaagacctctaatcattcgctttaccggataaaactgcgtggcgggggtgcgtcgggtctgcgagagcgccagctatcctgagggaaacttcggagggaaccagctactagatggttcgattagtctttcgcccctatacccacggtcggacgaccgatttgcacagtcaggaccgcgtctcgtgccgaattc

SEQ ID NO: 3464 - DNA, 732 bp, Homo sapiens
  SIMILAR (523)..(729): 811254mologous to Homo sapiens makorin 1,accession number AF192793,Smith-Waterman Score=318.
atggatctctgctccctgcagaccctacacttttcacattctgctgaactgtcttcccaactcaagcagggacagatctctggaatccaaggaagagaagtttcctgtgcaagagatagaaataagaggcacccaaataagaaagaggaagtcaaactatccctgtttgcagataacatgatactaaatctagaaaagcccacagtctctgcccaagagctccttgagctgataagcaacttcagcaaaattttgggatacagaatcaatgtacaaaactcagtagcattgctatacactaacagtacccaagcagagccaaatcaggaaaacaatccctttcacaactgccaaaaaaaagaaaaatacataggaatactgctaaaccgggaggggctgctgcttgccctgcacatggagaatcagagcacaaacctgcctgacctagacccaatgctgctttgccccaccacctacccaggcggaggtgaaagaagagaaagagaaagaaagaggagaggagaaaaagagaagcagaaagtccttcggaaatacaaggaggcaatgagcaacaaggtgtgcaagtattttgatgaaggatgtgggagctgcccatttggagagaactgtttttacaagcatgtgtaccctgatggccgtagagagaagccacagagacaaaaagtgggaacatcaagcagatactgggcccaacgaagcaaccatttctga

SEQ ID NO: 3465 - DNA, 840 bp, Homo sapiens
  SIMILAR (66)..(383): 741254mologous to Danio rerio Makorin RING zinc-finger protein 1,accession number AF277173,Smith-Waterman Score=435.
tgtggttgcagttggagaggatcccgaagcggcgctcacacctactgtctcaaattgcttagcactcctccacttgcgaatgcacttgagacagtaggtgtggttgcaagtggaggagtgctaagcaatttgagagcaagatcataaagtcctgcccagaatgccggatcacatctaactttgtcattccaagtgagtactgggtggaggagaaagaagagaagcagaaactcattctgaaatacaaggaggcaatgagcaacaaggcgtgcaggtattttgatgaaggacgtgggagctgcccatttggagggaactgtttttacaagcatgcgtaccctgatggccgtagagaggagccacagagacagaaagtggggaacatcaagcagataccgggcccaaccgaaggaaccacttctgggaactcattgaggaaagagagaacagcaacccctttgacaacgatgaagaagaaggttgtcaccttttgagctgggcgaggatgttgcttatgcttttggctgcaggtggggacgacgaactaacagactcttgaaagatgagtgggacttgtttcatgatgagctggaagatttttatgacttggatctatagcaaccttgcgtggcgtgtgaactgttctgctgacctcagacagcagctgtcccctgtggtggtgtgccagtgcctgtgttctctcctaggcaggcctctcaactccaggtgctgtcctaagaatttttacccagggcctgtcttctcaacccctcacctttccctgaggagtgtgttgttttccctgttgaaaaaagttacaaaaataaatcttaaagttaa

SEQ ID NO: 3466 - DNA, 656 bp, Homo sapiens
  SIMILAR (558)..(656): 671254mologous to Plasmodium lophurae histidine-rich protein,accession number X01469,Smith-Waterman Score=173.
gaaatcacttttatattgtcacatgggccctctgcacagagtccgatggctcctcccggggaagcctgattttgtgacgtgtgtatagtaaatgcaggccctctggcagcaccataattggtcggttaccctgagcccagagctctgaaagcatctgtggaatgatcacgggacccttctcctctgagaaggctcccggctgcctccccgccaccgagcttgtagcctgaatgcctggctgtcgcatggagcattttgcttctggggtgtcttccttagccaaagggaacgtgtcatttgctcgaccctggcccacccttgccgcccagctgttgtgctgggcacaggtctggggcacaggcctccatgatgaagacgcgtgggctgtcggtgctttcatccgtcacaaactggcacctgtacctgacgtcccccctggaatgtacaccattgaccggccacatgccacctggcatataacaggcattcatggtcacctcatagagcacctggcatatagcaactgctatacagctatcagcccatgtatttgttgtcattaccagcaacttcatcactatcaccaacaccaccatcatcatcaccactatcgtcaccatcatcaccatcaccaccatcattactgtcaccaccat

SEQ ID NO: 3467 - DNA, 1482 bp, Homo sapiens
  SIMILAR (568)..(789): 481254mologous to Human endogenous retrovirus K pol protein,accession number Y17832,Smith-Waterman Score=169.
atgcagctgcagatcctgacaatattcttggatctccaccacaacaccaacatctgcaatgaacttgagtcttccaatgtagatgatccttgtgatatctgggagaaggttcacattagcctcatcttcactgccaaaggaagtaagatacccaagtcctcagacttccaagctgaccgggagctcaacatgtttgatatcatttctcagtatgatggctgtccaggttccatcggcctcacctctggagcaggaagtactcaccacagagcaccctggactcagacttatccccaaggaccaacacacctcagtgggtcccctggctgcatccttgccagcatcactggcagagtaaccaagatgcctgagtcctcagaatccccagcctgggagctccctaggttcacagagctgtttctcagcatcaaggatgagtggacctgcatcttcttgcagctctgctgcccaacaatgcttctttcagggttcccccccatcaggattgagccttggtcaccgctaagtgaccagctcaatcctatcccactagaagctgctattgccacccactcacggattcaccattgtcctctggtgttcacggcatcacttccaggacctttgactgcagggaatcaaatggctgatcgtctagttgctactgcagtatctaatgctagacactttcacaatttaacccatgttaatgcctctggtctcaaatgcagatacagcaatacctggaaagcagctaaagctattatccagcgacgcccaacttgccaaaagagaaaaatcaaacagatcaggaacaacctgtacagcccgtatgagcagaaggtgttaggttttggagggaagaccactgaccttgcacatcagatcaaggcactcgaggatgacctctgtaagcaggagacaatccacttggtggctgccctcagttacatggacatccccaccacagaagcactagaatatggctcgggagcctgtctgggctgtcccatctctggtgtttccaaaggcaacaagacaaggtcaggggcagctggcttccacctcctgccttcaagtctgcactttgcatttggaggttcaagcagcaacatgcaaacagaccatatgtctgctggggaatggagcacagaagtccatactcacttctacctagatcttccagctcaagccatccccaaatacatggcaatcttgactcagatgatctccaggtacagcgaggtgagtgtttcatatgcaggccatgttttcacaggcttagaagtgtccctgatacggacacacaatgtccacagcccagggtcagaggatgacttaggttgtatccagcatgggggtccaacatacaccatggaagtgggcaaagccaagccaaacacatctggcatcaacttccactctatgaagcaatgtgacattggcaaggctccctcccattatgggagctcaaggaagtga

SEQ ID NO: 3468 - DNA, 1158 bp, Homo sapiens
  SIMILAR (3)..(50): 501254mologous to Mycobacterium leprae gadB; Glutamate decarboxylase isozyme; B229_C1_166,accession number U00020,Smith- Waterman Score=41.
atgacaaagagtcttggcctggggctgcgcacagcacacaagcatgctaccctcaagagcctgcaagtgcaaaggacactgtcccagaatcctgccggagagtctggggatgcagctcttgggttctgtggggaaagagacaagatgccaggaaggcccgatgcaaggagcaatggggtccttgagaagccccccaaccccacttggaggctcaggctcagcgctccaggcctctggggtgaggaaggggcagagggagacatatgcatgttctcagtgcaactgctggacatgcgctgcacaatttttgaactgaaagatcaaacagctccagctgcctacctcactctgccccaaaacagtctctctagtctgggtgaccagcaacctcagtccttcagcgccagccctgcggcggcccaagttaccagccagactgggggtagaggagaagtgtgcaagcagaggggccgcgtggagccaccttccaaattccctccctgggccagcgacgagtctcagacggaagtccaagacgtggcctcgggcctcctgtccgtctgtgaaatgggggcaggaaccagagctgagcttgagacccagacagggtctgagcaggactgggaagactatcgcctccccagttctgggcatagatcttggttactacggccaatgatcctgggaaaccgctttgtaccagtgacttctgtattatttgatctacatttccatcgaaacagtcagttctaccatattataactgtgatcatgtttgctcagtattgtgactattacaaggggagcaggactcttgagtcctgcagcagccgaagcatctcaagcagcatctgtctcccacgcccccttcctccagccagcgtggccccgtgcagcgtgagctcctgcagggagtgtctgcagggccacagctccctcactcatccgcggccccagcaggctccattggccacggccgtccttggcacagtcagcagcaaacctggcaaggcggcaagtggggaccgatgccagccctcgtggctttcagatctccatcagccaggactccaaaatagcatcgagaagcagtggatgtgctccatttcaggagcatatcaaggactgctgctcaactgttatagggccagggtctga

SEQ ID NO: 3469 - DNA, 369 bp, Homo sapiens
  SIMILAR (210)..(97): 361254mologous to Homo sapiens Secreted protein yb7_1,accession number Y26041,Smith-Waterman Score=60.
gtccctcagtgagttaggggacagtcagttttagtcctcaggaccctgctccaagcagagtcttggcctggggctgcgcacagcacacaagcatgctaccctcaagagcctgcaagtgcaaaggacactgtcccagaatcctgccggagagtctggggatgcagctcttgggttctgtggggaaagagacaagatgccaggaaggcccggtgagtggtcatcaaccagcttgtgggttgagacttctgagaacatgttgggaatcctgatacctggggattccagacatctgttgtggcagtatagggaacaagcaaaaggctccattcatggtggtgacatattttgccaaagattatttctcgtgcc

SEQ ID NO: 3470 - DNA, 564 bp, Homo sapiens
  SIMILAR (178)..(125): 331254mologous to Homo sapiens Human secreted protein, SEQ ID NO: 6812,accession number G02731,Smith-Waterman Score=48.
ctttaatggctgcgataactgtgactctccatgatccatgtttcttttatgcgcatatgatttgacgcacactcattcagagtcctccgagaggggcacccatacacggcagaagtgttcatctccaacatgaaagtgaccagctctcatcctcgtctccccaacaccataacgtcctcatcccgcctccaacccacaccaggccgaagccctcagagagtgttttcatcaggaaccactctcgaacctgaaggttgactttagcgtttagcaacccagggcggtgtgtgtgtttcccgttttgttttctgagtggtagcagtgatcaccgtaattccatgtagccatgtgctagcagaacccctgtgtcctcaccgtggcccgtgtgaccccagccgacgagtgcccggcggagcccccgctgccttcccatggtccagtgagctgccagggcatcacatgactctcagctgtgctcttgtcgcttctgtgttgtggtgacaccatgcgctccccagggccagacctgcacgcggcaggtctgtgcccgagtcacccacgggc

SEQ ID NO: 3471 - DNA, 1065 bp, Homo sapiens
  SIMILAR (479)..(940): 291254mologous to Triticum aestivum initiation factor (iso)4f p82 subunit,accession number M95746,Smith-Waterman Score=105.
tcagtcactgtcttcccccatgtttggattctgctcttgcatggggtgtctggctgaacacgcagggggtttgccagggtagttggagccaatgtaagactgcctcaggagagcttcatttatttcagagaagggctgcatgtgcgcattaatattgtatgttttgcaggtcatgtgtctgttgtaactgtttaacttcatcatcatagcatggaagaagccattgacaatacataagtggatgagcgtggctctgttccaataaacctttggcgtattcagctgtcgaagaccttctgtgcaccaggctccactgtcggcacaggggctgctgcagggaaggacatagaaccagccctggcagttggaatacagctcaaaatggaggactgcaagccatgagcgctcatagtaggaagagcctggagctgtttgatctttcagttcaaaaattgtgcagcgcatgtccagcagttgcactgagaacatgcatatgtctccctctgccccttcctcaccccagaggcctggagcgctgagcctgagcctccaagtggggttggggggcttctcaaggaccccattgctccttgcatcgggccttcctggcatcttgtctctttccccacagaacccaagagctgcatccccagactctccggcaggattctgggacagtgtcctttgcacttgcaggctcttgagggtagcatgcttgtgtgctgtgcgcagccccaggccaagactctgcaccaggtcctgcaagggcagggggagctcgatggttagatagggtggtgggctccccatcttctcctcttccttctcagccacatccctccagttatcttcagagaccgtggcccgtgtgaccccagccgacgagtgcccggcggagtccccgctgccttcccatggtccagtgagctgccagggcatcacatgactctcagctgtgctcttgtcgcttctgtgttgtggtgacaccatgcgctccccagggccagaccgctcagcccagagcaggcctgtgataaagacctggcggctgctgcttgtaggcat

SEQ ID NO: 3472 - DNA, 1665 bp, Homo sapiens
  SIMILAR (1014)..(694): 1001254mologous to Leishmania major probable levansucrase precursor,accession number AL160371,Smith-Waterman Score=563.
ctagctgagcagcaggtaaagagaacctgaagacctgagaatgatggcagaatggagaagcatgggggcttcagggaggagctgggagccctctccactatttggtgggtcaaattcacgtggatcaagtagacactgcgcaaaatatcctttctgttcctctccagaatcctttgtttcttttgctttggttttgatgttacagtccacagcgacttgagcaagaccggccagttcatcatgtcgcaagtaacgccaaatagcgcccagacaaagaggatgccccaatacgccggcattgtcgtattggcatttatatctatccttatcgcccagcatcatcttattctctattggaaatccccccatcttacagtaagtacaaaagtcccggacacccacgcagatcccaatagaatccgccaaatcattgtccagctttgaagtcttggaagaagttgccaccaggatgcaggtaggggtcaatctcctccaggatccagagagcatatcagccagcttcagggtcaggaaaggagcctgacaggtatgcagtaggacggggctggggctggccgtgtggatcacgtgggccttcagccccactctggtctccagaagttgagagaagcactgtgcctccagcactgtttcaaacaacattggcctggagctgcaggggttaggggagtggtgatagccgttgtattcagctactgttccgtcagcgttttgcagcggccagctgtcccacacatcaagtccttttgcagactcaatatttttaatcgttgattgatcgaattgaggcacttggtatttttcgttttgctgctgtttagggatctgcagcatatcatggcgtgtaatatgagagacgccgtacgtttctttgtatgctttttggttattttctttcgcgaaggcttgagtcgctcctcctgccagaagtgcagtcgtaaaagtcagaactgtggcttgttttacaatttttttgatgttcatgttcatgtctccttctgtatgtactgttttttgcgatctgccgtttcgatcctcccgaattgaagggatgctggcaggaggtatcagtttctcactatatgagtatctccacagggctgactgaattccctcagaacataacaactggcttctcaaagagacattgatctgttcaggcttcagacccggcgggacccaggcatactcttccaaagcacagcctgagtcatcatctgaggtcgagttcctctgaaagtcaaacatgagtttgctgatggtcttctccatctccagcggcatcactgtcaccatgtgctcctcctggggacacttgcagtgcaggcagatcttcctatccctagagggcctcatgaagacatccaggtctggcccatgggcagttttgggggctggttctcccatacctaggccctggatgaagacgcagctctcgggcacccttgggcctctacgaggaagcaggccccctcctgagtcaccctctggggcagtcaatagtgggggagcgcccgggacccccaagcctactacctgggccttcctcttgtgccttttcttcctccttttcctcctggactctaagaaagacaataggcccccggtcctcagggcaggtgtcagtgcatgtgcactgcacat

SEQ ID NO: 3473 - DNA, 1278 bp, Homo sapiens
  SIMILAR (234)..(85): 1001254mologous to Homo sapiens Human nucleic acid methylase- 2,accession number Y44277,Smith-Waterman Score=265.
tcacaacactggatttggcaatgatctattagctacgacacaggtccccaatccccgggccacgaactgataccagtccgtgtcctggaattctttttcaccaataaacatatttacttctattcgtccaaatttatatatagaagtacaggaatacaagtcatatgcgagtttccaaagtgcccttttctcacctctacttgggaacattccaactacttttaaagggatgtcctcatggggagggtcactgactctggggactgaagtcccagtgggcccagctcgagccaccagcccccagccttgaagggccaggtcctccagtgtctgctgtccccatagatctctctcaggctcaacctgcacctgtgggatgtgtatttggtagaaggggaacaggtgttgatgccgatggcatgcactgcctttaaggtttaatggagtaagtccacgtgtgcccaatggcactgggccttcctcttgtgccttttcttcctccttttcctcctggactctaagaaagacaataggcccccggtcctcagggcaggtgctcagtgcatgtgcactgcacatgtggaggtgctgcctgatcacgtctgtttttctttcagccaaacccaggcaagggtcctcagcagccagggctgtgctggcttcacgtggcaggaaggccctctgcagcggaactccatgtcccgactcccagtggacttggatgtggtgggcccttggttccataataatttcaaacagagctgctgagctcatgtcccttctgaatgtgtcctggacagcccagctgccccgcaatcccagacaccttggaaaatgctgttcaatgaggaagccggtcccgtcaaggccatgagagagaaaggtgagcatggcatccctgcagcccagccagccagtagcatgccctgggtccttggtcccaacctgtggaacagtgtccccctcccagggcacaattcgcaggccaagaggggcctggcctagaccccagcccaggctgacaccactgctgagcgcccctccgtggatgagacacttgcacccagtctctgggttggcaccatttcccaggaggaccagctggccacctgctggcaggctaatcacactgtggagggggctgagattggctttcactgcaccaagccacaatgtggacgtggatttgccggccctcagggccttggctctgccacctcgacttggaatgttctcagctccctccaggcttctagaagcatctgggacacagctcat

SEQ ID NO: 3474 - DNA, 1560 bp, Homo sapiens
  SIMILAR (91)..(612): 281254mologous to Homo sapiens S164,accession number AF109907,Smith-Waterman Score=167.
atgtcacgtatcagtgatgactgttctgagctgtgccctcttaaagcaataaagaaagagaggaggaaagaaaagaaacaagaaaaatgggaaacatacagagagaagagaaacgacagagggggcagcgcagaagaaacggagagcgaaaaaaaagaaaaaataccaagaaaagatgaaacgcaggaagagaaggcgagaaaaaaagacaaaaggggaagacagaagaacgaaagaggagaggggggaggaggagaagagagacgaaagaggaaggagggagctaaagaaacaagaaacaagcctaaagcgaagaaaaaaaaggaagaacaggaaaaaacagaaaggagaggagaaaagaagaagggagagaaaaggagaggaagagtagaaaaagaccgaagaggagggaggcaaaagaacaaaacgagagagagagactggggaggagaacagcagaaaacagagagagaggaggagtgggcacggaagaggtggaaagtgccagggggatgggagagagaggcgccgcatagggagctagagaaaaacgaacagttggacaaacattcaagttctagggcaaagctgtatgatgcagggcagctggacctctgctccaacctcattcagagttgtgacccagaatgcccaatgcaggccacaagcctcaccaggtatcctaccactacgcagatttttcttcgaggagcacaagggtgggtctgcgtggaactgttcaggagctacggtgtcgaagacaccagtgcttgggaacgtgacatgagaaattttggatgcatgacccgagaaaagcaaggcaaaccagggcagctgctagcacacaggcacctctgtgcacatcagaaaatgagcctcctctgtgcggacaactcacaaaaagggtgcctgtctcccgctaatgcagccccttgctatggtgtgcaggtggcaatactgacgtcagcccccacctgcccctaccacctggagcctttgtgcaggagtttctcgctgtcagatcagcaggaggctatttcagaccctcgaaccgcagtccgcatagcccgcagcggcgcatcctccaatccccgactgtgcgtgacgctaacctttccacgcgttctccagcctttcccacaccccccacagcggtggggggaggcgacgaagggaggaagactccccgccaagggctctccagcccgcacagcggcagggcgatgcgggagaagcgcagggatgccgcccgacgccagagccatatttacatcggctgctgctttgccaaaaagccgacttgtgcccagtaatattgcctttaaaggaaaaagaaaggacctaagcactaaagctgctgccccaaatctgctcgcgctccggtatcctcgccccagtgccccagtgggaggctcgcacgcgcccagcccgggacagcagctgcagccggaggaggaggggaacgaggaggaagaggaggaggaggaaggggaccgcgcgccggtcttcaccacggggcggaaagaccgcgactctctcgcggaattctctcatacctaa

SEQ ID NO: 3475 - DNA, 528 bp, Homo sapiens
  SIMILAR (28)..(378): 491254mologous to Homo sapiens Spir-1 protein,accession number AJ277587,Smith-Waterman Score=236.
atgcctcgccctgcttcggctcgcgcacggtgcgcacacacactggcctgcgcccactgtctggcactccctagtgagatgaacccggtacctcagatggaaatgcagaaatcaccgtcttctgcgtcgctcacgctgggagctgtagaccggagctgttcctattcggccatcttggctcctccccaggattttcttggggattctattggatctgtatatagctttgggaatcttgtggagtcatctatggtgaatggaggtttgacatcacaaacaaaagaaaacgggttaagtacctcacagcaggtgcctgcacagcggaagaagctcctcagagccccaactctggccgaactggacagctctgagtctgaggcccgctcagggtgtacggactgggtgctggaatggacacttgatcttgctggccatcagcgtattctccctttgatgagaggagctgattctgtgatttctaggtctcttccagttccaaaacgtggtagttttgctccagaagcatga

SEQ ID NO: 3476 - DNA, 709 bp, Homo sapiens
  SIMILAR (416)..(634): 841254mologous to Homo sapiens Spir-1 protein,accession number AJ277587,Smith-Waterman Score=291.
atgaaggaggcgaggcccatggccacccctggcttgggttcaaggagagcaaagtgtggcttcagtgactcaggcaaaatcagcacgaagttcttaaggatccccgaacccacacacacgggggacagatggggacgagcagcccagagcagcgcagcacagcctctggagctccgggctggagagccaccagcagctgcgtacttctggcgtcccctcaccatgtgcaccatgcacacgggtcacaagaggctgcaagtacccccccagtgccctggacacaaagggagtaccatggatggcctcctgggatctatcctttctcctctcacctccacaaagcttactgccaaatcctgccagagaggagctgtgaagacggcagcaggctccatggaagcgtcactgctggagagatgtgactacccctgaatctacaaagaatcttgtggagtcatctatggtgaatggaggtttgacatcacaaacaaaagaaaacgggttaagtacctcacagcaggtgcctgcacagcggaagaagctcctcagagccccaactctggccgaactggacagctctgagtctgagccacgcacagccgttcactcttcctgcacagcccatcggtgctcagcttggtgcttagctgtgtctgcggtctgcccctcacgtccttgtcagagtcagcgtggcctcgctttgtcttag

SEQ ID NO: 3477 - DNA, 446 bp, Homo sapiens
  SIMILAR (440)..(315): 971254mologous to Homo sapiens Human secreted protein, SEQ ID NO: 6169,accession number G02088,Smith-Waterman Score=212.
cgtgcaagaatcccgggaggggcttgttgcagttatctcgaagagacggcagccttcccagtgtggggcagtgaggatagacccaaggaggcagaatcaaaagacatttgggtacctcagcttccccgactggaataatgaaataccctccctactgcacctgcccatgctttcaatctgcactacacccagtccctggaggtctctcggggaaggaagccgagtcccagtgactctctcctcaccatccatcctctcaggctccaggggaagatcccacgcccctcagccagtctccccaaacatagtaccctaccggctcttggcttccctgccacgtgcgggcgttgctccaagccccaagccggcattgccgcctcgcggcaccgctccagctcctccgcatcgatactgctgttactactttccgaatcgctcacacgaaa

SEQ ID NO: 3478 - DNA, 1582 bp, Homo sapiens
  SIMILAR (58)..(324): 951254mologous to Homo sapiens Human secreted protein, SEQ ID NO: 6169,accession number G02088,Smith-Waterman Score=434.
gagaggggcctcgcactgatacatagagaacttatacgcccgcttggccgaggcaagatggcggcgcccagtggcacagtgagcgattcggaaagttttaacagtattagcgatgcggaggagctggagcggtgccgcgaggcggcaatgccggcttggggcttggagcaactcccgcacgtggcagggaagccaagagccggtgctgcaaatagccagttgtcaacctcccaaccgagcctcatgcataaggtgaatgagcatgaacaagatggcaacgagcttcagaccacccctgaattccgagcccacgtagccaaaaagctgggagccctgctggacagcttcattaccatctcaaaagcagcaaaggagccagcaaaagctaaggtacagaaagtcgctttgggaggattgatggtttccgccttttcttcacatcttgtccctggaaggccgtttagaaggaagagtctccccaacccccgccgaaagcgacagccctccagctccagcagtgaggacagtgacgaggagtggcggcggtgccgggaggcagctgtgtcggcgtccgacatcctacaggagtcagccattcacagccctggaactgtggagaaggaggcaaagaagaaaaggaagttgaaaaagaaagccaagaaggtggccagtgtcgactcggctgtcgctgccaccacccccaccagcatggccacagtccagaagcagaagtcaggtgagctcaacggggaccaggtgtcgcttgggaccaaaaagaagaaaaaggcaaagaaggccagcgagacctctccattcccaccagcaaagagtgctacagctatacctgcaaactgaacccacccatgggcacagggctcaaccagctccaaggacaaggtgtcccccccaccctggggacaaggcattttcaagccccacctccctctccaaggtcaaggactgggctggcaaacccagactgcccatgagaccctgatggtgatgaaggcttgctcgagaggtgggccaaaaaagtggctgtagggtgagaagaccaatcaaggcctgcccctctgtgctcccacggaaggctggcgggggcgctgtggttccagaacatttcatgacctcaggaaaaaaggaaccttccagttatttgagactagtggccaagtggtgaaacctccatctccttagaactgtcttgaggtggcaggggaaagggagaccttccccaccacctccttagcctggtgtgagaaacagtttttagaaaatgagagaagggatccccaagaggccaaggcccagagaaacttttgttcttctctccttagcccacatagacttcacagaatcgtctgagaaaggagagctttttcacccctggctttctagaattttctttgtctgcatttgtgaatataccacacatgatgggtgtctctgagccgaccaggattatggaaactcaattgtcagaggacccaaaacaaaacttagagtgatttggatattgcctctctgtcaatgctgaaccttaagacattttaagtaaacatcctcctcctctctaaaaaaa

SEQ ID NO: 3479 - DNA, 1470 bp, Homo sapiens
  SIMILAR (649)..(1371): 271254mologous to Aplysia californica buccalin precursor,accession number S64298,Smith-Waterman Score=124.
atgattgacggaggtcacacagcaactggtatgacagggacaggtttccggaattccagtgtcttaacaccaaagcctgtagtatttctcagagagaacaacaccactgctcgtgtgtgctcagaagaaagtttagtggtcgtaacatccaatacatccaacctgcagatcaatacacaaagaccctggaggaagggcaccactttggagccagcattttcggcctcggaaatgagacccagagcgcctcgcgcgagcagccccaacctccccgcagacgacatgcgacaccgcccgggtgacccaggctcgggaatctctaggcttcacggacgcagaaccagggaagacacgcctcaatgcgcgtgtgcaactctatcccgtcctttaaagaaggccatgtggcctcttcaccaatcggaatcctgctttttccctggtcccgccttattcccagacttccggcgtctcgctggccgcaaaacaaccctaaactacagggctcggcgactcccagagacttctgggggagaggccgggggggaccctctttgcagataccgagggaagagaagtctcccatctgtccttagtactttctctggcgacgtgggagaggccagggaggagcctctttgtagctatcaagggaagagaagtctcccatctgtccttagtactttctctggcgacgtgggagaggccagggaggagcctctttgtagctatcaagggaagagaaatctcccatctgtccttagtactttctctggcgacgtgggagaagccagggaggagcctctttgtagctatcaagggaagagaaatctcccatctgtccttagtactttctctggcaacaggggagaggccgggggggaccctctttgcagataccgagggaagagaagtctcccatctgtccttagtactttctctggcgacgtgggagaggccagggaggagcctctttgtagctatcaagggaagagaaatctcccatctgtccttagtactttctctggcgacgtgggagaagccagggaggagcctctttgtagctatcaagggaagagaaatctcccatctgtccttagtactttctctggcaacaggggagaggccgggggggaccctctttgcagataccgagggaagagaagtctcccatctgtccttagtactttctctggcgacgtgggagaggccagggaggagcctctttgtagctatcaagggaagagaaatctcccatctgtccttagtactttctctggcgatgcgggagaggccagggggaccctctttgcagctatcgagggaagagaaacctcccatctgtctttcgtactttctctccgtaccctggaccctagccttgaccaggctaccgtcatctcgtggaaactgagtagcctcttaactggcctctacacttcatgtcactgggacgtgtctctttctcactga

SEQ ID NO: 3480 - DNA, 793 bp, Homo sapiens
  SIMILAR (78)..(593): 281254mologous to Xenopus laevis APEG precursor protein,accession number X51394,Smith-Waterman Score=119.
atggccggagaggatgagactcctgtgcccttgccaatctgtgggacacgtcctattgtgcagcagcagcgcatatggcacctgtaccgagtcatctccgaaaacatcagcgagtggaagtgcatggcttttgccaagttcagcccagctatggcccaggagaagacagagggctggctgacagaggcagcacggatgagcacaaccctggagctgcacagccccgtgctgcagcactgcatgcgcatcctgggggagtttcgcagctacctgcccctgctcactaagctgggcagcctccacccacagagcctcaactgccagtgtctcctgcgtgatccaatccccaagtctcggctccaagcctgtccccgaagcagttacccagtcctggttcctgagacccagctgttccaggtctggcagaatgaaaatgaacgaattcatgcccaagagactatacggcggttgcagcggtactgggaagcgcgccagctgcgcctgctcaacttcatcctgcatgtaccctacgagcccccagcctcagagcgctccaagaggcaggtgctccgcagcccccaatgggaggtagtggacaaagatagtggcaccttcatcctctcagattacagcaacctgcaggattccatccaggaaaagtcttcaggtgttgtccaagatcttggccatcgaaaagtcaggagatttaaacaaaatagctttggagtgggtggccatcatgcatggcctgggtaaccttgaagcacatgttttgacggtgatggagtcatag

SEQ ID NO: 3481 - DNA, 1340 bp, Homo sapiens
  SIMILAR (76)..(1272): 1001254mologous to Homo sapiens ARNO3,accession number AJ223957,Smith-Waterman Score=2103.
ggcacgagggcgtccccagcccgcggcccctctgctgccggcccccggctcgccggctgcgggagtggcctcaagatggatgaagacggcggcggcgagggtggtggcgtgcctgaagacctctcattagaagagagagaagaacttctagacattcgtcgaagaaaaaaggaacttattgatgacattgagaggctgaaatatgaaattgcagaggtgatgacagagatcgacaatctaacttccgtagaggagagcaaaacgactcagaggaacaaacagatagccatgggaagaaagaaattcaacatggatcccaaaaagggaattcagtttctaatagaaaatgacctgctacagagttccccagaagacgtcgcccagttcctttataaaggagaaggcctaaataagaccgtcattggggactacctgggtgaaagggatgaatttaatattaaagttcttcaagcctttgttgaactccatgagtttgctgatctcaaccttgtacaagccttaaggcagttcttatggagcttcaggctgcccggggaggcgcagaagattgatcgcatgatggaggctttcgcttctcgctactgcctgtgcaaccccggggtcttccagtccacagacacgtgctacgtgctgtcattcgccatcatcatgctcaacaccagcctccacaaccacaacgtgcgtgacaagcccacggcagaacggttcatcgccatgaaccgcggcatcaacgagggcggggacctccctgaggagctgctgaggaatttgtatgagagcattaagaacgagccatttaagatcccggaggacgacgggaacgacctgacccacaccttcttcaaccccgaccgcgagggctggctcctgaagctgggagggcgtgtgaagacctggaagcgccggtggttcatcctgaccgataactgcctctattactttgaatacacaacagataaggagcccaggggaatcatcccgttggaaaacctcagcatcagggaggtggaggacccccggaaacccaactgttttgagctctacaatcccagccacaaagggcaggtcatcaaggcctgtaagacggaggccgacggccgcgtggtagaggggaaccatgtggtgtaccggatctcagccccgagcccggaggagaaggaggagtggatgaaatccatcaaagccagtatcagcagagatcccttctatgacatgttggcaacgaggaaacgaaggattgccaataaaaaatagctttcctggctaaaagacccaggtaaaagacccaaccccagcagaaagacaccgcgggcggcccc

SEQ ID NO: 3482 - DNA, 609 bp, Homo sapiens
  SIMILAR (32)..(349): 331254mologous to Myxococcus xanthus FrgA,accession number AF204400,Smith-Waterman Score=109.
atgacaaggcagctttctaattgctgggtggccgccgagtgctgtgaccctctgagacacgtcacccagcaggttctccaagaagcaccaattgtctcacaagctgtaggaggccccagcaggaccaacctggccacaacccctggcagccatcgttctacttactgtctctccggagctgtctcttctaggaacctcatcgagcccgccggcgaggaggccggcgcgacccgggcgcgcgctgaggagccgcccggtcgcctgcgcgctccctccggcggcgtccccagcccgcggcccctctgctgccggcccccggtcgccggctgcgggagtggcctcaagatggatgaagacggcggcggcgagggtggtggcgcagtgtactgtaacttggagctcaaggcatctggtgtgatactggctgtagcagcagagaagccctccagtggacaagctgtgctcacaaacacagaacatagtgaaccttcccatttgaaagggaaatcgagtgagaaaagttacctacacgcaacaccaaaggaagacatagctagcttcatcgcatttttaaatgtgtacaaacagcaaggacctccagatggatga

SEQ ID NO: 3483 - DNA, 524 bp, Homo sapiens
  SIMILAR (149)..(232): 421254mologous to Homo sapiens Fragment of human secreted protein encoded by gene 21,accession number Y36480,Smith-Waterman Score=47.
taatgcgagttccatgtgatgtgggccccttcaaaacaaagaccaaagaaatggtctatttcacagcggagcaggagtgagcggaggatggaagggtgtgatcaaggcccgacttgactctgacatccctttcctctggttagggggcgggacaccacgtgagggtctgcagggagagggtctgggagtggccttcctgggttttatggcctgcttcagggaagaaaggcagggaggttagaatggcctcaacggtgaaatatttatctttttcttcctccctaatcccagaattcagaaactgttagtgggtttgcataagttcaatgagaatctgttcttgtaatagggcacaattgaaaacattggttatattaccaaggctttgactggaatgtcctattttcagatacgactaaaggagttagggttgactgcatggtccaataaagccccttggaaaaaagctggcctggtacctcacatacgtggttcccttacagatgagtaaagaatgtcaattc

SEQ ID NO: 3484 - DNA, 760 bp, Homo sapiens
  SIMILAR (173)..(316): 791254mologous to Homo sapiens dJ697K14.9.1 (novel protein, isoform 1),accession number AL121829,Smith-Waterman Score=208.
accccgcgcgcgcctctctgtcgtggcgcggcttccgcggctcgttctctgcaaatgggctccgtggcctagccgcccccgtccccgccacccgtgatcgtgcgccgaggcccgcgagggttctgccgcccagatcccaccagccagcaagctaaagcatggcggsccatcccctccagcggctcgcgtcgtggccacccacgactactaccggcgccgcctgggttccacttccagcaacagctcctgcagcagtaccgagtgccccggggaagccattccccacccccccaggtctccccaaggctgacccgggtcaattggtgggccactcagtgctttttcgggaagtccacccttcccggttcatggccaacggtgttgggaagtccgcagagcactcggaacctccccaggcctccagcagcatgaccgcctgtggcctgggctcgggacgccccgaggaagcagcccggcggcggctgcagcaaagcagaccttcgcatcaacacagcagacaccaaaaaccacgtgagagccccgctctcctaccggcccggccccagcactcgctaagcttttcctgacacctggaacctgtgcacctgggcaaccaagccggaaaattaaacttccaagcaggccagtagccccgatgggcacaattgaaaacattggttatattaccaaggcttttgactggaatgtcctattttcagatacgactaaaggagttagggttgactgcatggtccaataa

SEQ ID NO: 3485 - DNA, 801 bp, Homo sapiens
  SIMILAR (54)..(185): 541254mologous to Plasmodium lophurae histidine-rich protein,accession number X01469,Smith-Waterman Score=168.
ttaccctgttaatgtcacaccaaaagctcctacccctgccccagataaaaaccccaagaagtttccaccacagtcgccatctgcaccaccaacatcggcaccaccaaaagcagcaccataaaaaacaccaccaccacttttactaccatcactgaaatcatcaccatcaccaccatcactgtcacaccccatcaccttcaccaccaccaccgtcaccattactaccatcaccatcaccaccatcctcaccagcaccatcagcaccacaacattaatcaccattaccaccactatcaccaccaccatcagcaccatcaacgccaccaccatcccagctgcacggtctgccctcaggaggagtgaacaatgaacacaggaagaggccacatagatgctggaaggtccaggatcccagataaccttggttatctttatattcctaccacccactctgaacttcgtcttgcattgagtaaacaccttccctccttcttgtagaataaagtctctatttattaccgccaatctccagatctctgtccccacctcaatcttaatccccaccaataccatcaccgctatcatcaccagtattaccaccaccaccgccgccacaaacactaccctcaccaccaccaccaccttcaccaccaccatcacaaccaccaccaccagaaccaccaccaccatcaggaaacacctcttcaccgcaccctcggactgccccagggcccccgccgccgctccagcgccgcgcagccaccgccgccgccaccgccgcctctgcttagtcgccgccat

SEQ ID NO: 3486 - DNA, 1234 bp, Homo sapiens
  SIMILAR (320)..(415): 1001254mologous to Homo sapiens apoferritin H chain,accession number X00318,Smith-Waterman Score=169.
gatgggaccccccgcctgaattcccgggtcgacgacctcgtcgagagtcgtcggggtttcctgcttcaattttgcttgtgacggaacccggcgctcgttccccaccccggccggccgcccatagccagccctccgtcacctcttcaccgcaccctcggactgccgccaaggcaccccgacggcgctgcagcgccgcgcagctcaccgccgccgccgccgccctctccttagtcgccgccatgacgaccgcgtccacctcgcaggtgcgccagaactaccaccaggactcagagggcggccatcaaccgccagatcaaccctggagctctacgcctcctacgtttacctgtccatgtcttactactttgaccgcgatgatgtggctttgaagaactttgccaaatactttcttcacccaatctcatgaggagagggaaccatgctgagaaactgatgaagctgcacaaccaacgaggtggccgaatcttccttcaggatatcaagaaaccaggaagtgatgactgggagagcgggctgaatgcaatggagtgtgcattacatttggaaaaaaatgtgaatcagtcactactggaactgcacaaactggccactgacaaaaatgacccccatttgtgtgacttcattgagacacattacctgaatgagcaggtgaaagccatcaaagaattgggtgaccacgtgaccaacttgcgcaagatgggagcgcccgaatctggcttggcggaatatctctttgacaagcacaccctgggagacagtgataatgaaagctaagcctcgggctaatttccccatagccgtggggtgacttccctggtcaccaaggcagtgcatgcatgttggggtttcctttaccttttctataagttgtaccaaaacatccacttaagttctttgatttgtaccattccttcaaataaagaaatttggtacccaggtgttgtctttgaggtcttggatgaatcagaaatctatccaggctatcttccagattccttaagtgccgttgttcagttctaatcacactaatcaaaaagaaacgagtatttgtatttattaaactcattagtttgggcagtatactaaggtgtggctgtcttggattcagatagaactaagggttcccgactctgaatccagagtctgagttaaatgtttccaatggttcagtctagctttcacagtttttatgaataaaaggcattaaaggctg

SEQ ID NO: 3487 - DNA, 1260 bp, Homo sapiens
  SIMILAR (608)..(649): 1001254mologous to Homo sapiens putative p150,accession number U93572,Smith-Waterman Score=63.
atgaaggcagaaataaagatgttctttgaaaccaacgagaacaaagacacaacataccagaatctctgggacacattcaaagcagtgtgtagagggaaatgtatagcactaaatgcccataagagaaagcaggaaagatctaaaattgacaccctaacatcacaattaaaagaactagaggagcaagagcaaacaccttcaaaagctagcagaaggcaagaaataactaagattagagcagaactgaagagctggttttttgaaaagatcaacaaaattgataaactgctagcaagactaataaagaagaaaagagagaagaatcaaatagatgcaataaaaaatgacaaaggggatatcaccagtgatcccacagaaatacaaactaccatcagagaatactataaacacctctacgcaaataaactagaaaatctagaagaaatggttgaattcctcgacacatacacactcccaagactaagccaggaagaagttgaatctctgaatagaccaataacaggctctgaaattgaggcaataattaacagcttaccaaccaaaaaaagtccaggaccagatggattcacagctaaattctaccagagtgttggaagttctggccagggcaatcaggcaggagaaggaagaaagggcattcaattaggaaaagaggaagtccaattgtccctgtttgcagatgacatgattgtatatctagaaaaccccatcatctcagcccaaaatctccttaagctgataagcaacttcagcaaagtctcaggatacaaaatcaatgtgcaaaaatcacaagcattcttatacaccaataacaaacaaacagagagtcaaatcatcagtgaactcccattcacaattgcttcaaagagaataaaatacctaagaatccaacttacaagggatgtgaaggacctctccaaggagaactacaaaccactgctcaatgaagtaaaagaggatacaaagaaatggaagaacattccatgctcatgggtaggaagaatcaatatcgagaaaatggccatactgcccaaggtaatttatagattcaatgccatccccatcgagctaccaatgactttcttcacagaattggaaaaaactactttaaagttcatatggaaccaacaaagagcccgcattgccaagtcaatcctaagccaaaagaacaaagctggaggcatcacgctacctgacttcaaactatactacaaggctacagtaaccaaaatagcatga

SEQ ID NO: 3488 - DNA, 2133 bp, Homo sapiens
  SIMILAR (2)..(61): 651254mologous to Homo sapiens putative p150,accession number U93574,Smith-Waterman Score=61.
atggaggaggatctaccaagcaaatggaaaataaaaaaacaaacaaaaaaagcaggggttgtaatcctagtctctgataaaacagactttaaaccaacaaagatcaaaagagacaaagaaggccattacataatggtgaagggatcaattcaacaagaagagttaactgtgctaaatatatatgcacccaatacaggagcacccagattcatgaagcaagtccttagagacctacaaagagacttagacccccacacaacaataatgggagactttaacaccccactgtcaacattagacagatcagcgagacagaaagttaacaaggatatccaggaattgaattcagctctgcaccaagcagacctaataaacatctacagaattctccaccccaaatcaacagaatatacattcatctcagcaccacatcgcacttattccaaaattgaccacatagttggaaggaaagcactcctcagaaaatataaaagaacagaaattataacagactgtctctcagaccacagtgcaatcaaactagaactcaggattaagaaactcactcagaacagctcaactacatggaaactgaacaacctgctcctgaatgactactggatacataacaaaacgaaggcagaaataaagatgtgctttgaaaccagtgagaacaaagacacaacataccagaatctctgggacacatgtaaagcagtgtgtagagagaaatttatagcactaaatgcccacaagagaaagcaggaaagatctaaaattgacaccctaacatcacaattaaaagaactgagaagcaagagcagacacattcaaaagctagcagaagaaaatctagaagaaatggataaatacctggacacatacaccctcccaagactaaaccaggaagaatttgagtccctgaatagaccaataacagggtctgaaattgaggcaataattaatagcttaccaaccaaaaaaagttcaggaccagacggattcacagccaaattctaccagagcatagtgctggaagttctggccagggcaatcaggcaggagaaagaaataaagggtattcaattaggaaaagaggaagtcaaattgtccctgtttgcagatgacatgattgtatatttagaaaaccccatcatctcagcccaaaatctccttaagctgttaagcaacttcagcaaagtctcaggatacaaaatcaacgtgcaaaaatcacaagcagtcctatacaccaataacaaacaaacagagagccaaatcatgagtgaaccttcattcacaattgcttcaaagagaataaaatacctaggaatccaacgtacaagggatgtgaaggacctattcaaggagaactacaaaccactgctcaacaaaataaaagaggacacaaacaaatggaagaacactccatgctcatggataggaagaatcaatatcatgaaaatggccatagtgcccaaggtaatttatagattcaatgccatccccatcaagctaccaatgactttcttcacagaattggaaaaaactactttaaagttcatatggaaccaaaaaagagcccgcattgccaagtcaatcctaagccaaaagaacaaagctggaggcatcacgctacctgacttcaaactatactacaaggctacagtaaccaaaacagcatggtactggtaccaaaacagacatatagaccaatggaaaagaacagaggcctcagaaataataccacacatctacgaccatctagtctttgacaaacctgacaaaaacaagaaatggggaaaggattccctatttaataaatggtgctgggaaaactggctagccatatgtagaaagctgaaactggatcccttccttacaccttatacaaaaattaattcaagatggattaaagacttaaatgttagacctaaaaccataaaaaccttagaagaaaacctaggcaataccattcaggacataggcatgagcaaggactttatgtctaaaacaccaaaagcaatggcaacaaaagccaaaattgacaaatgggatctaattaaactaaagagcttctgcacagcaaaagaaactaccatcagagtgaacaggcaacctacagaatgggagtaa

SEQ ID NO: 3489 - DNA, 1899 bp, Homo sapiens
  SIMILAR (667)..(1896): 921254mologous to Homo sapiens putative p150,accession number U93574,Smith-Waterman Score=1990.
atgggagactttaacaccccactgtcaacattagacagatcaacgagacagaaagttaacaaggatatccaggaattgaactcagctctgcaccaagcagacctaatagacatctacagaactctccaccccaaatcaacagaatatacattcttttcagcaccacaccacacctattccaaaattgaccacatacttggaagtaaagctctcctcagcaaatgtaaaagaacagaaattataacaaactgtctctcagaccacagtgcaatcaaactagaactcaggattaagaaactcactcaaaactgctcaactacatggaaactgaacaacatgctcctgaatgactactgggaacataacaaaatgaaggcagaaataaagatgttctttgaaaccaacaagaacaaagacacaacataccagaatctctgggacacattaaaagcagtgtgtagagggaaatttaaagcgctaaatgcccacaagagaaagaaggaaagatcccaaattgacaccctaacatcacaactaaaagaactagaaaagcaagagcaaacacattcaaaagctagcagaaggcaagaaataactaaaatcagagcagaactgaaggaaacagagacacaaaaaacccttcagagattaatgaatccaggagctgtgttggaagttctggccagggcaattaggcaggagaaggaaataaagggtattcaattaggaaaagaggaagtcaaattgtccctgtttgcagatgacatgattgtatatctagaaaaccccattgtctcagcccaaaatctccttaagctgataagcaacttcagcaaagtctcaggatataaaatcaatatacaaaaatcaccagcattcttatacaccaataagagacaaacagagagccaaatcgtgagtgaactaccattcacaattgcttcagtgagaataaaatacctaggaatccaacttacaagggatgtgaaggaactcttcaaggagaactacaaaccactgctcaatgaaataaaacaggatacaaacaaatggaagaacattccatgctcatgggtaggaagaatcaatattgtgaaaatggccatactgcccaagggaatttatagattcaatgccatccccatcaagctaccaatgactttcttcacagaattggaaaaaactactttaaagttcatatggaaccaaaaaagagcccacattgccaagtcaatcctaagccaaaagaacaaagctggaggtatcacgctacctgacttcaaactatactacaaggctacagtaaccaaaacagcatggtactggtaccaaaacagagatatagatcaacggaacagaacagagccctcagaaataatgctgtgtatctacaaccatctgatctttgacaaacctgacaaaaacaagcaatgggaaaaggattccctatttaataaatggtgctgggaaaactggctagccatatgtagaaagctgaaactggatcccttccttacaccttatacaaaaattaattcaagatggattaaagacttacacattagacctaaaaccataaaaaccctagaaggaaacctaggcaataccattcaggacataggcatgggcaaggacttcaagtctaaaacaccaaaagcaatggcaacaaaagccaaaattgacaaatgggatctaattaaactaaagaacttctgcacagcaaaagaaactaccatcagagtgaacaggcaacctacagaatgggagaaaattttcgcaacctactcatctgacaaaaggctaatatccagaatctacaatgaactcaaacaaatttacaagaaaaaaacacccaaccacatcaaaaagtgggtgaaggatatgaacagacacttctaa

SEQ ID NO: 3490 - DNA, 1296 bp, Homo sapiens
  SIMILAR (67)..(852): 721254mologous to Homo sapiens putative p150,accession number U93563,Smith-Waterman Score=928.
atgagaaagaagcaatgtgagaattccggtaacttgaatggtcagagtgttttatgttctccaaatgaccataccagttcttcaacaagagtacttaaccaggctgaactggctggaatgacagaaatagaattcagaatatggacaggaacaaagatcattgagattcaggagaacagcaaaacccaatccaaggaaaataagaatcacaataaagtgatactggagctgaaggacaaaatagccagtattaaaatgaatctaacagtgtgtagagggaaattcatagcactaaatgcccacaagagaaagcaggaaagatctaaaacggacaccctaacatcacaattaaaagaactagagaagcaagagcaaacacattcaaaagctagcagaaggcaagaaataactaagatcagagcagaactgaaggaaatagagacacaaaaaacccttcaaaaaatcgatgaatccaggagctggttttttgaaaagatcaacataattgatagactgctagcaagactaaagaagaagaaaagagagaagaatcaaatagacacaataaaaaatgacaaaggggatattaccactgatcccacagaaatacaaactaccatcagagaatactataaatacctctacgcaaataaactagaaaatctcgaagaaacggataaattcctcgatacatacactctcccaaaactaaaccaggaagaagttgaatctctgaatagaccaataacaggctctgaaattgtggcaataatccatagcttaccaaccaaaaggagtccaggaccagatggattcacagcggaattctaccagaggtacaaggaggaactgacaaacagccaaatcatgagtgaactcccactcacaattgcttcaaagagaataaaatacctaggaattcaacttacaagggatgtgaaggacctcttcaaggagaactacaaaccactgctcaatgaaataaaagaggatacaaacaaatggaagaacattccatgctcatgggtaggaagaatcaacatcgtgaaaatggccatactgcccaaggtaatttatagattcaatgccatccccatcaagctaccaatgcctttcttcacagaattggaaaaaactactttaaagttcatatggaaccaaaaaagagcccacattgccaagacaatcctaagccaaaagaacaaagctggaggcatcatgctacctgacttcaaactatactacaaggctacagtaaccaaacagcatggtactggtaccaaaacagagatgtag

SEQ ID NO: 3491 - DNA, 1098 bp, Homo sapiens
  SIMILAR (1)..(1062): 951254mologous to Homo sapiens putative p150,accession number U93563,Smith-Waterman Score=1753.
atgattatctcaatagatgcagaaaaggcctttgacaaaattcaacaacacttcatgctaaaaactctcaataagttcggtattgatgggacatatctcaaaataataagagctatctatgacaaacccacagccaatatcatactgaatgggcaaaaactggaagcattccctttgaaaactggcacaagacagggatgccctctctcactactcctattcaacatagtgttggaagttctggccagggcaattaggcaggagaatgaaataaagggtattcaattaggaaaagaggaagtcaaattgtccctgtttgcagacgacatgactgtatatctagaaaaccccattgtctcagcccaaaatctccttaagctgataagcaacttcagcaaagtctcaggatacaaaatcaatgtacaaaaatcacaagcattcttatacaccaacaacagacaaacagagagccaaatcatgagtgaactcacattcacaattgcttcaaagagaataaaatacttaggaatccaacttacaagggatgtgaaggacctcttcaaggaggactacaaaccactgctcaatgaaataaaagaggatacaaacaaatggaagaacattccatgctcatgggtaggaagaatcaataccgtgaaaatggccatactgcccaaggtaatttatagattcaatgccatccccatcaagctaccaatgactttcttcacagaattggaaaaaactacttcaaagttcatatggaaccaaaaaggagcccacatcgccaagtcaatcctaagccaaaagaacaaagctggaggcatcatgctacctgacttcaaactatactacaaggctacagtaaccaaaacagcatggtactggtaccaaaacagagatatagatcaatggaacagaacagagccctcagaaataacgccgcatatctacaaccatctgatctttgacaaacctgagaaaaacaagcaatggggaaaggattccctatttaataaatggtgctgggaaaactggctagccatatgtagaaagctcaaacaaaaccacaatgagataccatctcacaccagttag

SEQ ID NO: 3492 - DNA, 1413 bp, Homo sapiens
  SIMILAR (640)..(1386): 891254mologous to Homo sapiens putative p150,accession number U93564,Smith-Waterman Score=1216.
atgttctttgaaaccagtgagaacaaagacacaacataccagaatctctgggacacacttaaagcagtgtgtagagggaaatttatagaactaaatgcccacaagagaaagaaggaaagatctaaaattgacaccctaacatcacaattaaaagaactagagaagcaagaacaaacacattcaaaagctaccagaaggcaagaaataactaagatcagagcagaactgaaggaaatagagacacaaaaaacccttcaaaatatcaatgaatccaggacctggttttttgaaaagatcaacaaaattgatagacagctagcaagactaataaagaagaaaagattaaagaatcaaatagacgcaataaaaaatgataaaggggatatcaccaccgatcccacagaaatacaaactaccatcagagaatactataaacacctctacacaaataatctagaaaatctagaagaaatggataaattcctggacacatataccctcccaagactaaaccaggaagaagttaagtccttgaatagaccaataacaggctctgaaattgaggcaataattaatagcccaccaaccgaaaaaactccaggaccagacggattcatagccgaattctaccagagcttcaaagagaataaaatacctaaaatccaacttacaagggatgtgaaggacctcttcaaggagaactacaaaccactgctcaacgaaataaaagaggatacaaacaaatggaagaacattccatgctcatggatgggaagaatcaatatcatgaaaatggccatactgcccaaggtaatttatagattcaatgccatccccatcaagctaccaatgactttcttcacagaattggaaaaaactactttaaagttcatatggaaccaaaaaagagcccacattgccaagtcaatcctaagccaaaagaacaaagctggaggcatcacactacctgacttcaaactatactacaaggctacagtaacccaaacagcatggtactggtaccaaaacagagatatagaccaatggaacagaacagagccctcagaaataataccacacatctacaaccttgacaaacgtgacaaaaagaagaaatggggaaatgattccctatttaataaatggtgctgggaaaactggctagccatatgtagaaagctgaaactggatcccttccttacaccttatacaaaaattaattcaagatggattaaagacttaaatgttagacctaaaaccataaaaaccctagaagaaaacctaggcaataccattcaggccataggcatgggcaaggacttcatgactaaatcaccaaaaacaatggcaacaaaagccaaaattgacaaatgggatctaattaaacagcaaaagaaactaccatcggagtga

SEQ ID NO: 3493 - DNA, 1542 bp, Homo sapiens
  SIMILAR (442)..(1539): 951254mologous to Homo sapiens putative p150,accession number U93564,Smith-Waterman Score=1833.
atggagctgaaagccaaggctcaagaactatgtgaagaatgcagaagcctcaggagccgacacgatcaactggaagaaagggtatcagtgatggaagatcaaatgaatgaaatgaagcaagaagagaagtttagagaaaaaagaataaaaagaaacaaacaaagtctccaagaaatatgggactatgtgaaaagaccaaatctatgtctgattggtgtacctcaaagtgacagggagaatggaaccaagttggaaaacactctgcaggatattatccaggagaacttccccaatctagcaaggcaggccaccattcagattcaggaaatacagagaacgccacaaagatacttctcgagaagagcaactccaagacacataattgtcagattcaccaaagttgaaatgaaggaaaaaatgttaagggcagccagagagaaagtgttggaatttctggccagggcaattaggcaggagaaggaaataaaggttattcaattaggaaaagaggaagtcaaattgtccctgtttgcagatgacatgattgtgtatctagaaaaccccattgtctcagcccaaaatctccttaagctgataagcaactacagcaaagtctcaggatacaaaatcagtgtacaaaaatcagcagcattcttatacatgaataacagacaaacagagagccaaatcatgagtgaactcccattcacaattgcttcaaagagaataaaatatctaggaatccaacttacaagggacgtgaaggacctcttcaaggagaactacaaaccactgctcaatgaaataaaagaggatacaaacaaatggaagaacattacatgctcatgggttggaagaatcaatatcatgaaaatggccatactgcccaaggtaatttatagattcaatgccatccccatcaagctaccaatgactttcttcacagaattggaaaaaactactttaaagttcatatggaaccaaaaaagagcccgcattgccaagtcaatcctaagccaaaagaacaaagctggaggcatcatgctacctgacctcaaactatactacaaggctacagtaaccaaaacagcatggtactggtaccaaaacagagatatagatcaatggaacagaacagagccctcagaaataatgccgcatatctacaactatctgatctttgacaaacctgacaaaaacaagcaatggggaaaggattccctatttaataaatggtgctgggaaaactggctagccatatgtagaaagctgaaactggatcccttccttacaccttatacaaaaattaattcaagatggattaaagacttaaacgttagacctaaaaccataaaaaccctagaagaaaacctaggcaataccattcaggacataggcatgggcaaggacttcatgtctcaaacaccaaaagcaatggcaacaaaagccaaaactgacaaatgggatctaattaaactaaagagcttctgcacagcaaaagaaactaccatcagagtgaacaggcaaccaacaaaatggtag

SEQ ID NO: 3494 - DNA, 1170 bp, Homo sapiens
  SIMILAR (388)..(1167): 911254mologous to Homo sapiens putative p150,accession number U93574,Smith-Waterman Score=1254.
atgggagactttaacaccccattgtcaacattagacagatcaacgatacagaaagttaacaaggatatccgggaattgaactcagctctgcaccaagtggacccaatagacatctacagaactctccaccccaaatcaacagaatatacattcttttcagcaccacaccacagctattccaaaattgaccacatagttggaagtaaagcactcctcagcaaatgtaaaagaacagaaattataacaaactgtctcccagaccacagtgcaatcaaactagaactcaggattaagaaactcactcaaaaccactcaactacatggaaactgaataacctgctcctgagtgactactcggtacataacgaaatgaaggcagaaataaagatgttctttgaaaccatgttggaagttctggccagggcaatcaggcaggagaaagaaataaagggtattcaattaggaaaagaggaagtcaaattgtccctgtttgcagatgacatgattgtatatttagaaaaccccattgtctcagcccaaaatctccttaagctgataagcaacttcagtgaagtctcaggatacaaaatcaatgtgcaaaaatcacaagcattcttatacaccaataacagacaaacagagagccaaatcatgagtgaactcccattcacaattgcttcaaagagaataaaatacctaggaatccaacttacaagggacgtgaaggacctcttcaaggagaactacaaaccactgctcaatgaaataaaagaggatacaaacaaatggaagaacattccatgttcatgggtaggaagaatcaatatcgtgaaaatggccatactgtccagggtaatttatagattcaatgccgtccccatcaagctaccaatgactttcttcacaaaattggaaaaaactactttaaaggtcatatggaaccaaaaaagagcccacattgccaagtcaatcctaagccaaaagaacaaagctggaggcatcatgctacctgacttcaaactatactacaaggctacagtaaccaaaacagcatggtactggtaccaaaacagagatctagaccaatggaacaaaacagagccctcagaaataataccacacatctacaagcatctgatctttgacaaacctgacaaaaacaagcaatga

SEQ ID NO: 3495 - DNA, 1578 bp, Homo sapiens
  SIMILAR (100)..(960): 911254mologous to Homo sapiens putative p150,accession number U93572,Smith-Waterman Score=1346.
atgttgactgaaacctttcccagccagaaaaagaacagcagtggccaccaacataaccaaaagcagctgttatttgcaaagatatgccgaatgttcaaagatatacaaactaccatcagagaatactacaaaaacctctacgcaaataaacgggaaaatctagaagaaatggatagattcctggacacatacaccctcccaagactaaaccaggaagaagttgaatctctgaatagaccaataacaggctctgaaattgtggcaataatcaatagcataccaaccaaaaagagtccaggaccagatggattcacagcagaattctaccagaggtacaaggaggagctggtaccattccttctgaaactattccaatcaatagaaaaagagggaaacctccctaactcattttatgaggccagtatcgtccagataccaaagcctggcagagacacaacaaaaaaagagaattttagaccaatctccttgaccaacattgatgcaaaaatcctcagtaaaatactggcaaaccgaatccagcagcacatcaaaaagtttatccaccaaaatcaagtgggcttcatccctgggatgcaaggctggttcaaaatacacaaatcaataaatgtaatccagcatataaacagaaccaaagacaaaaaccacatgattatctcaatagatgcagaaaaggcctttgacaaaattcaacaatgcttcatgctaaaaactctcaataaattaggtattaatgggacgtatctcaaaataataagaactatctatgacaaacccacagccaatatcatactgaatgggcaaaaactggaagcattccctttgaaaactggcacaagacagggatgccctctctcaccactcctattcaacatagtgttggaagttctggccagggcaattagacaggagaaggaaataaaagcccaaaatctccttaagctgataagcaaccttagcaaaatctcaggatacaaaatcaatgcacaaaaatcacaagcattcttatacaccagtaacagacaaacagagagccaaatcatgagtgaactcccattcacaattgcttcaaagagaataaaatacctaggaatccaacttacgagggacgtgaaggacctcttcaaggagaactacaaaccactgctcagtgaaataaaagaggatgcaaacaaatggaagaacattccatgctcatgggtaggaagaatcaatatcttgaaaatggccctactgcccaagataatttatggattcaatgccatccccatcaagctaccaatgactttcttcacagaattggaaaaaattactttaaagttcatatggaaccaaaaaagagcccacatcgccaagtcaatcctaagccaaaagaacaaagctggaggcatcatgctacctgacttcaaactatactacaaggctacagtaaccaaaacagcatggtactggtaccaaaacagagatatagatcaatggaacacaacagagccctcagaaataatgccgcatatctacaactatctgatctttgacaaacctgacaaaaacaagaaatga

SEQ ID NO: 3496 - DNA, 1653 bp, Homo sapiens
  SIMILAR (76)..(1407): 891254mologous to Homo sapiens putative p150,accession number U93563,Smith-Waterman Score=2097.
atgccctctctcaccaatcctattcaacatagtgttggaagttctggccagggcaatgaggcaggagaaagaaataaagggtattcaattaggaagagaggaagtcaaattgccctgtttgcagatgacatgattgtatatctagaaaaccccacagtctcagcccaaaatctccttaagctgataggcaacttcagcaaagtctcaggatacaaaatcaatgtgcaaaaaccacaagcatttttatacaccaataacagacaaacacagagccaaatcataagtgaactcccattcacaattgcttcaaagagaataaaatacccaggaatccaacttacaaaggatgtgaaggatctcttcaaggagaactacaaaccactgctcaaggaaataaaagaggatacaaacaaatggaagaacattccgtgctcatggataggaagaatcaatatcgtgaaaatggccatactgcccaaggtaatttatagattcaatgccatctccatcaagctaccaatgactttcttcacagaattggaaaaaactactttaaagttcatatggaaccaaaaaagagcctgcattgccaagtcaatcctaagccaaaagaacaaagctggaggcatcatgctacctgacttcaaactatactacaaggctacagtaaccaaaacagcacagtactggaaccaaaacagagatagagaccaatggaacagaacagagccctcagaaataatgccgcatatctacgaccacctgatctttgacaaacctgacaaaaacaagaaatggggaaacaattccctatttaataaatggtgctgggaaaactggctagccatatggagaaagctgaaactggatcccttccttacaccttatacaaaaattaattcaagatggattaaagacttacatgttagacctaaaatcataaaaaccctagaagaaaacctaggcaataccattcaggacatagtcatgggcaaggacttcatgtctaaaacaccaaaagcaatggcaacaaaagccaaaattgacaaatgggatctaattaaactaaagagcttctgcacagcaaaagaaactaccatcagagtgaacaggcaacctacaaaatgggagaaaatttttggtatctactcatctgacaaaggtctaatatcaagaatctacaatgaactccaacaaatttacaagaaaaaaacaaacaaccccatcaaaaagtgggtgaaggacatgaacagatacttctcaaaagaagacatttatgcagccaaaagacacatgaaaaaatgctcatcatcactggccatcagagaaatgcaaatcaaaaccacaatgagatactatctcacaccactcagaatggcgatcattaaaaagttcggaaacaacagacaggagacagtaagagaaatggcctgtctcctcagcggcacaatggactttagacatcgcgcctgttttgtactctccaagccggacttctctactcgctggcctggcgctgatgcccagaggccccctgtgcttgtggttgtggccttagacagttccctgccctttcctcaggcatcagggcagaggcctccgagcctggaggatgtggacggaggggccggtgccctcgtggctccctgctag

SEQ ID NO: 3497 - DNA, 1932 bp, Homo sapiens
  SIMILAR (796)..(1875): 931254mologous to Homo sapiens putative p150,accession number U93563,Smith-Waterman Score=1819.
atgcaagtgatggtattgaggaggaatatggatatacaggtgcaaggctctgaggtaaacacttcagaaagcatcagaagttccaatccaatggcttcaattgcctctgaaaataagagaagaaatcaggggctcagagtgaaggggcacacgaaacatggtcagaggttgggacagagcgacggtggtcactgtggagtggagatgagagctaatgggccatatgaagggtgtgatcatgaatttactatgatactactatgtcctgttgtgtggctttctccatcatcaccacactgctcagatacagatatggaaaagtcggaaatgaggttaggattttgccatatcaacgtgaaaaaaaaggcaaacaaggaagctgccattcctattactagagagccatctacacttacagctgtctctccaggtttcaataaccttcccaatggctcctcaggcccaagggcagtgtctcccctctcctacggccagaaagctttagtaaccattaaaagcactaatagaaatgtaaaagaagataaacataggggtaaggtgaccagcttatcctggttgcccaagacttgcccagttttcatgctgaaatcctccaattcaggtcaactggagacgcctggtcaccctatctgggggtcaaaatcaaatgcctataaagagatcagcactgaggctctctgtgaggaagctacccaaagccagggaaagaatcacctgaaagaattagaaggacagtgcccagagttcacacaaacattggaattctgcctgttcccaatagccacagtgcaaactttcataagcaacttcagcaaagtctcaggatacaaaatcaatgtacaaaaatcacaagcattcttatacaccaataacagacaaacagagagccaaatcatgagtgaactcccattcacaattgcttcaaagagaataaaatacctaggaatccaacttacaagggacatgaaggacttcttcaaggagaactacaaaccactgctcagtgaaataaaagaggatacaaacaaatggaagagcattccatgctcatgggtaggaagaatcaatatcgtgaaaatggccatactgcccaaggtaatttatagattcaatgccatccccatcaagctaccaatgactctcttcacagaattggaaaaaactactttaaagttcatatggaaccaaaaaagagcccacattgccaagtcaatcctaagccaaaagaacaaagctggaggcatcacgctacctgacttcaaactatactacaaggctacagtaaccaaaacagcatggtattggtaccaaaacagagatataaatcaatggaacagaacagagccctcaaaaataacgccacatatctacaactatctgatctttgacaaacctgagaaaaacaagcaatggggaaaggattccctatttaataaatggtgctgggaaaactggctagccatatgtagaaagctgaaactggatccattccttacaccttatacaaaaattaattcaagatggattaaagacttaaacgttagacctaaaaccataaaaaccctagaagaaaacgtaggcattaccattcaggacataggcatgggcaaggacttcatgtctaaaacaccaaaagcaatggcaacaaaagccaaaattgacaaatgggatctaattaaactaaagagcttctgcacagcaaaagaaactaccatcagagtgaacaggcaacctacaaaatgggagaaaattttcacaacctactcatctgacaaagggctaatattcagaatctacaatgaactcaaacaaatttacaagaaaaaaacaaacaaccccatcaaaaattggagcaatatatttgaagcactgaaagaaataattgtcaacctaaaagcatttatcctctaa

SEQ ID NO: 3498 - DNA, 2451 bp, Homo sapiens
  SIMILAR (556)..(2277): 1001254mologous to Homo sapiens dJ383J4.1 (A Kelch motif- containing protein),accession number AL109921,Smith-Waterman Score= 3011.
atgattgtatgtctagaaaaccccatcatctcagccccaaatctccttaagctgataagcaacttcagcaaagtctcaggatacaaaatcagtgtgcaaaaatcacaaggattcttatacaccaataacagacaaacagagagccaaatcatgagtgaactcccattcacaattgctacaaagagaataaaatacctaggaatccaacttacaagggatgtgaaggatctcttcaaggagaactacaaaccactgctcaatgaaataaaagaggacacaaacaaatggaagaacattccatgctcatgggtaggaagaatcaatatcatgaaaatggccatactgcccaaggtaatttatagattcagtgccatccccatcaagctaccaatgactttcttcacagaattggaaaaaactactttaaagttcatatggaaccaaaaaagagcccgcattgccaagtcaatcctaagccaaaagaacaaagctggaggcatcatgctacctgacttcaaactatactacaaggctacagtaaccaaaacagcatggtgtaccaacattcgaccaggagagactggaatggatgtaacaagccgctgcacccttggagaccccaacaaactgccagaaggggttccccaacctgcccgcatgccctatatctcagacaagcaccctcgacaaaccttggaagtgattaaccttctgagaaagcaccgggagctatgtgatgtggtgctagttgtgggcgccaagaagatatatgcccatcgagtcattttgtcagcctgtagtccctacttccgagctatgtttacaggagaattggcagagagccgtcagacagaagtagtgatccgagacattgacgagagggctatggaattactgattgactttgcgtatacctcccagataacagtagaagagggcaatgttcagactcttctgccagctgcttgcctcctccagctggcagaaatacaggaagcctgctgtgaattcttaaagagacaattagatccttctaactgcctgggcattcgggcttttgctgacacacattcatgtcgtgagttgctaaggatagcagacaagttcacccaacataactttcaagaggtaatggagagtgaagagttcatgttgcttccagccaatcaactcattgatataatatccagtgatgagctaaacgttcgcagtgaagaacaagtgttcaatgcagtgatggcctgggtcaaatacagtattcaggaaagacgtcctcaattaccccaggtgctgcagcatgttcgtttgcctttgcttagtcccaagttcctggtcggcacagtaggctctgatcccctcatcaaaagtgatgaagaatgcagagacttggtagatgaggctaaaaactacctcctattgccgcaagaacgaccactaatgcaaggaccaaggacgagaccacggaaacctatccgatgtggggaagtactctttgcagttggtggttggtgcagtggagatgccatttccagtgttgaacgatatgatccacagaccaatgaatggagaatggtggcttcaatgagcaaaaggagatgcggagttggggtcagtgttcttgatgatctgttatatgcagtaggaggccatgatggatcctcttatctcaatagtgttgaaaggtatgaccccaaaacaaaccagtggagcagtgatgtggcccctacaagcacctgcaggacaagtgttggtgtagcagtacttggaggctttctttatgctgtgggtggccaggatggtgtgtcttgcctcaacattgttgagaggtatgatccgaaggagaacaagtggactcgggtagcttctatgagtaccagaagactaggtgtggctgtggctgtgttaggagggttcttatatgctgtaggtggctctgacgggacatctcctctcaacacagtggaacgttacaatcctcaggaaaacagatggcacactatagcccctatggggacccggaggaaacacctaggctgtgcagtatatcaggacatgatctatgctgtaggaggtagagatgacactacagagctgagcagtgctgagagatacaaccccagaaccaaccagtggtctccagtggtggccatgacatcacgccgtagtggagttggcctggcagtggtcaatggacagctcatggcagtaggaggttttgatggcacaacatacttgaagaccatagaagtttttgatcctgatgccaatacatggaggacttgttcctcaaccccaagacctaagagaatagctatagtactagtcataatatcaatgttccaggcagcaaagttggaagaagggaaaaagcttttgcatcctctggatgtattgcgaaagaaatgtccagactttgagggctacagggtacagaccaaagaaattcagtag

SEQ ID NO: 3499 - DNA, 2505 bp, Homo sapiens
  SIMILAR (1129)..(2499): 921254mologous to Homo sapiens putative p150,accession number U93572,Smith-Waterman Score=2170.
atgactgaattgactggcatacaacaaccacaaattgttctctttgagcacaaagggcataaattggttcagggaagttcatctgatgcaggaaaggtcaatcggatataccaacactacgaggccagtgataaattcaattatacaacaggattggcttggaaaacagctccagagcaaacagggaaaaccgtaagaaagcaacagataaaactcaatgtaaagaaaatggaatccaggtcaaagatgcaggaacacagttcctcaccaccaatggaacaaagctggagggagaatgactttgatgagttgagagaagaagccttcagacgatcaaactactctgagctacaggaggaaattcaaaccaaaggccaagaagttaaaaactttgaaaaaactttagatgaatatataactagaataaccaatacagagaagtgcttaaaggagctgatggagctaaaagccaaggctcgagaactacgtgaagaatgcagaagcctcaggagccgatgcgatcaactggaagaaagggtatcagtgatggaagatgaaatgaatgaaatgaagcgagaagggaagtttagagaaaaaagaataaaaagaaacgaacaaagcctccaagaaaaatgggactatgtgaaaacaccaaatctacgtctgattggtgtacctgaaagtgatggggagaatggaaccaagttggaaaacactctgcaggatattatccaggagaacctccccaatctagtaaggcaggccaacattcagattcaggaaatacagagaacaccacaaagatactcctcgagaagagcaactccaagacacataattgtcagattcaccaaagttgaaatgaaggaaaaaatgttaagggcagccagagagaaagaaatacaaactaccatcagagaatactacaaacacctctacgcaaataaactagaaaatctagaagaaatggataaattccttgacacatacactctcccaagactaaaccaggaagaagttgaatctctgaatagaccaataacaggatctgaaattgtggcaataatcaatagcttaccaaccaaaaagagtccagaccagttggattcacagccgaattctgccagagaaaaagagggaatcctctctatctcattttgtgaggccagcatcatcctgataccaaagctgggcagagacacaaccaaaaaagagaattttagaccaatatccttgatgaccattgacacaaaaatcttcaataaaatactggcaaaccaaatccagcagcacatcaaaaagcttatccaccatgatcaagtgggcttcatccccgggatgcaaggctggttcaatatatgcaaatcaataaatgtaatccagcatataaacagaaccaaagacaaaaaccacatgattatctcaatagatgcagaaaaggcctttgacaaaattcaacaactcttcatgctaaaaactctcaataaattaggtattgatgggacgtatttcaaaataataagagctatctatgacaaacccacagccaatatcatactgaatgggcaaaaactggaagcattccctttgaaaactggcacaagacagggatgccctctctcaccactccttttcaacatagttttggaagttctggccggggcaattaggcaggagaaggaaataaagggtgttcaattaggaaaagaggaagtcaaattgtccctgtttgcagacgacatgattgtatatctagaaaaccacattgtctcagcccaaaatctccttaagctgataagcaacttcagcaaagtctcaggatacaaaatcaatgtacaaaaatcactagcattcttatacaccaataacagacaaacagagagccaaatcatgagtgaactcccattcacaattgcttcaaagagaataaaatacttaggaatccaacttacaagggacgtgaaggacctcttcaaggagaactacaaaccactgctcaatgaaataaaagaggatacaaacaaatggaagaacattccatgctcatgggtaggaagaatcaatatcgtgaaaatggccatactgtccaaggtaatttacagattcaatgccatccccatcaacctaccaatcactgtcttcacagaattggaaaaaactactttaaagttcacatggaaccaaaaaagagcccacattgccaagtcaatcctaagccaaaagaacaaagctggaggcatcacgctacctgacttcaaactatactacaaggctacagtaaccaaaacaggatggtactggtaccaaaacagagatatagatcaatggaacagaacagagccctcagaaataacgacacatatctacaactatctaatctttgacaaacctgagaaaaacaagcaacggggaaaggattccctatttaataaatggtgctgggaaaactggctagccatatgtagaaagcagtgtgttttcattgtacctccaacagaagggtag

SEQ ID NO: 3500 - DNA, 2292 bp, Homo sapiens
  SIMILAR (1970)..(2155): 221254mologous to Homo sapiens putative p150,accession number U93570,Smith-Waterman Score=40.
atgaataatgctaaagaaaactttcttggaaggttccaagatggccgaataggaacagctccagtctacagcccccagcatcagcgacgcagaagacgggtgatttctgcattaccaactgagcctccactggtgatacccaggcaaacagggtttggagtggacctccagcaaactccaacagacctgcagctgagggtcctgactgtgagaaggaaaactaccaaacaggaaggacattccaccaaaaccccatctgtacgttaccatcatcaaagaccaaaggaagataaaaccacaaagatggggagaaaccagagcagaaaagctgaaaattctaaaaatgagagcgcctcttctcctccaaaggaatgcagctcctcgccagcaacagaacaaagctggatggagaatgactttgacaagtacacagaagtaggcttcagacaactggtaataacaaacttctctgagctaaaggaagatgttcaaacccatcacaaagaagctaaaaatcttgaaaaaagattagacgaatggctaactagaataaacagcatagagaataccttaattgatctgatggagctgaaaaccatggcacgagaactacgtgactcatgcacaagcttcagtagacaattcgatcaagtggaggaaagggtatcagtgattgaagatcaaatgaacgaaatgaagcgagaagagaagtttagagaaaaaaagatgctggaagttctgcccagggcaatcaggcaggagaaagaaataaagggtattcaattaggaaaagaggaagtcaaattgtccctgtttgcagataacatgactgtatatttagaaaaccccatcatctcagcccaaaatctccctaagctgataagcaacttcagcaaagtctcaggatataaaatcaatgtgcaaaaatcacaagcattcctatacaccaataacagacaaacagagagccaaatcatgagtgaactctcattcacaattgcttcaaagagaataaaatacctaggaatccaacttaaaagggatgtgaaggaactcttcaagaactacaaaccactgctgaaggaaataaaggaagacacaaacaaatggaagaacatcccatgttcatgggtaggaagaaccaatatcgtgaaaatggccatactgcccaagataatttatagattcaatgctatccccatcaagccaccaatgactttctttacagaattggaaaaaactactttaaagttcataaggaaccaaaaaagagcccacattgccaagacaatcctaagcaaaaagaacaaagctggaggcatcatgctacctgacttcaaactatactacaaggctacagtaacaaaaacagcatggtactggtaccaaaacagagatatagaccaatggtacagagcagaggcctcagaaataatgccacatatctacaactacctgatctttgacaaacctgagaaaaacaagcaatggggaaaggattccctatttaataaatggtgctgggaaaactgcctagccatatgtggaaagctgaaactggatcccttccttacaccttatactaaaattaattcaagatggattaaagatttaaatgttagacctaaagccataaaaatcctagaagaaaacctaggcaataccattcaggacacaggcatgggcaaggacttcatgtctaaaacaccaaaagcaatggcaacaaaagccaaaattgacaaatgggatctaattaaactaaagagcttctgcacagcaaaagaaactaccatcagagtgaacaggcaacctacaaaatgggagaaaatttttgcaacctactcatctgacaaagggctaatatccagaatctacaatgaactcaaacaaatttacaagaaaaaaacaaacaactccatcaacaagcgggcgaaggatatgaacagacacttctcaaaagaagacatttatgcagccaaaagacacatgaaaaaatgctcatcatcactggccatcagagaaatgcaaatcaaaaccacaatgagataccatctcacaccaccagaggtggaagtggttctggaaactttgatcatggtcatggaggtggtggtcgtggaggaagcttcagttgtcatggtggctttggtggcagtcatggtggtggtggttatggtggcggtggggatggctataatggatttggtaatgatggaagcaattttggaggtggtggaagctacaatgattttggcagttacaacaatcagtcttcaaattatggacccatga

SEQ ID NO: 3501 - DNA, 3935 bp, Homo sapiens
  SIMILAR (2097)..(3320): 931254mologous to Homo sapiens putative p150,accession number U93574,Smith-Waterman Score=2043.
aaaatctagaagaaatggataaatacctggacacatacaccctcccaagactaaaccaggaagaatttgagtccctgaatagaccaataacagggtctgaaattgaggcaataattaatagcttaccaaccaaaaaaagttcaggaccagacggattcacagccaaattctaccagagcatagtgctggaagttctggccagggcaatcaggcaggagaaagaaataaagggtattcaattaggaaaagaggaagtcaaattgtccctgtttgcagatgacatgattgtatatttagaaaaccccatcatctcagcccaaaatctccttaagctgttaagcaacttcagcaaagtctcaggatacaaaatcaacgtgcaaaaatcacaagcagtcctatacaccaataacaaacaaacagagagccaaatcatgagtgaaccttcattcacaattgcttcaaagagaataaaatacctaggaatccaacgtacaagggatgtgaaggacctattcaaggagaactacaaaccactgctcaacaaaataaaagaggacacaaacaaatggaagaacactccatgctcatggataggaagaatcaatatcatgaaaatggccatagtgcccaaggtaatttatagattcaatgccatccccatcaagctaccaatgactttcttcacagaattggaaaaaactactttaaagttcatatggaaccaaaaaagagcccgcattgccaagtcaatcctaagccaaaagaacaaagctggaggcatcacgctacctgacttcaaactatactacaaggctacagtaaccaaaacagcatggtactggtaccaaaacagacatatagaccaatggaaaagaacagaggcctcagaaataataccacacatctacgaccatctagtctttgacaaacctgacaaaaacaagaaatggggaaaggattccctatttaataaatggtgctgggaaaactggctagccatatgtagaaagctgaaactggatcccttccttacaccttatacaaaaattaattcaagatggattaaagacttaaatgttagacctaaaaccataaaaaccttagaagaaaacctaggcaataccattcaggacataggcatgagcaaggactttatgtctaaaacaccaaaagcaatggcaacaaaagccaaaattgacaaatgggatctaattaaactaaagagcttctgcacagcaaaagaaactaccatcagagtgaacaggcaacctacagaatgggagacaatttttgcaatctactcatctgacaaagggctaatatccagaatccacaaagaactcaagataatttacaagagaaaaacaaacaaccccatcaaaaagcaaacaggatctggaatggacatccagcaaactgcagcagacctgcagcagaggagcctgaccgtcaggaggaaaactaacaaacagaaaggaatagcatccacatcaacaaaaaggacgtccacaccaaaaccccatccaaaggtcatcaacatcaaagaccaaagaaagcaggaaagatctaaaattgacaccctaacatcacaattaaaagaactagagaagcaagagcaaacacattcaaaagctagcagaaggcaagaaataactaagatcacagcagaactgatggagacagagacacaaaaaacccttccaaaaatcaatgaatccaagaactggttttttgaaaagatcaacaaaattgatagacctgcagcaagactaataaagaagaaaagagagaagaatcaaatagacgcaataaaaaatgataaaggggatatcaccaccaatcccacagaaatacaaactaccatcagagaatactataaacagctctacgcaaacaaactagaaaatctagaagaaatggataaattcctgaacgcatacatcctcccaagactaaaccaggaagaagttgaatctctgaataggccaataacaggctctgaagttgaggcaataattaatagcctaccaaccaaaaaaagttcaggaccagacggattcacagccgaattctaccagaggtacaaggaggaactgctgataagcaacttcagcaaagtttcaggatacaaaatcaatgtgcaaaaatcacaagcattcttatacaccaataacagacaaacagagagccaaatcatgagtgaactcccattcacaattgcttcaaagagaataaaatacctaggaatccaacttacaaggaatgtgaaggacctcttcaaggagaattacaaaccactgctcaacgaaattaaagaggacacaaacaaatggaagaacattccatgctcatggataggaagaatcaatattgtgaaaatggccatactgcccaaggtaatgtatggattcaatgccatccccatcaagctaccaatgactttcttcacagaattggaaaaaactactttaaagttcatatggaaccaaaagagagcccacattgccaagtcaatcctaagccaaaagaacaaagctggaggcatcatgctacctgacttcaaactatactacaaggctacattatccaaaacagcatggcagtggtaccaaaacagagatatagaccaatggaacagaacagagccctcagaaataatgccgcataactacaaccatctgatctttgacaaacctgacaaaaacaagcaatgggaaaaggattccctatttaataaatggtgctgggaaaactggctagccatatgtagaaagctgaagctggatcccttccttacaccttatacaaaaattaattcaagatggattaaagacttaaacgttagacctaaaaccataaaaaccctagaagaaaacctaggcaataccattcaggacataagcatgggcaaggacttcatgtctaaaacaccaaaagcaatggcaacaaaagccaaaattgacaaatgggatctaattaaactaaagagcttctgcacagcaaaagaaactaccatcagagtgaacaggcaacctacaaaatgggagaaaattttcgcaacctactcatctgacaaagggctaatatccagaatctacaatgaactcaaacaaatttacaagaaaaaaacaaacaaccccatcaaaaagtgggtgaagggtatgaacagacacttctcaaaagaagacatttatgcagccaaaagacacatgaaaaaatggtcatcatcactggccatcagagaaatgcaaatcaaaaccacaatgagatgccatctcacaccagttagaatggcgatcattaaaaagtcaggaaacaacagtgttttccatactcctgactgtgctgaccccaccagcatatttctctatcctctatatttcctgcaaaatgttaatgggtctagaaacttgatcaggtccaggatccatgcgctttttaatgcgctttatgaactctttatatttgagataattatggttaaaactcctaaggaagccacagaaaaggattattatagctcctccacactcctgaaaccttgtttgctttctccgaggcagaaatcccacaaggtcttcacgttgccagctgtcgagctaacgaactgccagtgtgttcttgaatgggagcactcagcctaccgaggctcccctgagcagcttgcgctgtcttcaccatgtgattgcttttatctggccagtgcaggagctgctcctaatcaccctgctgtttgcctccaagggtcaaactggggaccatcactacctaaacaaatgaggaggatgtcacctttgggggagactgataagcagttggcaggcaggccacgggcaagagaaggcgccagcagccagcagtctgcaaaggccgtaaatatgttacactctcagcagggagatgggcaatataggcaccaagaggcctttgtttaa

SEQ ID NO: 3502 - DNA, 3231 bp, Homo sapiens
  SIMILAR (229)..(1845): 711254mologous to Homo sapiens putative p150,accession number U93574,Smith-Waterman Score=1828.
atggggaaaaaacagagcagaaaaaccggaaactctaaaaagcagagcgcctctcctcctccaaaggaatgcagctcctcaccagcaacggaacaaagctggacggagaatgactttgacgagttgagagaagaagacttcagacgatcaaactactccgagctacaggaggaaattcaaaccaaaggcaaagaagttgaaaactttgaaaaaaattcagacgaatgtataactggaataaccaatacagagaagtgcttaaaggagctgacggagctgaaagccaaggctcgagaactacatgaagaacgcagaagcctcaagagccgatgcgatcaactggaagaaagggtatcagtgatggaagacaaaatgaatgaaatgaagcgagaagggaagtttagagaaaaaagaataaaaagaaacaaacaaagcctccaagaaatatgggactatgtgaaaagaccaaatctacgtctgattagtgtacctgaaagtgacagggagaatggaaccaagttggaaaacactctgcaggatattatccaggagaacttccccaatctagcaaggcaggccaacattcagattcaggaaatacagagaacgccacaaagatactcctcgagaagagcaactccaaggcacataattgtcagattcagcaaagttgaaatgaaggaaaaaatgttaagggcagccagagagaaagaaatacaaactaacatcagagaatactacaaacaccgctacgcaaataaactagaaaatctagaagaaatggataaattcctcaacatatacacccttcgaagactaaaccaggaagaagttgaatctctgaacagaccaataagaggctctgaaattgtggcaataatcaatagtttaccaaccaaaaagagtccaggaccagatggattcacagccgaatactaccagaggtataaggaggaactggtaccattccttctgaaactattccaatcaatagaaaaagagggaatcctccctaactcattttatgaggccagcatcatcctgataccaaagccgggcagagacacaaccaaaaaagagaattttagaacaatatccttgatgaacattgatgcaaaaatcctcaataaaatactggcaaaccgaatccagcagcacatcaaaaagcttatccaccatgatcaagtgggcttcatccctgggatgcaaggctggttcaatatacgcaaatcaataaatgtaatccagcatataaacagaaccaaagacaaaaaccacgtgattatctcaatagatgcagaaaaggcctttgacaaaattcaacaactcttcttgctaaaaactctcaataaattaggtattgatgggacatatctcaaaataaaaagagctatctatgacaaacccacagccaatatcatactgaatgggcaaaaactggaagcattccctttgaaaactggcacaagacagggatgccctctctcaccactcctattcaacatagtgttggaagttctggccagggcaattaggcaggagaaggaaataaagggtattcaattaggaaaagaggaagtcaaattgtccctgtttgcagatgacatgattgtatatctagaaaaccccattgtctcagcccaaaatctccttaagctgataagcaacttcagcaaagtctcaggatacaaaatcaatgtacaaaaatcacaagcattcttatacaccaataacagacaaacagaaacccaaatcatgagtgaactcccattcacaattgcttcaaagagaataaaatacctaggaatccaacttacaagggacgtgaaggacctcttcaaggagaggtccttgaaccactgctcaatgaaataaaagaggatacaaacaaatggaagaacattccatgctcatgggtaggaagaatcaatatcgtgaaaatggccatactgcccaaggtaatttatagattcaatgccatccccatcaagctaccaatgactttcttcacagaattggaaaaaactactttaaagttcatatggaaccaaaaaagagccctcatcgccaagtcaatcctaagccaaaagaacaaagctggaggcatcacgctacctgacttcaaactatactacaaggctacagtaaccaaaacagcatggtactggtaccaaaacagagatatagatcaatggaacagaacagagccctcagaaataacgctgcatatctacaactatctcatctttgacaaacctgagaaaaacaagcaatggggaaaggattccctatttaataaatggtgctgggaaaactggctagccatatgtagaaagctgaaactggatcccttccttacaccttatacaaaaattaattcgagatggattaaagacttaaacgttagacctaaaaccataaaaaccctagaagaaaacctaggcattaccattcaggacataggcatgggcaaggactacatgtctaaaacaccaaaagcaatggcaacaaaagccaaaattgacaaatgggatctaattaaactcaagagcttctgcacagcaaaagaaactaccatcagagtgaacaggcaacctacaaaatgggagaaaattttcgcaacctactcatctgacaaagggctaatatccagaatctacaatgaactcaaacaaatttacaagaaaaaaacaaacaaccccatcaaaaagtgggtgaaggacatgaacagacacttctcaaaagaagacatttatgcagccaaaaaaacacatgaaaaaatgctcaccatcactggccatcagagaagtgcaaatcaaaaccacaatgagataccatttcacaccagttagaatggcaatcattaaaaagtcaggaaacaacaggtgctggagaggatgtggagaaataggaacacttttacactgttggtgggactgtaaactagttcaaccattgtggaagtcagtgtggcgattcctcagggatctagaactagaaataccatttgacccagccatcccattactgggtgtatacccaaaggattataaatcatgctgctataaagacacatgcacacgatcttctgacgagccgcgttctgtacgctgcaggtttctgaaccatggcatccgttccaggaacgcatgcatcccgctcccggaacgcatgccattctgttcctggaaccgctatgccataccgttcctaggaagcgctatgccatag

SEQ ID NO: 3503 - DNA, 3756 bp, Homo sapiens
  SIMILAR (2670)..(3596): 751254mologous to Homo sapiens putative p150,accession number U93568,Smith-Waterman Score=1258.
atgacaggatcaaattcacacataacaatattaactttaaatataaatggactaaattctgcaattaaaagacacagactggcaagttggataaagagtcaagacccatcagtgtgctgtattcaggaaacccatctcatgtgcagagacacacataggctcaaaataaaaggatggaggaagatctaccaagccaatggaaaacaaaaaaaggcaggggttgcaatcctagtctctgataaaacagactttaaaccaacaaagatcaaaagagacaaagaaggccattacataatggtaaagggatcaattcaacaagaggagctaactatcctaaatatttatgcacctaatacaggagcacccagattcataaagcaagacctcagtgacctacaaagagacttagactcccacacattaataatgggagactttaacaccccactgtcaacattagacagatcaacgagacagaaagtcaacaaggatacccaggaattgaactcagctctgcaccaagcagacctaatagacatctacagaactctccaccccaaatcaacagaatatacatttttttcagcaccacaccacacctattccaaaattgaccacatacttggaagtaaagctctcctcagcaaatgtaaaagaacagaaattataacaaactatctctcagaccacagtgcaatcaaactagaactcaggattaaaaatctcactcaaagccgctcaactacatggaaactgaacaacctgctccttaatgactactgggtacataacgaaatgaaggcagaaataaagatgttctttgaaaccaacaagaacaaagacaccacataccagaatctctgggacacattcaaagcagtgtgtagagggaaatttacagcactaaatgcctacaagagaaagcaggaaagatccaaaattgacaccctaacatcacaattaaaagaactagaaaagcaagagcaaacacattcaaaagctagcagaaggcaagaaataactaaaatcagagcagaactgaaggaaatagagacacaaaaaacccttcaaaaaatcaatgaatccaggagctggttttttgaaaggatcaacaaaattgatagacccctagcaagactaataaagaaaaaaagagagaagaatcaaatagacacaataaaaaatgataaaggggatatcaccaccgatcccacagaaatacaaactaccatcagagaatactacaaacacctctacgcaaataaactagaaaatctagaagaaatggataaattcctccacacatacactctcccaagagtaaaccaggaagaagttgaatctctgaatagaccaataacaggctctgaaattgtggcaataatcaatagtttaccaaccaaaaagagtccaggaccagatggattcacagacgaattctaccagaggtacaaggaggaactggtaccattccttctgaaactattccaatcaatagaaaaagagggaatcctccctaactcattttatgaggccagcattattctgataccaaagccgggcagagacacaaccaaaaaagagaattttagaccaatatccttgatgaacattgatgcaaaaatcctcaataaaatactggcaaaccaaatccagcagcacatcaaaaagcttatccaccatgatcaagtgggcttcatccctgggatgcaaggctggttcaatatgtgcaaatcaataaatgtaatccagcatataaacagagccaaagacaaaaaccacatgattatctcaatagatgcagaaaaagccttagacaaaattcaaagggttcttcatgctaaaaactctcaataaattaggtattgatgggacatatctcaaaataataagagctatctatgacaaatccacagccaatatcatactgaatgggcaaaaactggaagcattccctttgaaaactggcacaagacagggataccctctctcaccattcctattcaacatagtgttggaagttctggccagagcaatcaggcaggagaagggaataaagggcattcaattaggaaaagaggaagtcagattgtccctgtttgcagatgacatgattgtatatttagaaaaccccattttctcagcccaaaatctccttaagctgataagcaacttcagcaaagtctcaggatacaaaatcaatgtgcaaaaatcacaagcattcttatataccaataacagacaaaaagagagccaaatcatgagtgaactcccattcacaattgcttcaaagagaataaaatacctaggaatccaacttacaagtgttgtgaaagacctcttcaaggagaactacaaaccactgctcaatgaaataaaagaggatacaaacaaatggaagaacattccatgctcatggataggaagaatcagtattgtgaaaatggccatactgcccaaggtaatttatagattcaatgccatccccatcaagctaccaatgactttcttcacagaattggaaaaaactactttaaagttcatatggaaccaaagaagagcccacattgccaagtcaatcctaagccaaaagaacaaagctggaggcatcacactacctgacttcaaactatactacaaggctacagtaaccaaaacagcatggtactttttaccaaaacagagatatagatcaatggaacacaacagagccctcagaaataacaccgcatatctacaactatctgatctttgacaaacctgagaaaaacaagcaatggggaaaggattccctatttaataaatggtgctgggaaaactggctagccatatgtagaaagctgaaactggatccttatacaaaatttatacaccttatacaaaaattaattcaagatggattaaagacttaaatgttagacctaaaaccataaacaccctagaagaaaacctagacattaccattcaggacataggcatgggcaaggacttcatgtctaaaacaccaaaagcaatggcaacaaaagccaaaattgacaaatgggatctaattaaaactaaagagcttctgcacagcaaaagaaactaccatcagagtgaacaggcaacctacaaaatgggagaaaatttttgcaatctactcatctgacaaagggctaatatccagaatctacaaagaactcaaacaaatttacaagaaaaaaacaaacaaccccatcaaaaagtgggtgaaggatatgaacagacacttctcaaaagaagacatttatgcagccaacagacacatgaaaaaatgctcatcatcactggccatcagagaaatgcaaatcaaaaccacaatgagatactatctcacactaattagaatggcaatcattaaaaagtcaggaaacaacaggtgctggagaggatgtggagaaataggaacacttttacactgttggtgggactgtaaaccagttcaaccagtgtggaagacagtgtggcaattcctcagggatctagaactagaaatactatttgacccagccatcccattactgggtatatacccaaaggaatataaatcatgctgctataaagacacatgcacacaaacctcacaagtccttcagcttcagtacatatctctgtactacgagtcccacgtgtatgcttcagtccagggggcctctaagctccaacagctctatgcggatgcctccaacgacacacccaaccctgaatccattcctgatctccttgccccaaacctag

SEQ ID NO: 3504 - DNA, 485 bp, Homo sapiens
  SIMILAR (2)..(415): 511254mologous to Homo sapiens dJ947L8.1.6 (novel CUB and Sushi (SCR repeat) domain protein),accession number AL355178,Smith- Waterman Score=366.
cacttcgcattgacccgctgctgcaggaaacggcacgaggggaaatgcaaacgtgcctttgatgccactacagcgaggataaagacggtctggaaccccttgtgggtacaacgtaacttctcagaacggcaccatctactcccctggctttcctgatgagtatccgatcctgaaggactgcatttggctcatcacggtgcctccagggcacggagtttacatcaacttcaccctgttacagacggaagctgtcaacgattacattgctgtttgggacggtcccgatcagaactcaccccagctgggagttttcagtggcaacacagccctcgaaacggcgtatagctccaccaaccaagtcctgctcaagttccacagcgacttttcaaatggaggcttctttgtcctcaatttccacgcatttcagctcaagaaatgtcaacctcccccagcggttccacaagcagaaatggttaactgagggg

SEQ ID NO: 3505 - DNA, 732 bp, Homo sapiens
  SIMILAR (499)..(729): 891254mologous to Homo sapiens p40,accession number U93570,Smith-Waterman Score=349.
atgaccacaggtcactttagtcgccatcttggttttggtggatttgggccggcttctttacggcgtctttttgtcaggaaggtctttgtgatctataccttgtgccgacctcctacctcatcctgtgacttagaacacctgacctcctatgaatttagcctacgattgttggagtcgttattaaattctctgtctgcatcagctctccttggtcccatcttaaacccacgttccacgcaacgtcctggcttgctgatggagatacagacggctgtgttctgtactttgcttctagctgttcctcgtaccagtgacacccaatgcagctctgtccccgagcccagatacggaaggagaattggttctgagttttctgccggctccatcgtccgattcgagtgcaacccgggatacctgcttcagggttccacggcgctccactgccagtccgtgcccaacgccttggcacagtggaacgacacgatccccagctgtgtggctccagaactacgtgaagaatgcagaagcctcaggagccgatgcgatcaactggaagaaatggtatcagtgatggaagatgaaatgaatgaaatgaagcgagaagggaagtttagagaaaaaagaataaaaagaaacgagcaaagcctccaagaaatatgggactatgtgaaaagactgaatctacgtctgattgtcgtacctgaaagagacagggacaatggaaccaagtag

SEQ ID NO: 3506 - DNA, 1119 bp, Homo sapiens
  SIMILAR (118)..(504): 411254mologous to Homo sapiens dJ947L8.1.6 (novel CUB and Sushi (SCR repeat) domain protein),accession number AL355178,Smith- Waterman Score=280.
atgatggcacgtggagcaggtgttctcattagaaaaatctaccctcttaactataaacacagtgctgtagagcaggtctccagggcatactcattttatactcagaggcctgttgtccccgagcccagatacggaaggagaattggttctgagttttctgccggctccatcgtccgattcgagtgcaacccgggatacctgcttcagggttccacggcgctccactgccagtccgtgcccaacgccttggcacagtggaacgacacgatccccagctgtgtggtaccctgcagtggcaatttcactcaacgaagaggtacaatcctgtcccccggctaccctgagccatacggaaacaacttgaactgtatatggaagatcatagttacggagggctcgggaattcagatccaagtgatcagttttgccacggagcagaactgggactcccttgagatccacgatggtggggatgtgaccgcacccagactgggaagcttctcaggcttaacgccacacggaagctgtcaaggtgtatggcttgcacccttcggaacggggtctgagctgcacctgggcacttgtgattcaaagatggagccagaacagccagtatgcggaaagcagcatcctgaggattcacagggccgtagggccctgggcctggcccacaaaatcatcttctcctcccaggattctaggtctctgatgggaggggacggtcccgatcagaactcaccccagctgggagttttcagtggcaacacagccctcgaaacggcgtatagctccaccaaccaagtcctgctcaagttccacagcgacttttcaaatggaggcttctttgtcctcaatttccacggagattttgtgaagtaccagtgccaccccgggtacaccttggtggggaccgacattctgacttgcaagctcagttcccagttgcagtttgagggttctctcccaacatgtgaagcaactccgtcttctcagtgtgtctgggtcagcccgcacagaccagaggcaagactgcccgctcacggccctgcaccaaaacgacatgtgtgtcagaaggccagtttgttaatttgtggcaaagaaggaatgcagctggtctga

SEQ ID NO: 3507 - DNA, 1077 bp, Homo sapiens
  SIMILAR (720)..(604): 971254mologous to Homo sapiens exosome component Rrp46,accession number AF281134,Smith-Waterman Score=189.
  misc_feature (1)...(1077): n = a,t,c or g
gccctttttttttttttttgttaaagtgaattaatttattgattcatccattccataaatgtgagctcctttgaatgttatccttgctggggggatctgtgcccccaggcctggcgggctgtcacaggccaaggcctccccacaggagccctgtggttacagagctgcaggctcaaggagcccatgggtcagagaggcaaaggctgggctgctggtttgctttcaggctgtagggggtgagtgggtgggaggcaaatgggagcggccccttgccccaggtttgcctcaagtttttggagtaaccgccttctggaggcgtttcccggtagaaaccggaaggacgtgttgcgaagcggcgctggccgcagcncaaggcacttgcttggagctcagtgtctgagtagagccccttggtgctggaacaatcaagcaagctttccgttcccacgctgtcccagggcaaaaggtcaaggaactgcccgggcctccttttcttggcttggatgtaggattcagcacgagggtcccatcagagtccaggggcgcaggcgaccccacagaagagagcccgcatgggcacacctgcatccaccaatgccatgcaggcagcccaatcttcggcctcaggatcacttcgagtgtggccttgttgaaaatctctttgctgaccttcacctcggccggcccgtacacacccgccaggacagaggtgtcacccttatcgggttccttcgccgccgtcgccgtcgccacggcctccatcctgattctctcggacttttcaaccgcccggcgggccccgcacactaacctccggcccacgcacgcaagagacactttcgcctgagaatgttccgggtccgggtgcaccgctgcgcccaggcaccgaagttccgggcctaaggcagacgttgcattgcgcatgcgtggcctctctcgggctccgccctccgcagccaggaaggaaaggggctccccggagagtgagagacccttaaacctctcggacggttctggttgctgcaagcacttcactacggtcagggcataggaaaggagctctaacttgaaagccat

SEQ ID NO: 3508 - DNA, 411 bp, Homo sapiens
  SIMILAR (3)..(95): 451254mologous to Mycobacterium celatum RNA polymerase beta,accession number AF057459,Smith-Waterman Score=59.
cgggggagggaggcccggaatgcagcagccgtcggggccgcccaggcgtgcacctgattccaccgcacccaggggccatcccgtctgggcggggtgcgggggcagctagctctgccgttacgagcaggcctgggcgattgcatctttcctgtttgagccaaatcggagttttctattctccactccacgcacccgcttccctgtgctggggtcctcaccccatcctgttctggggccacgcacaggagacaggactgcggcaccctcattctccagggaagccccgctgtttcaaactgagactcagcacccccagcactagcttgccggctgtcctgtggtggggggcagggtgagcgcacggccccacccagccggtgtggagagaagactccttgggaagtcccaggc

SEQ ID NO: 3509 - DNA, 608 bp, Homo sapiens
  SIMILAR (354)..(485): 381254mologous to Homo sapiens immunoglobulin gamma heavy chain,accession number X04646,Smith-Waterman Score=70.
cttcatcctacgagagagaagttgtcccatctccaaccccttaggttaaaaagtttaaaaataaaagcaagaaagccagggccctccctctcctctaccctcctgaacctttcagatgaacagcctcaccgaatgctgcccttctctccggggctggggagctccccagagcctgccaatgccggctctccagacacctggctctgcccacctgcgctgccagggtttgctgagtgtggagactgaagttctttggtgtcaccccacagtcatccagagcgcagtggctctcaaattacactgagcaatctctccatgtttttaattaccccccaattatccactaagtggctcctcactttccaacaccgcatgcttgcctcagtttgccaaacctgcaatgtgcttctcccttgtagcagcctcctccttgcccaagagaagtggcccctctcagccttgaaattcctgagtcctttgtctatggcatacttgggacacacatcacaggctgcctttgtatttcactggttctgccactttccccttgaggactgtaaactccccaagggcagaggcagggccccggggatttcacagggcagtct

SEQ ID NO: 3510 - DNA, 825 bp, Homo sapiens
  SIMILAR (339)..(458): 481254mologous to Rattus norvegicus 5E5 antigen,accession number D37934,Smith-Waterman Score=68.
gccacacaaccagagggcgcaggccgcgttcccagcatccacccccaaggtgagtcggaggctgccttgcaggacctcaggaccctgatggggtcttccagacttcactcaggaaaggagtcaatcgggcacaacagcagcgccggcagctcctcccagggcccacaccatccaaggcgaaagacagccatccttgagaaggggggtagggagcctcaccgaatgctgcccttctctccggggctggggagctccccagagcctgccaatgccggctctccagacacctggctctgcccacctgcgctgccagggtttgctgaaatcctgttaaacccagaaaagggcgcagtgaaccgagaagtggctgggcctctcaactgcccggtggagacagccgcctgcctctacgacctgggacttcccaaggagtcttctctccacaccggctgggtggggcggcaagctagtgctgggggtgctgagtctcagtttgaaacagcggggcttccctggagaatgagggtgccgcagtcctgtctcctgtgcgtggccccagaacaggatggggtgaggcacctcccccgggccctccccgaccagtccgacggcagcgggcgaatgaggaagtcggccgcggaggcggaaaccgggccgggtgcaaggtctgcagcgggacggtccgactctgactcaggaggacgccctgacagctgccaaacggtgcccgctgcccgttacctccgtgcctcagacgccagaaacttccacgggagcggctgccccgggctcccaacccgtgagggccccgccctctagggcggg

SEQ ID NO: 3511 - DNA, 1338 bp, Homo sapiens
  SIMILAR (1081)..(1335): 971254mologous to Homo sapiens dual oxidase,accession number AF213465,Smith-Waterman Score=462.
  misc_feature (1)...(1338): n = a,t,c or g
atggagtctggcgcctggggaggcgcggaggtgcttccagcggacggcagcgcgcgagaacgtcgggacctggttccctctttaatcacacccccgggggcgcttcgtgtgaggttccacgggggaaggcgagaggcgcaggctgccacacacgcactgtttggaagaggggaagcattgccccccctgcaccacctcaccaagatggctactttgggacacacattccccttctatgctggccccaagccaaccttcccgatggacaccactttggccagcatcatcatgatctttctgactgcactggccacgttcatcgtcatcctgcctggcattcggggaaagacgaggctgttctggctgcttcgggtggtgaccagcttattcatcggggctgcaatcctggggacccccgtgcagcagctgaatgagaccatcaattacaacgaggagttcacctggcgcctgggtgagaactatgctgaggagtatgcaaaggctctggagaaggggctgccagaccctgtgttgtacctagctgagaagttcactccaagaagcccatgtggcctataccgccagtaccgcctggcgggacactacacctcagccatgctatggatgcagcctcacaggctgaaggctttcttcaaccagagtgtggatgaagaccccatgctggagtggagtcctgaggaaggcctcacgggggttgtgctgctcctgatcctggccatcatgtatgtctttgcctcccaccacttccgccgccgcagtttccggggcttctggctgacccaccacctctacatcctgctctatgtcctgctgtaccttgatggaccatttggagagggccaccaggagtggcataagtttgaggtgtcagtgttagtgggagggggcattggggtcaccccttttgcctccatcctcaaagacctggtcttcaagtcatccgtcagctgccaagtgttctgtaagaagatctacttcatctgggtgacgcggacccagcgtcagtttgagtggctggctgacatcatccgagaggtggaggagaatgaccaccaggacctggnttacatctgtgagcggcacttccagaaggttctgaaccggagtctattcacaggcctgcgctccatcacccactttggccgtcccccctttgagcccttcttcaactccctgcaggaggtccacccccaggtccggaagatcggggtgtttagctgtggcccccctggcatgaccaagaatgtggaaaaggcctgtcagctcatcaacaggcaggaccggactcacttctcccaccattatgagaacttctag

SEQ ID NO: 3512 - DNA, 903 bp, Homo sapiens
  SIMILAR (10)..(174): 781254mologous to Homo sapiens NADPH thyroid oxidase 2,accession number AF230496,Smith-Waterman Score=227.
atgcccgcaggctaccatgttctttccgacgtggtgagcgtggaaacgcccggttgccccgccgagttcctcaacatccgcatcccacctggagaccccgtgttcgaccccgaccagcgcggggacgtgcctgagcctccccgacgagtgccgccccctgctgcacggcgcccaatcccatcgaccacccaagggctgaggagtgtgggcgcacggtgcgggactggcaagcagctccacctgcagccccagtgcgagatccactgggtgaagccagctgggctcctgagtctagtgggaacttggaggacctttatgtctagctcagagcttgtaaatataccaatcggcactcggtatttagctcaagctgtaacactcaccgtgaaggtctgcagcttcactgctgaagccagcgagaccacgagcccaccgggaggaacgaacaactccagacgcgccgccttaagagctgttacactcaccgcgaaggtctgcagcttcactcctgagccagcgagaccacgaacccaccagaaggaagaaactcccaacacatctgaacatcaaaaggaacaaactccggacacgtcggcttttaagaactgtaacactcacggcgaaggtctacagcttcactccttgagcccggggagaccaccaaccccaccgggaagaccaaacaactggagaaaccctgggcttaaaagctggaacacttacccggggaaggtccgcaactttcattggctgttctccaagaaggagattgaagacatccgaaataccaccctgcgggacgtgctggtcgctgttatcaacattgaccccagtgccctgcagcccaatgtctttgtctggcataaagggggctttctgcctgtgtccccagttcttccctag

SEQ ID NO: 3513 - DNA, 799 bp, Homo sapiens
  SIMILAR (437)..(649): 421254mologous to Homo sapiens putative NADPH oxidase/peroxidase DUOX2,accession number AF267981,Smith-Waterman Score=135.
gccactcgctttggtgggaacctcgtgcttgtggggctgggctttgagatgaccaccgtacccatactgcatgcagccatccgggaggtggatatcaagggcgtgtttcgatactgcaacacaactgtaacactcacggcgaaggtctacagcttcactcctgaagccagggagaccacgaacccaccgggaggaacaaacaactgcagaaacgctggcttaagagctgtaacactcaccgcgaaggtccgcagcttcactgctgagccagcgagaccacgaacccaccagaaggaagaaactccgaacacatccgaacatcagaatgaacaaactccggacacgccccctttaggaactgtaacactcaatgcgagggtccgcagcttcattgttgaagtcaactcgcagaaccccctgctcatgtgggcggcgcccgaccccgcccccggtcagaacgggccccgggggctgtacgccttcggggcagagagagggaaccgggaacccttcctgcaggcgctgggcctggttttggttcgcttacacaaacttgtggggccaaaggctggcccgccaagaccccagactgggaaggacgaggagctgtttcaacaaccaccgccagagggtcatcgccacctaccagataacctctcctcacacatgcacatacagtaggacccgctgtttcccagtcaaggagattgataaagaacaaagtcttaccagtcaccactacttgagctgctcccattgctttggccacgagcaaagtgaccatcccgattggccctaa

SEQ ID NO: 3514 - DNA, 3993 bp, Homo sapiens
  SIMILAR (1762)..(2919): 891254mologous to Homo sapiens NADPH thyroid oxidase 2,accession number AF230496,Smith-Waterman Score=1757.
  misc_feature (1)...(3993): n = a,t,c or g
atgggcttctgcctggctctagcatggacacttctggttggggcatggacccctctggctgagtgctccctcctggaccctcattttggagaatacaacaggatcaagaggaggaattgtatgggggacaagatgccccagaaaaagggcaaagtcatccacatcaccagtccagtccctggagctcagaaccccatttcgtgggaggtgcagcgatttgatgggtggtacaacaacctcatggagcacagatggggcagcaaaggctatcacgtgctttcagacctggtgagcgtggaaactcccggctgccccgccgagttcctcaacattcgcatcccgcccggagaccccatgttcgaccccgaccagcgcggggacgtggtgctgcccttccagagaagccgctgggaccccgagaccggacggagtcccagcaatccccgggacccggccaaccaggtgacgggctggctggacggcagcgccatctatggctcctcgcactcctggagcgacgcgctgcggagcttctcggggggacagctggcgtcggggcccgaccccgcttttccccgagactcgcagaaccccctgctcataacgggccccgggggctgtacgnagagagggaaccgggaacccttcctgcaggcgctgggcctgctctggttccgctaccacaacctgtgggcgcagaggctggcccgccagcacccagactgggaggacgaggagctgttccagcacgcacgcaagagggtcatcgccacctaccaggtcagccgataccggccatttctggaccccagcatctcctcagagttcgtggcggcctctgagcagttcctgtccaccatggtgccccctggcgtctacatgagaaatgccagctgccacttccagggggtcatcaatcggaactcaagtgtctccagagctctccgggtctgcaacagctactggagccgtgaggtactggaggccacagctgccctgtacaaccaggacttatcctggctagagctgctccctgggggactcctggagagccaccgggaccctggacctctgttcagcaccatcgtccttgaacaatttgtgcggctacgggnatggctgttctccaagaaggagattgaagaaatccgaaataccaccctgcaggacgtgctggtcgctgttatcaacattgaccccagtgctctgcagcccaatgtctttgtctggcataaagaactccaggaagtgctgagtgagggcagaactgagactcagagagagctgaacatcgctgtgtatgagtggctgcccagcttcctgcagaaaacactcccggagtatacaggataccgtcctttcctagaccccagcatctccccggaatttgtggtggcctctgagcagttcttctctaccatggtgccccctggtgtctacatgagaaatgccagctgtcatttccggaaggtcctgaacaagggttttcaaagctcccaagctctcagggtctgcaacaactactggattcgggagaaccccaatctgaacagtacccaggaggtgaatgagctgctgctgggaatggcctcccagatttcggagttggaggacaacatagtggttgaagatctgagggctgccctgtacaaccaggacctatcccagctagagctgctccttggcgggctcctggagagccatggggaccctggacccctgttcagtgccattgtcctcgaccagtttgtacggctgcgggatggtgaccgctactggctgttctccaagaaggagattgaagacatccgaaataccaccctgcgggacgtgctggtcgctgttatcaacattgaccccagtgcaccctgccctcaacctaagcagctcacaactgacggcctgccccagtgtgcacccctgactgtgcttgacttctttgaaggcagcagccctggttttgccatcaccatcattgctctctgctgccttcccttagtgagtctgcttctctctggagtggtggcctatttccggggccgagaacacaagaagctacaaaagaaactcaaagagagcgtgaagaaggaagcagccaaagatggagtgccagcgatggagtggccaggccccaaggagaggagcagtcccatcatcatccagctgctgtcagacaggtgtctgcaggtcctgaacaggcatctcactgtgctccgtgtggtccagctgcagcctctgcagcaggtcaacctcatcctgtccaacaaccgaggatgccgcaccctgctgctcaagatccctaaggagtatgacctggtgctgctgtttagttctgaagaggaacggggcgcctttgtgcagcagctatgggacttctgcgtgcgctgggctctgggcctccatgtggctgagatgagcgagaaggagctatttaggaaggctgtgacaaagcagcagcgggaacgcatcctggagatcttcttcagacacctttttgctcaggtgctggacatcaaccaggccgacgcagggaccctgcccctggactcctcccagaaggtgcgggaggccctgacctgcgagctgagcagggccgagtttgccgagtccctgggcctcaagccccaggacatgtttgtggagtccatgttctctctggctgacaaggatggcaatggctacctgtccttccgagagttcctggacatcctggtggtcttcatgaaaggctccccagaggataagtcccgtctaatgtttaccatgtatgacctggatgagaatggcttcctctccaaggacgaattcttcaccatgatgcggtatggggtgtgcctttctaatcctgagacttcctgctctgtgtcaaaggtggaggtggaggtggaaatggntattagagatatctttaaacaaaacatcagctgtcgagtctcgttcatcactcggacacctggggagcgggcagcagtgcccactccccggctgtacacagaggcgctgcaagagaagatgcagcgaggcttcctagcccaaaagctgcagcagtacaagcgcttcgtggagaactaccggaggcacatcgtgtgtgtggcaatcttctcggccatctgtgttggcgtgtttgcagatcgtgcttactactatggctttgccttgccaccctcggacattgcacagaccaccctcgtgggcatcatcctgtcacgaggcacggcggccagcgtctccttcatgttctcttatatcttgctcaccatgtgccgcaacctcataaccttcctgcgagagactttcctcaaccgctatgtgccttttgatgccgcagtggacttccaccgctggatcgccatggctgctgttgtcctggccagtatgacaggtgtgcttctgctcctggtcctggccatcatgtatgtcttcgcctcccaccacttccgccgccgcagcttccggggcttctggctgacccaccacctctacatcctgctctatgccctgctcatcatccatggcagctatgctctgatccagctgcccactttccacatctacttcctggtcccggcaatcatctatggaggtgacaagctggtgagcctgagccggaagaaggtggagatcagcgtggtgaaggcggagctgctgccctcagcctccatcctcaaagacctggtcttcaagtcatccttgggcagacaaatgctctgtaagaagtacatctgcgagcggcacttccagaaagtgctgaaccggagtctgttcacgggcctgcgctccatcacccactttggccgtccccccttcgagcccttcttcaactccctgcaggaggtccacccacaggtgcgcaagatcggggtgttcagctgcggccctccaggaatgaccaagaatgtagagaaggcctgtcagctcaagatagaaaatgacaatgaaatacttgatgctgatacagcacaagccttggcaaaggttaataaacaattgtaa

SEQ ID NO: 3515 - DNA, 666 bp, Homo sapiens
  SIMILAR (2)..(175): 1001254mologous to Homo sapiens protein-tyrosine phosphatase,accession number X68277,Smith-Waterman Score=290.
ggtgttgctggacgagcgcagcgccgccctggacggcgccaagcgcgacggcaccctggccctggcggccggcgcgctctgccgcgaggcgcgcgccgcgcaagtcttcttcctcaaaggaggatacgaagcgttttcggcttcctgcccggagctgtgcagcaaacagtcaacgtctcagccaattgtcccaaccattttgagggtcactaccagtacaagagcatcctctgtgggatgacaacccacaaggcagacatcagctcctggttcaacgaggccattgacttcatagactccatcaagaatgctggaggaagggtgtttgtccactgccaggcaggcatttcccggtcagccaccatctgccttgcttaccttatgaggactaatcgagtcaagctggacgaggcctttgagtttgtgaagcagaggcgaagcatcatctctcccaacttcagcttcatgggccagctgctgcagttagagtcccaggtgctggctccgcactgttcggcagaggctgggagccccgccatggctgtgctcgaccgaggcacctccaccaccaccgtgttcaacttccccgtctccatacctgatcactccacgaacagtgcgctgagctaccttcagagcctcattacgacctcatctcactgctga

SEQ ID NO: 3516 - DNA, 669 bp, Homo sapiens
  SIMILAR (3)..(146): 1001254mologous to Homo sapiens protein-tyrosine phosphatase,accession number X68277,Smith-Waterman Score=255.
gaggatacgaagcgttttcggcttcctgcccggagctgtgcagcaaacagtcgacccccatggggctcagccttcccctgagtactagcgtccctgacagcgcggaatctgggtgcagttcctgcagtaccccactctacgatcaggttagtaggtgtccctgccacagggaagaagtaagaactggcaaaggcatggaagagtagtgccagggaggaatatagaaagtaacctgcagcattatttataacggaggggacacagggatatgatttattccacagttaagtggtctgacggagccgagtctccaattgtaggctctacggaaatgaacttgctggtcctgcccaggcaaatgggcttagttccctatttatttatcctccagcaacagaactgagttcactcggtatctgaaattgacttttccagcagaaagtttttgtgggtatgggcactggccttggctttgagcaagcttgatgaatgttggatatttctggatttcagggtggcccggtggaaatcctgccctttctgtacctgggcagtgcgtatcacgcttcccgcaaggacatgctggatgccttgggcataactgccttgatcaacgtctcagccaattgtccccaaccattttgagggtcactaccagtacaagagcat

SEQ ID NO: 3517 - DNA, 2043 bp, Homo sapiens
  SIMILAR (1117)..(1377): 721254mologous to Homo sapiens protein-tyrosine phosphatase,accession number X68277,Smith-Waterman Score=266.
tttgggctgtgtgtgcgacgcgggtcggaggggcagtcgggggaaccgcgaagaagccgaggagcccggagccccgcgtgacgctcctctctcagtccaaaagcggcttttggttcggcgcagagagacccgggggtctagcttttcctcgaaaagcgccgccctgcccttggccccgagaacagacaaagagcaccgcagggccgatcacgctgggggcgctgaggccggccatggtcatggaagtgggcaccctggacgctggaggcctgcgggcgctgctgggggagcgagcggcgcaatgcctgctgctggactgccgctccttcttcgctttcaacgccggccacatcgccggctctgtcaacgtgcgcttcagcaccatcgtgcggcgccgggccaagggcgccatgggcctggagcacatcgtgcccaacgccgagctccgcggccgcctgctggccggcgcctaccacgccgtggtgttgctggacgagcgcagcgccgggcctggacggcgccaagcgcgacggcaccctggccctggcggccgggcgcgctcttgccgcgaggcgcgcgccgcgcaagctcttcttccctcaaaaggaggatacgaagccgttttcggcttcctgtccggagcttgtgcagcaaaaagttcgacccccatggggctcagccctttccctgagtactagcgtccctgacagacgcggaatctggggtgcaagttcctgcagtaccccaactctacgatccagggtggcccggtggaaatcctgccctttctgtacctgggcagtgcgtatcacgccttcccgcaaggacatgcttggatgcctttgggcataactgcccttgatccaaacgtgctcagccaaattgtcccaaaccattttgaagggtcacttcccagtacaagagcatccctgtggaaggacaacccaaaggcagacatcagctcctggtgtcaacgaaggccattgacttcatagactccatcaagaatgctggaagaagggtgtttgtccactgccaggcaggcatttcccggtcagccacacatctgccttgcttaccttatgaggactaatcgagtcaagctggacgaggccctttgagtttgtgaaagcagaggcgaagcatccatctcttcccaacttcagctttcatggggccagcttgctgcagtttgagtcccagggtgctgggctccgcactgtttcgggcagaggctggggagccccggcaaatgctgggctcgaccgaggcacctccaccaccaccgtgttcaacttccccgtctccatccctgtccactccacgaacagtgcgctgagctaccttcagagccccattacgacctctcccagctgctgaaaggccacgggaggtgaggctcttcacatcccattgggactccatgctccttgagaggagaaatgcaataactctgggaggggctcgagagggctggtccttatttatttaacttcacccgagttcctctgggtttctaagcagttatggtgatgacttagcgtcaagacatttgctgaactcagcacattcgggaccaatatatagtgggtacatcaagtccatctgacaaaatggggcagaagagaaaggactcagtgtgtgatccggtttctttttgctcgcccctgttttttgtagaatctcttcatgcttgacatacctaccagtattattcccgacgacacatatacatatgagaatataccttatttatttttgtgtaggtgtctgccttcacaaatgtcattgtctactcctagaagaaccaaatacctcaatttttgtttttgagtactgtactatcctgtaaatatatcttaagcaggtttgttttcagcactgatggaaaataccagtgttgggtttttttttagttgccaacagttgtatgtttgctgattatttatgacctgaaataatatatttcttcttctaagaagacattttgttacataaggatgacttttttatacaatggaataaattatggcatttctattg

SEQ ID NO: 3518 - DNA, 732 bp, Homo sapiens
  SIMILAR (544)..(696): 1001254mologous to Homo sapiens KIAA1283 protein,accession number AB033109,Smith-Waterman Score=267.
atggggcaaacttcgatgatgacgggcggggagtgtacgcaggccatcgggggacagcacagggcagttggtccccagccgcctactgaacgtgaagatgacaaggaagaagacctttacaatgatccattcccacttcacgaacagtcaagatattttctcttctttatgattttttttacctgcgcctgccagccagatagcagtggggtcggaaagggtgacctgcagtccacgttgctggaagggcatggcacagctccacctgacctggatctctctgctattaatgacaaaagcatcgtcaaaaagacgccacagttagcaaaaacaatatcaaagaaacctgagtcaacatcattttctgcccctcggaaaaagagcccgatggagaacaatcttgctgagtttgaaagaagggcagaaaagaatttattaataatgtgtaaggagaaggagaagctacagaaaaaggcccacgagctgaagcgcaggcttctcctctctcagaggaagcgggagctggcagatgtcctggatgcccaggttggggaagaagcctatttttctgtgaagtccacatgtccctgcaactttaccctgtactacgaggtggctgcacggggcaatattgtgctatcgggccagcagcctgcccacaccacccagcagcgaagcaagcgggcggcccctgcccctggagaaaccgattcgtttaacacacctttctga

SEQ ID NO: 3519 - DNA, 345 bp, Homo sapiens
  SIMILAR (13)..(240): 261254mologous to Bos taurus desmocollin,accession number L33774,Smith-Waterman Score=87.
atggagaacaatcttgctgagtttgaaagaagggcagaaaagaatttattaataatgtgtaaggagaaggagaagctacagaaaaaggcccacgagctgaagcgcaggcttctcctctctcagaggaagcgggagctggcagatgtcctggatgcccaggttggggaagaagcctatttttctgtgaagtccacatgtccctgcaactttaccctgtactacgaggtggctgcacggggcaatattgtgctatcgggccagcagcctgcccacaccacccagcagcgaagcaagcgggcggcccctgcccctggagaaaccgattcgtttaacacacctttctga

SEQ ID NO: 3520 - DNA, 1410 bp, Homo sapiens
  SIMILAR (58)..(2): 521254mologous to Mus musculus nitric oxide synthase,accession number AF045940,Smith-Waterman Score=48.
gccttgaggtggaaggcgggaaaatggcggattcctcggggcgaggcgctggagaagcctgcaaccggccccacaaattctagcagtgccaagaagaaggataaaagagttcaaggtggaagagtgattgagtcccggtatctgcaatatgaaaagaagacaacccaaaaggctcctgcaggagatgggtcacagacccgagggaagatgtctgaaggtggaaggaaatccagcctgctccagaaaagcaaagcagatagcagtggggtcagaaagggtgacctgcaagtccacgttgcctggaagggcatggcacaagctccacctgacctggatctctctgctattaatgacaaaagcatcgtcaaaaagacgccacagtttagcaaaaacaatatcaaagaaacctgagtcaacatcattttctgcccctcggaaaaagagcccggatttatctgaagccattggaaatgatggagtctcagacactactgctgacgctactatccgtaaagatggagaacaatttttgcttgagtttgaaagaagggcagaaaagaatttattaataatggtgtaagggagaaggagaagctacagaaaaaggcccacgagctgaagcgcaggcttctcctctctcagaggaagcgggagctggcagatgtcctggatgcccatatcgagatgctcagccccttctaggcagtggccacacgcttaaaagagcaatacaggacatttgctacggtcctggacactaccaggcacgagctgcccgtgaggtccatccacctggcaggaagataggcaagcagtctcttagacgcccctgcaagcttgaaactgatgaccacctcagccgctccctgcgagaacttgatgttggtgattcggaagaaaatgtgcaggtgctggacttactgagcgaactcaaggacgtttacggcgaaaaaggaccttgagctccgaaggagctttgccccaggtgctggaactctccgcagaggcaagcaaaagaggcagccttggcaaaccaagaaagtttgggaaaaaaaacccagggcatggcgccccccagccggtggtatttcaatcaagacagtgcctgcagagaatcttgggggagcacccaagaacacgcccctgtctgaggaacgacaacccgggtgcctcgtcagcccccgctcaggccacgttcatcagcccaagcgaagatttttcttcaagcagccaggcaagaagtcccgccctctctctctcgttcagggagggacttgtcatgactcatggttacattcaggatacttgagcactttatatactaccgtagcactgtagctattttttatgtgataatcttgtttgataaaaaagtaaacctgttttgcaattgaaaaaaaaaaaaaaaaa

SEQ ID NO: 3521 - DNA, 1797 bp, Homo sapiens
  SIMILAR (1452)..(61): 981254mologous to Homo sapiens FKSG43,accession number AF334945,Smith-Waterman Score=2359.
aaggacagtgccgggccagggcccccagtcgccctcctcctgccgggtgcagcgtcctcagccctgctccaggctgtcgccgggctgcaccacggtgtagctcccctggcccaaggacagctgccggctgaagaaggatgtggtgcgcttcggcttcactcgcctgatccccttgccgtcctccacgtagtcgatggtggagagatgctggatccggctggacaccacactgccctgcctccgcagcttggggcgctgaacaggagccagtgaggagctggggtccgagggcgagccagtcgcactgtcctgggggcctgcgggctccgccgcctggctcagttcgatgcagtactcaatgagactgctcatcagttcggcctgcttggagtagatcttgaggagcttgttgacaggtgtgaccccgctgtccctgtcgaactccagccacaggatgggctcctcctcctcaggggaggtgtggtcccacgacagctcctggaagcacaggcccagcaggacgtgcttctctctgctgtccacgacgtgcacaccttccaggctgatggccacagaaactgatttgcgcccaccccggtgcaaaaagccttgggctggcttgtcaacctcaccgtggaagaaggcacacccatagaagggcagcttgtggcacttgaggaggtaggcgcggtagtgggtgcccagggcggcctcacacccgccgtcgctgctgacctcctgcaccttgcggtaggcgttcagcaggctctgctcacccggcccggccctggccccacggccccggagggcagcaaagagaccctggccccgcttacagaggtgggcagggaggaaggagtccagcttctccctcaggtcgcaggctgccggccagtcgggctggtaggtcacgagctgcacgcggcacaccagggcgcccagagcctcgcagtcctcaacgtcgcacaggtaccgtgcagccagcacgttgcccttggcctcctcatagagcagccgcaggacctcctcgtcggggatctggagctcccgcccctttgggaagaacacgttccttcggaactgcaggaaaggctcatccatggccacgtcgtcgtccggggcactggtgaagcgcagcagcagctccggccactggcgtcccagcttgtagggctggttcttgggtttcagctgcacctccagcagaggggagaccagccagagcgcgaagacatccagggcgatgtccggaagcttcaggacctcgcggacggcgcagtgcagctcatgggcacggagcgagggcaggttctccacagccaggggcaccaccgtgtcatctgccaggtataccagcacgtcagccgctcgggctcccacggaggacacgctgcttcggtgggatcgctcagcggggccgggctgcccggcactgccttctgtcccgtccatctgcaaaggcaaagagaaacagcagttaccgggagccagggatggggggctggaggtctcctcaagctctcggtgagtacggtaagggatcccaggctgggtccgcaaggttgagcggcgctgcctcgcagggtcgcagagcccgccacctgagaggcaaggctcctgcctggaatcctgccccgccgccaagcccgccaccgcccgcactcgggctcccgctaaggacgcagcgggaagcgacgcggaagccacggcgggaggaagcgcggcgcccgaggccccgcccccttcgacccgggggagccaatgggagcccagggccgccccgcgcggcccgcgcat

SEQ ID NO: 3522 - DNA, 1939 bp, Homo sapiens
  SIMILAR (1938)..(1411): 1001254mologous to Homo sapiens PACAP precursor,accession number X60435,Smith-Waterman Score=912.
ttttatgaaataaattttactaagcaataagcaataatgtagaaaaatacattttacctacaaactcaataaacaagaaacaaagggttcatatttagtgcataattacttactagtggctacagaggggtttctaaaatttacaataagtgcctgcatcaaacaaaaaaaaaagtgagaagcattcacaagtttaagagaagtgaatgaaaaatggtaaacagtacttaaacagtgcaggagggtaggaaggagaggtctccataaaaccacaaaggaaaagggtagctcctacagagcaggtttcaaaggagaggatcctggccatttcacaagatgagaagcatggacagcactggagaaaaacacattgtactttgcatccatttccaatacccagcgcccaaagtcaggaccactgggactggatttgccctcagcttcccagacctggggcaatctcaaaccagtccatttccagggtcgtcctcctaccacctcaggctctgcctcttccaatatacctctatgtccttcactttgttccaattgccctaatttggggatattagattccctggccactcaggaagtacagaaaagagagcggtctaacgaagccgcccttttctgtacagttcctcaactcttctcctagggagaggcgtgaattctggggagaagcacaatttggatcgagctgttgttttatcaggagaattttcttctgggctgagagtctgaagagagacaactacacataaaaggagaatcaaagaaagcagaaatattggaattgccacccaaccagggggacagagcccagttgagttaggctgggattgaagcagcctgccccagagactcactgggaaagaatgcccttcagcaattctccatatctttacctcaaaatctccctggagcagggcatcattgtttatgtacagtagcaaatggtaagtagtaatatcttcaggcctgtcatggataaaaatactatccttttaattccagtttacaaaaataggagtaatattcaaaacaatgattgtctacttttctatttatttttataaaaacataaacagctcgggcgaattttcaatccttgtgcacgctttgtatgaacttctctctatactttatatatatatatatatatatattctttatatatatttataatatatatcaataattggtccacaaagtatatctgtgcattctctagtgctttgtagaaagaaaaacaatattattatcaaaatattcatttaatggctttacttcattacataaatacatgtttggatagaacacacgagcgatgactgttgagtcagtttggaaaacgacttttcattgcgtcagggctgtatacacagggtagctggtaacccatcgctacaaataagctattcggcgtcctttgtttttaaccctttgtttatacctcttccctaggacggccgccaagtatttcttgacagccatttgtttccggtagcggctgtagctgtccgtgaagatcccgtccgagtggcgcttggagagcggctccgcgtcgtcccccgcgccgccgccgaggctcccacccacgccccgggccacgagcgactgcaggtgcttcccggcggacagctggtccagcactttgcggtaggcctcgttaaggatcccgtgggcgacatctcttctcccggccgggcggtaccaggcggcggcggcgcgcggcgcggaggcggggctccctgcgcccggcggctccgagccaccgaagtctggcagcgggtttccgtcctcgccgtacgcctcttcctctggcctgatcccggggaaccggagtccggcggcggcaggtgagctgtagacgctgctgtgcatgattatcccatagaccagcagggccagcctcgctccgctacacatggtcatt

SEQ ID NO: 3523 - DNA, 1302 bp, Homo sapiens
  SIMILAR (963)..(682): 571254mologous to Homo sapiens Human secreted protein, SEQ ID NO: 6861,accession number G02780,Smith-Waterman Score=247.
tcaactgtgatccaggttggggttcgtaaactcagaggtcagggggacatcaggtgtctgagccctggcagagtccaggggagatttagaggcgggtccctccagcaacacgtgggaattctgggagcttgctgggttctcagtgctctttttgggaaatcggcgggctgccctaggtctttgcgagctgccttccctgagggctggagttgagttcacagctgtgcagcgtctgtggagctctgcgggcgccacctggtggtcaaaactggcagtgccgttagcgggctcagcgggacgtgagaacccaggcagcttgctagatgggcttctatttacattagagaacaatctctccaggggacagggtgccccttcaactcctcccgctgccaggagagctgccaggtaggacggcgggcaaagcgcttcttcaagttcctgcgctggagtcaccacccgagaggcatcgccgtctggcgttggtgtctgagcagaagccgcaggaaccagcgggagcagcaggaggagctgcgggactcgtttgccgaggctcgtgttctgctcaaaagtttgtagacgcgcagaaccaggagggagcgtgacacggagagaagggggcgcagagagagaggcagaagaaagaaagagggggcgatgaggtgaagcgcggaggagcaaggtggccgtaagtccacccggaggaagaagcaggcgattaagggaaagagggaaagtcagaaaagaaggggaggaaggcaagggagagggcgggcggctagcccgcctttgtaggagccgcgggccaggcagccgcgagggtcggcggcgccttctctgctccgaggtctctccggctgcctctgaagctgcggcttctgctgctgctaccgagatcttttgttgctcatggccattgtctagctgggcatgtttgacatctctctgcaggagagctttcctattcatgaaaatctggccttggccgtgagggaagtggctcctgtaagggcgcaaagcagcgtggcaggggtccgagctggggttctgtccccgctgggctgccgccccagctggactaccgccagggaactcagcgccaattacctccaggagaagctgcagcgggacctgtctggtcccatgtagggaagtctcttcatcttctgaatcccgacttccattattcaggaggggttctgatgacattgtcttgaaaacaccctcctctgtaatgctcaccctgatcccggggaaccggagtccggcggcggcaggtgagctgtagacgctgctgtgcat

SEQ ID NO: 3524 - DNA, 2701 bp, Homo sapiens
  SIMILAR (116)..(1636): 281254mologous to Herpesvirus papio NTR,accession number AF200364,Smith-Waterman Score=257.
tcacaggtctatggtgtcgctgcccacgctcagctcgtcgatctgtcggcaggcgtccaggaactgctcctgcagcaaggcctcctcggcctgcagctcagaagcaggctctggggagtcgcgagagggtggggacagggcctggtaggatcctgaggccgggaggctggggctgcttcccgagggccgcgggggactgaggacgcagaccagagggcagcgcgggggcctgtcggggctggaacacagcagcatggacgagctgtcccgcgagagtccgcagaacgagccagatgagacgctgctgcctgcgggccaagccccaggggaggggagctccgggggcgcagcggggccagaggcctcccctgatctctcactggccctgcccccggtccccagcgaggcggtgcggtagagtccgagcccaggcagagcgtcctcgaaggcagggccctggaagaggccaggcgcaagcagggcctcgctgcagagggcctcctcgatgctgcgtcgcaggttgattggggagggcgggcggaagtccacggtgtaatcgctgcagggagaggaagccggggacggggccgggttggccgccgcgccttcgaagccccggcaacctccgccctggagtaggaggtctgggcctggccctgccagcgcgcacagctgcagcagctccgcgtccccgcgagcgatggcgctccccaggggctccttgtctgggggcccagtgacccagcctcccggcagcagcggagccgcgtggcccggggacaagcggaagagcttggcccagcagcgcggcggcacgcgaggactgcagagcgccgggtagaggcccagcagcgccaacgggagcgcgacgcccacctcgcccaggcgcaggcctagctggaaggcccaccagggccagggcccttccaggccggattggccgccgtagcccagggcgtgcagcacctcatagccctgcagggctccgctcagcagcccgaaggtgcccgccaccggggccgtgcgcgccgcgcgccgccaggactcccgaggggcgggggggctgcgcccctgcggcacgggggtggcgcccaaaaaacccgaccctcccaggggcgccccggcccgccgccgccgcccgccccagcaggagagcgccagccgcagcccggaaaggaaagcggcgagaaaggcgtgcagcccgcgcgaggcgagccgcaggggccgcagcgggcgatgcgcggcgctcccgcagggcggcggcggccgccagccccagccccaggagcagcagcgcagccaggccggtggggcaccgcggcgggcgcggccgggccagcagcaggcaggccagccccaggccggcagccaagcagggcagcggaaggtcctgcagcagcagccaggcgagcgcgggcagtcgatccctgtgcccataggcgtcgtagaagagcgggaaggcccgcgtggtcccggccgacagcagcagcaggtccagcagcgccaggcagggggcgccgggcgggcagcgccagggcaagagggccagagccagcagcgccagcaaggcaaccaggccgaagagcgcgcctaccccgtacacgtgggcctcccaggccagcccccagcgagccctggcctctgcccagtcggcctccagggtcaggaaaaagaggggcctcggcgcctcgggaggctgcccctcgcgttcaggcaattctcccacgctgcaggaccctggcccacactctggctgccccgaagggttcccgaggctggcgggaggagagaggtcatctgggccagagatggggactgtggggtctaatgatgttgttgcaatcgaggcaaaacttagggaagcagctgggtccagaggacttgggctggagagcttcctctccagggagtatgggggcagggacagagtggtaccaaggaaccccagagaacccgaaactccagaggcagagcttgtggatgtagtttcacctggggggctcaggccggagaagttccggagtggggacagagtagtgccaaagaatccaaagggtcccaggcgcccagcaatctctgccaggctggcccgcaggctgggcagcaggggcagcgttcgatgcccaagcgtgggggctgcacctgctctcagtgccatgtcaaacttcagctccagctcgctctggtggggcctgggagcactggatggaagtgctgtcaccatcagagcagtgtcccaggtcacagtgctcctcctgggctgatagggggcagtgggcccatcgctgggcccagagcgccgggatgtggactccggaagcagggaggaggcccggggctttgagccaccttcggtggagccccactcagtgagagagttccctgaggagcccaccagcaattcccaaagggggtcagtcctcagcccactggccacctcttcccctggctcctggcctggcccaagagagagtggctgggtctctgtgactgggctcccccagacagcagcaggtccccgaagatggaatttgaagttaagtcccaggttgagagacagcatagaggcctcactttgaggtacgggggtcaaagtggtggcaggggcacctgggatggagggggtgggctgggggcccacagtagcagcaaacaggacgcagcagaacagtcccagccctagacagccatgcctggccat

SEQ ID NO: 3525 - DNA, 914 bp, Homo sapiens
  SIMILAR (112)..(840): 291254mologous to Pseudorabies virus immediate-early protein (AA 1-1460),accession number X15120,Smith-Waterman Score=129.
  misc_feature (1)...(914): n = a,t,c or g
gcacgagggtttttttttttttattttaggctgtccattccccaactttattccaccaaatctggtgtctgtaagaaagctgggggtcaagccagnctggggggcggctgtcccagactccccctggccccaatgccctcaagggagggagcggcaagatcacgggagatgcgccggccccggggaatccggcgttccccaaaagaaggactctttcatcccgaaggatctcaggggaaaagtcaaaacggggctgacccccaaaggatgtagagggagcccggctccagcaagagttccgagccactcccccggctcctgggtgtgcaccagaccgcataacgctgggagacaggagagacaggcccggcgattggtggccccgcagaacttgatgctgtccacgtggggctttgatgtaaccgcgggtttccaagttccaagcaacgtgcacggaggagagcaagggtctggccggggcccaaaaagcggccgcctgcacgcgctgcaaggatggcccggctggcttctgaccagcgcgacttctctgtctctcggaaggcgggggatggccgcttcccagtgatcggtattcgtagcggcggcggcgcagctacgggctccagttctcggctcagcgtctcctcctctgccgtgctcaggaagccaggccgcaccacgggcgcagttcctgcaggcggctcagcacggaagggcccgagcctcgcacccatgctgggccctggcagcgtccgcagcgccagcagccccagtcccggccataatcccggagcggggtcatgagagagggcagggttgggggaacgcccccgccaaaagccattggcggtacctgcggcagcgattgacttccctcagagtcccgcctctcgctccaacatcangactcgtgc

SEQ ID NO: 3526 - DNA, 408 bp, Homo sapiens
  SIMILAR (336)..(407): 621254mologous to Homo sapiens Human prostate cancer- associated protein 9,accession number Y48312,Smith-Waterman Score= 60.
  misc_feature (1)...(408): n = a,t,c or g
tctaattgctgtggtacaaaaggacaagggttaaaagagaacagtgggagctctctttcccagctaactcacgcagtgtgacgcagaggctttcagcacagcccagggtgcccgggactgaaaactccttcaccagccccctccacaggatatagaagacttagatcactacgagatgaaagcagagcccattagtgggaaaaagttggaggatgaaggaattgaaaaagaaaatttggcaatattagagaaattaggaagactgaaagacaagagcatttaactgcaaactgttgtcgttgtcagctgggttgtcttcctgaagtatgaatccgggctgaagcagtgcctactcgacagaaccggtcatcgtacaaagaaatgccacgtgactcanaggcaaagccn

SEQ ID NO: 3527 - DNA, 452 bp, Homo sapiens
  SIMILAR (94)..(2): 871254mologous to Homo sapiens HTRM clone 3340290 protein sequence,accession number Y73387,Smith-Waterman Score=137.
ccaaattttctttttcaattccttcatcctccaactttttcccactaatgggctctgctttcatctcgtagtgatctaagtcttctatatcttttggggacggtgcctgtgctttgcacaggacgaggtggcagctggcttgcctgctggcctgcttcctggagataggatgctcagacccaccgctgctcttcaggggtcgtggaaggaattaatgcacttccttctgtcccccaatctctgtccctttacgtgtctctggagctgagcaggtattctttttctttcttcatctcagtagagcaatgcccgccgcccgacccatggagccctgcttggggactgggggcctcgatgttctccttcaccatatgcgaacagatctccctccagcagccttgccaggcagtgccggacgcgtgggtcgactcgggacctccgcgtgcgaacac

SEQ ID NO: 3528 - DNA, 2586 bp, Homo sapiens
  SIMILAR (244)..(1167): 911254mologous to Homo sapiens putative p150,accession number U93568,Smith-Waterman Score=1458.
atggacccacagctggagcggcaaatggaaaccacgcagaacctggtggactcctacgcggccattgtcaacaagaccgtgtgggacctcatggttggtgtcacgcccaagaccatcatgcacgtcatgatcaacaacaggcatgcaccgcctcatgggagcagggggctcctgtggcattggggatgcaggtggccatgttggccagggggagatgctggccagccctatgggaccagtatactaatagagaagaaaagagagaagaatcaaatagacacaataaaaaatgataaaggggatatcaccaccaatcccacagaaatacaaactaccatcagagaatattataaacacctctacgcaaataaagtagaaaatctaaaagaaatcgataaattcctggacacatacaccctcccaagactaaaccaagaagaagttgaatccctcaacagatcaataacaggctctaaaattgaggcaatagttaacagcctaccaaccaaaaaaagtccaggaccagaaggattcacagtcgaattctaccagaggtacaaggaggagctggtactattccttctgaaactattccaatcaatagaaaaagagggaatcctcccgaaatcattttataaggccagcatcatcctgataccaaagcctggcagagacacaacaaaaaaagagaattttagaccaatatccttgatgaacattgatgcaaaaatcctcaataaaatactggcaaaccaaatccagcagcacatcaaaaagcttatccaccatgatcgagtgggcttcatccctgggatgcaaggctggttcaacacacgcaaatcaataaatgtaatccagcatagaaacagaaccaaagacaaaaaccacatgattatctcaatagatgcagaaaaggcctttgacaaaattcaacagcccttcatgctaaaaaccctccataaattaggtattgatgggacgtatctcaaaataataagagctatttatgacaaacccacagccaacattatgctgaatgagcaaaaactggaagcattccctttgaaaactggcacaagacagggatgccctctctcaccactcctattcaacatagtgttggaagttctggccagggcaatcaggcaggagaagaaaataaaggggtcccttcagagggtcctgagcttcctgaccacccagagggggctccggcgatcactccaaccatccatcccatttagcttcatcatccttgttcgagcgatgttccttctgtcaggcctggtggctgttacgttgggctccccaagtgctgggaatcagtcaaccgtgctgtcctcttggagtcttgtggcccaacaagagaaagctgtcccgacattgcccctccaaagtgcaagacctccgcatgggagtgctgtgcaggcagctgtgtggcctgacactctctaccagtcctgctgtcccttggctgagaatcaaacccatttctggatgacggggaagtgtgtcctctgctggctgtgttctctgtggagctcaggggaggggaaaggccaagccatttctagggtgctgtttggaggggtgaaaaggccataccctttccaagggacacttttcctggaaagcccctggaacttagctggctcttgtcctgtgaagccggctctggccaccagggggcagggccacgaactcagcctgaagggagcctgccgggcagccggcactctggagggacagagagaacaggccaccagggctgaagcagtgcctactcgacagaaccggtcatcgtacaaagaaatgccacgtgactcaaaggcaaagccagagtgcagcttggagcaaagaaggaatctggaaagtgaattggaatggataggactattaggagatattacattccagacgaagaattgtgacggctgtgaccaaaacagtgcaagatcggatggtttttacaactggaggtttttctgcataagctctttgtctgctgccatccacgtaaaatgtgacttgctcctccttgccttccgccatgattgtgaggccttcccagccacgtggaactgctcccgccgctattcagctgtcgggctaatcagcagtcgaggtgtgcggctaggcgcgagctctgcgggagctcagcccccgggagagacccggcagcggcgcggcgaggacggcggcggaccggggcagccccgcgccctggccaggcgccgggttgaaggcacgccgcggacctgcccctcccggagacctgccccggaaggggcagggccccttctccaggccaggcactgcctggcaaggctgctggagggagatctggccgcagatggtgaaggagaacatcgaggcccccagtccccaagcagggctccatgggtcgggcggcgggcattgagatcacatgccctgcgtttcagcctggtccttagagaaacggagagagctctgggcctgggtggcggccctggctgtaccactcacaggctgtgtgtcctcaacccagtctcagttcctcacccttgccaggtggccgtgaggactaggaacatggagacacag

SEQ ID NO: 3529 - DNA, 1016 bp, Homo sapiens
  SIMILAR (580)..(720): 681254mologous to Homo sapiens Human prostate cancer- associated protein 9,accession number Y48312,Smith-Waterman Score= 171.
  misc_feature (1)...(1016): n = a,t,c or g
tttcgtctggccgcagatggtgaaggagaacatcgaggcccccagtccccaagcagggctccatgggtcgggcggcgggcatcggtggagggagctgttcatcctctgggggctgctgggcaagaaacatttcttacctgataatgtgaagcgtcagaggtccctgttttatggctctactgagatgaagaaagaaaaagaatacctgctcagctccagagacacgtaaagggacagagattgggggacagaaggaagtgcattaatttctttcacgacaccctgaagagcagcgccgggtctgagcattctatctgcaggaagcaggccagcaggcaagccagctgccacctcgtcctgtgcaaagcacagccggccgtccccgagagagttccaaagatgactgtaaacccagccacggttctgatctccaggaaagcaattgctgtggtacaaaaggacgagggttaaaagagaacagtgggagctctcttttccatctaactcacgcagtgtgacgcagaggctttcagcacagcccagggtgcccgggactgaaaactccttcaccagccccctccacaggatatagaagacttagatcactacgagatgaaagcacagcccattagtgggaaaaagctggaggatgaaggaattgaaaaagaaaacttggcaatattagagaaaattaggaagactgaaagacaagagcatttaactgcaaactgttgtcgttgtcaactgggttgtcttcctgaagtattgaatccggtatgtattgtgtggaggagcattacgtactggaacttctcacaaaacagggctgaagcagtgcctactcgacagaaccggtcatcgtaccaagaaatgccacgtgactcaaaggcaaagccagagtgcagcttggagcaaagaagatgatgtctcaatctgtcaccccagattgagtgcnatggccgnttttcagccactgnaactctggctnccagggtgactggacgtttnattaaccc

SEQ ID NO: 3530 - DNA, 1436 bp, Homo sapiens
  SIMILAR (517)..(449): 821254mologous to Homo sapiens Human secreted protein, SEQ ID NO: 5294,accession number G01213,Smith-Waterman Score=108.
atggttctccgctgcgacgagcaggaggaaggaaagctgaacagaacatcttggtgcctaagccgctcttccttgggtaacatgaaaaagcctttacaagtcgatcctgaatgtcaaaatatgccatttaatgactggaatcaacaccctcatttttgtgcctcaacacccattcagggaagccctcactgtggaaagccagttctctgggagcattgcaccagatggaacacagggacgacaggctcctacaggaagaccacaggagggtttggagtaagacacaaagatcctggaggagcacattttccagcgggtggagctgggcaggcaagaacaccgggtgtcacaggacaggcccgggcacctccccaacgcgggcgcaggggaagcggtgactgcgaagggaggcctggggagcagcagggcccggcacgaggaggagggagatgtgcgcttcctgattatcaggactgagggcaatctgggtacgatccctgttccaggcacgacaggttccaaaaaaatgccgcatcaactgggcccgaacctggtcccagatatccctcctaaatgtacaatcaaggatttgcaccaaaagagaagagcagtacagaagcagtattccacacagtggtgttgaaagacacgaaagccctgacattgaagacttttccttcaaggaaccccaaaaaatgtgcatgattttgagtgtcaatggagagatgacacaggaaattcaagggagtgcttatggcccagaaagaaggaaatccaacaaccacttaatgaagaagaatgatcagaagttcaagacctgccacagatggccggtcatcccatccatcatcaggctcaggggcccccggagccaagaacccacaggagcagcagaggagacccatggggcagcgactctcccagcagagcaggaggaatccagggtgaaatgcaagaactgcggggctttgggcactcagccaggaacaagacctgccccattaagaggtggagtgggcccttcctctgcaggtcctgggctcacacaaggagaaggagaacctaaaccagcaaaggcccagctaccctttacgactccagggccctttacgagaatgacagagaaaaggagcgaagtccaaggttgtgattggctcccccatgtgaatgtggcctgggtacggtattggaatcgcctggtgaattggtacgctcgcacctgtgttcgggatgttggaaggtcttgggatgatccacggctttcgtccccgtactatgcctctggttatctgtatccctgtatgtctgttatgtcgggatgcagtgatggtgtggtggtgggaatgtggtggaggcaggatgaacatttgtctacatcagggataactatgctgatggacacatggatgtaccagattgcagagctgcagggctag

SEQ ID NO: 3531 - DNA, 421 bp, Homo sapiens
  SIMILAR (2)..(418): 991254mologous to Homo sapiens Human signal peptide containing protein HSPP-120 SEQ ID NO:120,accession number Y87343,Smith-Waterman Score=784.
gggctgtgagtgcaccaaggccgtgaactttgccatgcatgaacttcagctcatccgggtggagaagcagtaccttcaccacaacctcgaccacctggtcgaggagctcttccttggtgacattcacactgatgccacccagaggatgttctaccggccctccagttaccagccccctctgcagaatgccaagaaccacgaccatgcctgcatcgcctgtcggatcatctatcggtcagacgagcaccaccctcccatcctgcccccaaaggcagacctgaccatcggcctgcacggggagtgggtgagccagcgctgtgaggtgcgcccccaagtcctcttcctcacccgccacttcatcttccatgacaacaacaacacctgggagggccactactaccactactcagacccggtgtgg

SEQ ID NO: 3532 - DNA, 690 bp, Homo sapiens
  SIMILAR (106)..(408): 941254mologous to Homo sapiens NAG13,accession number AF194537,Smith-Waterman Score=505.
gtgttaacgagaagtaacctgcctaaggaggagcacttgagaagaaatgacatcaaagatgtacaaagttatcatcagaaaaacaatgaaggccaggacccccacaatcaaatagatgcagtaaaaaatgataaaggggatgtcaccaccgatcccacagaaatacaaactaccatcagagaatactacaaacacctctacgcagataaactagaaaatctagaagaaatggataaattcctcgacacatacactctcccaagactaaaccaggaagaagttgaatctctgaataggccaataacaggatctgaaattgtggcaataatcaatagcttaccaaccaaaaagagtccaggaccagatggattcacagccgaattctaccagaggtacaaggaggagctgaaccacgaccatgcctgcatcgcctgtcggatcatctatcggtcagacgagcaccacccttccatccttggccccaaggcagacctgaccatcggcctgcaccgggagtggaaaccacaagagcctgacagtcaagtcattctcacagggatgtgctgggctgccagcctccctgacgggccctttgtggtggcgctgctgagttaccctagcatgccaccacgggatcagactactgctgcagactgttatgacgatgtcacccggaggtggcagacctga

SEQ ID NO: 3533 - DNA, 798 bp, Homo sapiens
atggagaacgctggggagagagaggatcccacagtaggaaatgaaggagaggtgaggctagcaggcccagtcctccgaactcaggacgagctctcctgggaagaggatgaagcaaacccaacttcttatccaaaaggagcagattcttattgtcactcggattgccagaccataatggatttttccaacttcaatgcattttctaccccaaacacatttgctctcatgaacacatacagctgtccacagcaccctaactctaagcagtttcaattgccaacatttgtcaaaatgggagaggctgtgtctgttttcttcatagggctcccacatgcaacacccattgtggagcaccaaaatgatctcattgcaggcagtgtgagaatgcagaaccagccaaaaggaagcactctccagtgcattattctcatgccgcaaagacctcctgggcagacattagaagatatggactattattattcctgtttctcagatgagaaaaacctaggtacaaagaagctgagttccttcccatggtcacacagcaaagaagtgaaggccacattcaaaggcaggtatcctggctcccatgcccttaaccgccacaccacactacctggcactgcctggattctccttctaggtggggaacttgcattcctcacagtgaaggatggaagccctttggccttgccctcccgcccagctgatgggatgagaggcaggaacaaagcccgtgtattgtcttcattgaatctgacggcatcctgggggaaagagcaagatagatacagctga

SEQ ID NO: 3534 - DNA, 2289 bp, Homo sapiens
  SIMILAR (790)..(1542): 641254mologous to Homo sapiens Human signal peptide containing protein HSPP-120 SEQ ID NO:120,accession number Y87343,Smith-Waterman Score=736.
  misc_feature (1)...(2289): n = a,t,c or g
atggagaacgctggggagagagaggatcccacagtaggaaatgaaggagaggtgaggctagcaggcccagtcctccgaactcaggacgagctctcctgggaagaggatgaagcaaacccaacttcttatccaaaaggagcagattcttattgtcactcggattgccagaccataatggatttttccaacttcaatgcattttctaccccaaacacatttgctctcatgaacacatacagctgtccacagcaccctaactctaagcagtttcaattgccaacatttgtcaaaatgggagaggctgtgtctgttttcttcataggtgaatcagtcgttgtggttggcatcatggagcatgctacagcggaaaagaaggtctttaaggaagattacatctaccatgcaggaatgggtgggaatgaagtgggaatgggcataggggaagaagctcagtgctctgatttcgggcctgtgaccctttgtgggagaaggaaagccaattgtctaaaggctgttggactgatgggtgagcaggtggaggagcggaagagggggatgagatgtgtccttgtcaaagggtctcaggaaaagactgttatgcacagaactaaggtagaaagattcatactatgcgaaccgatcaagaaacccacgtacagtcctatacacgaaggatacaacagaggcctgctttcctgggagagacaagaacagatgaatacagaaaagagcgtgcagtgtcagtgcaaggcgaggactgagaaccgggcgatgcggctgcacagctggaaccacgaccatgcctgcatcgcctgtcggatcatctatcggtcagacgagcaccaccctcccatcctgcccccaaaggcagacctgaccatcggcctgcacggggagtgggtgagccagcgctgtgaggtgcgccccgaagtcctcttcctcacccgccacttcatcttccatgacaacaacaacacctgggagggccactactaccactactcagacccggtgtgcaagcaccccaccttctccatctacgcccggggccgctacagccgcgggcggtcctctcgtccagggtcatgggaggcaccgagttcgtgttcaaagtgaatcacatgaaggtcacccccatgggatgcggccacagcctcactgctcaacgtcttcaacgggaatgagtgcggggccgagggttcctgggcaggtgggcatccagcaggatgttgacccacaccaatgggntgcgtggccctgggggattcaaactaccttcacacggagtacttgatcttcaaaatggaacagggatgcccgggggcgctgtctgctgttcaacggtcagaggcccagcgacgggtccagcccagacaggccagagaagagagccacgtcctaccagatgcccttggtccagtgtgcctcctcttcgccgagggaagaaggaccttgcaagaagacaagtggaaagcaagcctgtatggccgggcccctgggaaggcacaccttggtccctgctgcttggctgcaatttgcctgccttgtccctctgctgcattggaacatccgcagatagaagttttagaaagttctattttttccaaaccagaattcccttactattgacagatgtgctttaaccaaaagaaaaagacatttattctttttgatgcacttgaatgccagagaactgtcctttcttgtttctcctctccgggcgcccccagccccctgagtcatgaaccagcaaggagtgtttgaagtttctgctttgaactccgtccaagcctgatccctgggcctgagcaacttcacaaccagtaattgcactttaagacagccctagagttcctggacgaaccgtgtttggtagccagggatgaaagcctagggcctcttatttttttcttctaaattattattatatttctgagttaaacttagaaggaaacaactattcaaggctaacaacttttccctgcccattttcccctgtgggttggcaggcctgtcttcctttggaaaattgttttactctcgtgagttttatatgcctggaatcccaatgcagagttggtttgggactgtgatcaagacacctatttattaataaagaagaaacacaggtgtagatatgtatatacaaaaagatgtacggtctggccaaaccaccttcccagcctttatgcaaaaaaaggggagaatcaaagctttcatttcagaaatgttgcgtggaaaagtatctgtaattaaagtttcgaagtaatttaacctaaaaaaaaaaaa

SEQ ID NO: 3535 - DNA, 936 bp, Homo sapiens
  SIMILAR (430)..(492): 611254mologous to Saccharomyces cerevisiae SFP1,accession number M63577,Smith-Waterman Score=75.
atgcctgagcctccccccgcccccatgggctcctgcgcggcccaagcctccccgacgagcgccgccccctgctccacggcgcccagttccatcaaccacccaagggctgaggagtgcaggcacacggcgcgggactggcaggcagctccacctgcggccctgagtagcccagagcctcatttcaacctgatagcctcagtgcagactgtgatgtgccccgttggagccccagctggcatgcagggcagtgggctcaaagccctctggctgccgcctggtgctgtggacgcctggttaataaaaggggagcatttggggtacagcagcgagtatgacgaggaggaggtggactatgaggagtcggacagcgatgagtcctggaccacagagagtgccatcagctccgaagccatcctcagctccatgtgcatgaatggaggggaagagaagccttttgcctgcccagttcctggatgtaaaaagagatacaaggtgacatgggtggcagttggtggtcctgatcccacgagggaagccagtctctgccagccaagtctcctgggcactgaccaggatctacagtcctcaccatttcattggcatttacggatcagacagaagatgaggtaccgaactcccagacctcatgcagagcagggaatgggagaaggatcccactgcttgatgtcagagcatcactttgagaaaactcaaagacagttttctccagactattatcccaatccttcctcccaactgaatgtgaatggcataaagtatcacgctaagaatggtcacagaacacagattcgtgtccgcaaaccattcaagtgtcgctgtgggaagagttacaagacagctcagggcctgcggcaccacacaatcaatttccatcccccggtgtcggctgagattatcaggaagatgcagcaataa

SEQ ID NO: 3536 - DNA, 477 bp, Homo sapiens
  SIMILAR (90)..(31): 651254mologous to Homo sapiens FMR1,accession number L19489,Smith-Waterman Score=68.
atgcctgagtctcccaacccctccgtggactcctgtgcggcccgagcctccccgacgagcgccaccccctgctctacggcgcccagtcccatcgaccacccaagggctgaagagtgcgggcgcacggcgcgggactggcaggcagctccacctgcagccccggactgtgttgcacaatgcttccacagtacacctggctgcaagggctaccaaatgaccatcagcccactctgtggtcagctcatcccctatgggagtcttattccttcatggattggactttcccaggatgaccaggtcgcaagggttgagatgacaaaatccccttatggatgggacttcttgtacagtcagggcttctgcatctatggattccaccaactgcagattgaaaattttcagaaaataaattctgcaaagttccaaaaccaaagtttgaatttgctgcgcattgagtactacattgaatctacgtga

SEQ ID NO: 3537 - DNA, 1726 bp, Homo sapiens
  SIMILAR (959)..(1675): 971254mologous to unidentified cloning vector 29kD protein essential for the replication of mini F plasmid,accession number AB015619,Smith-Waterman Score=1217.
  misc_feature (1)...(1726): n = a,t,c or g
tgagcctcccacctcctccgtgggctcctgtgcggccccagcctcctctatgagtgccaccccctgctccacggtgcccagtcccatcgaccacccaagggctgaggagtgcgggcgcacggcacgggactggcaggcagctccacctgcagcccaggtgttcacactattaaaaaacatcaaaatgttgccttgcctggaaaaaccaggcaagtttggttctttagtcatcatgagggagttcaacaaccatatgtggcaagttgagctgaagatgcctgtgccgtcagacctgccaaagggtactgggaaaaccttgattctacctgagtgcattcaggcaccgtgtatgaaatctaacaatgcgctcatcgtcatcctcggcaccgtcaccctggatgctgtaggcataggcttggttatgccggtactgccgggcctcttgcgggatatcgtccattccgacagcatcgccagtcactatggcgtgctgctagcgctatatgcgttgggggattttgccgatttcggaaccaccatcaaacaggattttcgcctgctggggcaaaccagcgtggaccgcttgctgcaactctctcagggccaggcggtgaagggcaatcagctgttgcccgtctcactggtgaaaagaaaaaccaccctggcgcccaatacgcaaaccgcctctccccgcgcgttggccgattcattaatgcagctggcacgacaggtttcccgactggaaagcgggcaggacataagaaggagcccatccctcagtcatttattaccagagcggctcgccgcagccggtaaccgagcaaagcgagcgaactggggagaaagcaaagaagacctgttctgtcagatagctcttacgctcagcgcaagaagaaatatccgccgtgggaaaaactccagggttctgtcaggggggaaacaccggttatcaatcacaaagaacgtaaaaaatagcccgcgaatcgtccagtcaaacgacttccctgaggcggcatatagtctctcccgggatcaaaaacgtatgctgtatctgttcgttgcccagatcagaaaatctgatggcaccctacaggaacatgacggtatctgcgagatccatgttgctaaatatgctgaaatattcggattgacctctgcggaagccagtaaggatatacggcaggcattgaagagtttcgcggggaaggaagtggttttttatcgccctgaagaggatgccggcgatgaaaaaggctatgaatcttttccttggtttatcaaacgtgcgcacagtccatccagagggctttacagtgtacatatcaacccatatctcattcccttctttatcgggttacagaaccggtttacgcagtttcggcttagtgaaacaaaagaaatcaccaatccgtatgccatgcgtttatacgaatccctgtgtcagtatcgtaagccggatggctcaggcatcgtctctctgaaaatcgactggatcatagagcgttaccagctgcctcaaagttaccagcgtatgcctgacttccgccgccgcttcctgcaggtctgtgttaatgagatcaacagcagaactccaatgcgcctctcatacattgagaaaaagaaaggccgccagacgactcatatcgtattttccttccgcgatatcacttccatggggttctttctagagtccccaacgcaggggcttgcaagccctgagtngtag

SEQ ID NO: 3538 - DNA, 1029 bp, Homo sapiens
  SIMILAR (35)..(418): 281254mologous to rat cytomegalovirus Maastricht pr23.1,accession number AF232689,Smith-Waterman Score=74.
agtaagcacctgggaaacaccccagtaccgaagacctccctcgcccagctagaggggaagcagggagcaaccctgctctttttcatctcccagggatacacccggggaaaaccactggctgtcactgccgcagagggactaggctggcccgccagtgagacgagcgctgggggcttcatgaccccacgccacgcggcgtcccaaccgtggaggtgcctcctgacccgacctgcagccaaaccacacgcgaccctttcgcccgtttccttcgaagaacccgtgtttccgctttccagaacctctaagagcacccaccttggtcccggggccctgtaagcctcactcaccggccgcctccggccgagtacccccgacacaccccgggcggggcttggggaagtcggaaggattaaagagaaacccatgcgtcgaaccgctgctccaacgcccatcaggttccctaagatcacaggcactcttccactcagactgctgctgatcatgctctgctcggtatgcgggaccagtcattgtctgggcagtcgcctggacctaagtctcctgacgcggacgaccagttgcaaaacagagaccacactgagactgagcaacgtatcagcagcggtcgcagctctgcgcttgcgcctgagagccagctacagcagggctgtgctgggattcactttcgtggaaggttttgcaaagcccctcccctggtatgcgagaggctgagaggttggcgctagaggcaagaggaagggggtctgcgagagtgcggcccaagcctccccgatgagcgccgccccctgctccacggtgcccagtcccatcaaccacccaagggctgaagagtgtgggcgcacggcgcgggactggcaggcagctccacttgcagccctggtgcgggatccactggatgaagccagctgggcccctgagtctggtggggacgtggagaacctttatgtctagctcagggattgtaaatacaccaatgggcactctgtatctaactcaaggtttgtaaac

SEQ ID NO: 3539 - DNA, 444 bp, Homo sapiens
  SIMILAR (442)..(341): 321254mologous to Homo sapiens Human bcl2 proto-oncogene mutant protein fragment 14,accession number Y21166,Smith-Waterman Score=41.
  misc_feature (1)...(444): n = a,t,c or g
atggcagcaaaaagaaattccattaacatagcagaatcttggaaagatctagaagttggaggaccagctaccaaggaaganctcaggagcccagctggcttcacccagtggatccgcaccggggctgcaggtggagctgcctgccagttccgtgccgtgcgcccagcactcctcagcccttgggtggtcgatgggactgggcgccgtggagcagggggcggcgcttatcggggaggctcgggccgcacaggagcccacggaacagggggaggctcaggcatggcgggctgcaggtcccgagccgtgcctcgcaggaaggcagctaagacccgaccttgtgaggtacagaagaggcaacataatgtgaactatctctttccagttgtggaaaccaaagcccagacagttaagtggtttgtccttgctgttaagacaataagctga

SEQ ID NO: 3540 - DNA, 2679 bp, Homo sapiens
  SIMILAR (82)..(753): 511254mologous to Homo sapiens KIAA0544 protein,accession number AB011116,Smith-Waterman Score=520.
atgaaagagctgcagccaggctgccacggcagaggctatgacctcacagcagctcaggcccttgaatggtctccatcaaatgtagacggggtcagctacctccttcaggagatctatggaattgaaaacaagtacaacacacaagattctaaggtggctgaagacgaagtgagtgataacagtgccgagtgtgtggtgtgtctctcggatgtccgggacaccttgattctgccctgtcgccacctctgcctctgtaacacctgtgcagacacgctgcgctaccaggccaacaactgccccatctgccgactgcgtaagccccagagcggcagggggactgccttccgggcactgcttcagatccgagccatgaggaaaaaattgggccccttgtccccaaccagctttaaccccatcatctcatcccagacatctgactctgaagagcatccatcctcagagaatattccaccaggctatgaagtagtatctcttctggaggccctcaacgggcccctcaccccgtccccagcagttcctccacttcacgtgcttggagatggccacctctcaggaatgctcccttcatatggcagtgatggccacctgccccccgtcaggacgatctcgcctcttgaccgcctgtctgacagcagcagtcagggactcaaactcaaaaagagtctctccaaatccacttcccaaaactcttccgtgctgcatgaagaggaagatgagcattcctgcagcgagtcggagacacagctctctcagagaccgtcggttcagcatctcggagaggaatgtggtgtgactccagaaagtgagaatctcaccctgtcgtcatctggagctattgaccagtcgtcttgcacagggacgcctctgtcatccactatttcctccccagaaggccctgccagcagcagcttggcccagtctgtcatgtccatggcatcctcccagatcagcactgacaccgtctcctccatgtctggctcctacatcgcccctggcactgaagaggagggagaggctctctcttccccccagcctgccagcagggccccctcagaagaaggagaggggctgccagcggagtctccagacagcaactttgctggcctcccagctggagagcaggatgcagaggctgcactcagctcacactaccagcctatatcccacgcctccaagggagactgcaagtcaggcatggagcagcaaggggtgtgtgagcgagagtggggtccggccactgtgcagtcagacacgccagctgccgctgtggggctggcagccccagggcggcaagctgtggaggggctgtctgtctgctccctgcgacccccctgcagcagccgttgtgatggcagcggctgctctggacagcccaccactgtcatcaatatttccttacgccgccccacctccccaagaacccgtgaagactctgagaagcctggtcaatatccgaaaggacacactgaggctcgtcaaatgccaggacaaaaggacaaggtggccaagagaagtagaaaggtgttgagaggagaaggagaatgggaaagggccaataagaagacaatgaaaacaagcagcgccaaggcagctgggccaggctggactcacacactccctgaaggctcgggtccaggaggcactggtggccagctggagttctgggtgggcgtgggcttggcgggctccgcaccaatggcagggctcattgccctgccggcccggggcaatgaggggcttagcacccgggccagcggctgcggagggtgtactgggtcccccagcagtgccagcccaccggctctgcgctcaatttctcgccgggccttagctgccttcccgcggggcagggctcgcgacctgcagcccgccatgcctgagcctcccaccccctccgtgggctcctgtgcagccccagcctccccgatgagcgccgccccctgctccacagcccccagtcccatcgaccacccaagggctgaggagtgcgggcacacggcgcgggactggcaggcagctccacctgcagccccagtgcgggatccactgggtgaagctagctgggctcctgagtctggtggggacgtggagaacctttatgtccagctcagggattgtaaatacaccaatcagcaccctgtgtctagctcagggtttgtgaatgcaccaatggacactctgtatctagctactctggtggggccttggagaacctttatgtctagttcagggattgtaaatacaccaattggcactctgtatctagctcaaggattgcagccactggactccagcaactcgaggaagaggcagccattgataccagacctagaattcactaaaggtcaatgccttcaggaattttcatctgatttgatgattgatgccctccccatcatgagccccaggaagtctcccatgccacgagcagagggtttaataggcaagagggaagggagaaaacagaaggaagaagctccccagtacagagacagagggtggggggctccaaagccacgaaaggaggtggcaagtgtggtggacaccagccagtggagctatatttacccgttttatcagatatcttttgatattgcaaggcagttgtttcaggtagaccagcttgcagacaggagagctgagagcaaaatgcagtga

SEQ ID NO: 3541 - DNA, 2211 bp, Homo sapiens
  SIMILAR (649)..(2208): 1001254mologous to Homo sapiens leukotriene B4 omega- hydroxylase,accession number D26480,Smith-Waterman Score=2791.
atgaagccgcggaccctcgcggtgagtgttacagctcttaaggtggcgcgtctggagtttgttctttctgatgttcagatgtgttcggagtttcttccttctgactcagaagcccagctggcttcacccagtggatcccgcaccggggctgcaggtggagctgcctgccagtcccgcgccgtgcgctcgcactcctcagcccttgggtggtcgatgggactgggcgccctggagcagggggcggcgctcatcggggaggctcgggctgcacaggaacctacggaggccgggggctcaggcatggcgggctgcaggtcctgggccctgccccgcgggaaggcagctaaggcccggcgagaaatcgagcgcagcgccggtgggctggcactgctgggggaccgagtacaccttcccgagcagccgctggcccgggtgctaagcccctcattgcccggggctggcagggccggccggctgctccgagtgcggggcctgccaagcctacgcccacctggaactctagctggcccgcaagtgccgcgcgcagccccggttcgtactcgcgcctctccctccatacctccctgcaagctgagggagccggctctggccttggccagcctagaaaggggctcctacacctataagatgtcccagctgagcctgtcctggctgggcctctggccagtggcagcatccccttggctgctcctcctgctggtcggggcctcctggctcctggcccatgtcctggcctggacctacgccttctatgacaactgccgccgccttcggtgtttcccacaacccccaagacggaactggttttggggacaccagggcatggtcaaccccacagaggagggcatgagagttctgactcagctggtggccacctacccccagggctttaaggtctggatgggacccatctcccccctcctcagtttgtgccaccccgacatcatccggtctgtcatcaacgcctcagctgccattgcaccaaaggacaagttcttctacagcttcctggagccctggctgggggatgggctcctgctgagtgctggtgacaagtggagccgccaccgtcggatgctgacgcctgccttccatttcaacatcctgaagccctatatgaagattttcaatgagagtgtgaacatcatgcacgccaagtggcagctcctggcctcagagggtagtgcctgtttggatatgtttgagcacatcagcctcatgaccttggacagtctacagaaatgtgtcttcagctttgacagccattgtcaggagaaacccagtgaatatattgccgccatcttggagctcagtgcccttgtatcaaaaagacaccatgagatcctcctgcatattgacttcctgtattatctcacccctgatgggcagcgtttccgcagggcctgccgcctggtgcacgacttcacagatgccgtcatccaggagcggcgccgcactctccctagccagggtgttgatgacttcctccaagccaaggccaaatccaagactttggacttcattgatgtactcctgctgagcaaggatgaagacgggaagaagttatctgatgaggacataagagcagaagctgacacctttatgtttgagggccatgacaccacggccagtggtctctcctgggtcctgtaccaccttgcaaagcacccagaataccaggagcgctgccggcaggaggtgcaagaacttctgaaggaccgtgagcctaaagagattgaatgggacgacctggcccatttgcccttcctgaccatgtgcatgaaggagagcctgcggctgcatcccccagtcccggtcatctcccgccatgtcacccaggacattgtgctcccagacggccgggtcatccccaaaggcattatctgcctcatcagtgttttcggaacccatcacaacccagctgtgtggccggaccctgaggtctacgacccctttcgctttgacccagagaacatcaaggagaggtcacctctggcttttattcccttctcggcagggcccaggaactgcatcgggcagacgttcgcgatggcggagatgaaggtggtcctggcgctcacgctgctgcgcttccgcgtcctgcctgaccacaccgagccccgcaggaagccggagctggtcctgcgcgcagagggcggactttggctgcgggtggagcccctgagctga

SEQ ID NO: 3542 - DNA, 1234 bp, Homo sapiens
  SIMILAR (922)..(1203): 1001254mologous to Homo sapiens Protein sequence encoded by clone p199-7 (PL mutet.rsT4),accession number P93369,Smith-Waterman Score=542.
atggtctttagcaacctgaagggccactggctccaaccaatcagattagactctggctcacgtaacacagccattggctgtgacaaccagtataagccaactggagtgaagctgcagaccttcgcggtgagtgttacagctcttaaggccgcgcgtctggggttgttcgttcctcccggtgggctcgtggtctccctgggctcaggagtgaagctgcagatcttcgcgagccaagtggtctgttttgacagggcgctgattggagcgtttacaatccctgagctagacacaaaggttctccacgtccccatcagattagttagatacagagtatggacacaaaggttctccaaggccccaccagactcaggagcccagctggcttcacccagtgaatcccacaccagggctgcaggtggagctgcctgccagtcccagtgccgtgcgcccgcactcctcagcccttgggtggtcgatgggactgggcgccgtggagcagggggcggcgctcatcggggaggctcgggctgcacaggaacccacggagtgggtgggagactcaggcatagcgggctgcaggtcccgagctctgccccacaggaaggcagctaaggcccggcgagaaatagagcgcagcgccgggacatggatggagctggaggtcattatccttagcaaactaatgcaggaacggaaaaccaaataccacatgttctcactttcttgtagaccaactatttccatcatcagagaacgttctaaaggacagccctattctagagatgatgttgtagtagtgaactctaagaacgcaggttctgcccacagcgttccccctcttcccctctgtgatttgagctgtcaatttgatggaattaagggatacatagatagctgtcaggcaccgtgtatgaaatctaacaatgcgctcatcgtcatcctcggcaccgtcaccctggatgctgtaggcataggcttggttatgccggtactgccgggcctcttgcgggatatcgtccattccgacagcatcgccagtcactatggcgtgctgctagcgctatatgcgttgatgcaatttctatgcgcacccgttctcggagcactgtccgaccgctttggccgccgcccagtcctgctcgcttcgctacttggagccactatcgactacgcgatcatggcgaccacacccgtcctgtggatctacccactagtcaattcaccatcttgttga

SEQ ID NO: 3543 - DNA, 1410 bp, Homo sapiens
  SIMILAR (781)..(1065): 601254mologous to Homo sapiens CGI-26 protein,accession number AF132960,Smith-Waterman Score=269.
cagtcgggaatttgtccctttcttcggctgtcattctgtcatttacttgactaagataccaggtatctccaaactcttgggctgcagctaaagccgcattcttttcattaaacgccagggtttgattgcttggtgattggcgaaggtcccatctgggtcgccaaaatgtgtctggaattggtgggttcttggtctcactgacttcaagaatgaagccgcggaccctcgcggtgagtgttacagttcttaaaggcggcgtgtctggagtttgttcctcctgatgttcggatgtgttcagagtttcttccttgtggagtgaagctgcagaccttcgcggtgagtgttacagctcttaaggcggcgcgtctggagttgttcgtttctcccggtgggctcgtggtctcgctggcttcaggagtgaagctgcagactttcccagtgagtgttacagctcataaaagcagtgtggacccaaggagtgagcagcagcaagatttattgcaaagagcgaaagaacaaaccttccacactgtggaaggggaccggagcgggtccccgccagactcaggagcccagctggcttcacccagtggatcccgcaccagggctgcaggtggagctgcctgccagtcccgcgccctgcgcccgcactcttcagcccttgggtggtctatgggactgggcgccgtggagcagggggcggtgctcatcagggaggctcgggccgcacatgagcccatggagcgggtgggaggctcaggcatggcgggctgcaggtcccgagccctgccccgcgagaaggcagctaaggcccggcgagaaaccgagggcagcgccgctgtatcaggctggctttctggaatagctcagtggccaaagattgatcacgaagggtttagagctgtgaaaatgccccaggctgcttggctcctgaaagctgttacctttatagatcttactacactttcaggtgatgatacatcttccaacattcaaaggctctgttataaagccaaatacccaatccgggaagatctcttaaaagctttaaatatgcatgataaagtggccgctggatttccagctggacagactcatttgaagacacgattagaagagatcagattggctgtggaagatggagctacagaaatcgacgtggtaattaacagaagcttggtgctgacaggccagtgggaagggcatactccccagttgtttattcagcattaccatgcaacatatgacacagcagactgttccttccttctggtaatgctttgttgttgtggctttggtgcctacattcctgaggtcttcctttctgtttctgattacccctgcgtctcatttgcaagctccttcacctcctctgtcatccctgaagtgtccatgtttctcagaatctga

SEQ ID NO: 3544 - DNA, 1524 bp, Homo sapiens
  SIMILAR (630)..(1514): 271254mologous to Mytilus edulis precollagen P,accession number AF015539,Smith-Waterman Score=112.
atgcctgagcctcccgtccccgccccgccccccccacccgtgggctcctgtgcagcccgagcctccccgacgagcgccaccccctgctccacggtgcccagtcccatcgaccacccaggggctgaggagcgtgggcgcacggcgcgggattggcaggcagctccacctgcagccccaaaggaagaaactccgaacgcatctgaatatcagaaggaacaaactccagacacgccgcctttaagaactgtaacactcaccgtgacggtccacggcttcattcttgaagtcagtgagaccaagaacccaccaattccagatacaggattacaagtcgttcccaagcctttacctcggcacaccaggggacgtgtggcatcatcttcaattcaccacatccgtttccctgtatccccaagtgccagggcaggtggccacctggccacaccccttgccagggaacctggcagattcagtctagcccagcccaaggaggaggggcacccaatctcgctgtacagcgccggctctgcgctagttagttcgctcgtgttagttcttcagtttgtggatccgtttgtacggagtcacagaacacagcgttatcgctcgtccgagcccagctcggccgggaacctgggaactcggacgcagaaggacgcgcccgagccaggacccgccgcggggtccctctggtgggccgtggccggggagaggacgcgggccctggcggtcgaagacggacgcagcgcccggaaaggcgagccaggtctccggctcctggcgcttcctgtgagctggctcggcggggtgcgtcgccggggagggagggactggccgtggggcgagcagccgggcggggagtggcttctgggggccttcgccagcggagggcccgcgaggccgccctcggagcgccgccaggaacgcatcgatcctcctcgccgtccgcgcaagtcccctcttcgggagcgagaacggagagtccctggtgaccctgacttctggccagcgcaggacgccccaggccccagccagggtatcatgcacaggagtggaggaagaggcctcgccggccagtgcgcacgcggcgccggttcccgaccaaggctccggcccgctctgctggctcgtttgaaacgtcgacattctcagcgcacgatccggggtctcgggggcacccatggggcccgaagcctctgcctgccggcggcgaccggacagctcccccgggcgcgcagggtagaggaagcgccctctaaagcccccgcacgcattcacgagccggccctgcgcgggcacagcggcagccgcggcgggacacccggcagggtcttcggcgctactttgtgccaaaaactgcgctcccggagacccgggcaccgccggcgtcggcagatagagcgggacacagctcccaccgcgtgctccactggagcccctttcggcccctcggagagtgcggcccgtggggagtgggcgtcggcgcgagaaagttccccggcccgggcgaccccgggcttttga

SEQ ID NO: 3545 - DNA, 3342 bp, Homo sapiens
  SIMILAR (1786)..(2649): 541254mologous to Homo sapiens unnamed protein product,accession number AK001559,Smith-Waterman Score=754.
atgagtgttcgcaaggatgtagagaagctggaaccctcagacattgtttgtgggaatgtacaatgctacagctgcatggaaaccaatctgacagtttctcaaaaagttaaacatgaagttaccgtaggacccagggagggagccactaaaccaaacaggatgaaagggaaagaggggaggtcaggaagccttcttggagaaggggatttcttcaaggatgagtcagtgatgtctagccaaggaagcagcaaggatggagagaagagaaggggcaaagcacagaggtggaaatggcccatgcagggcatctgccggcagctgggagttgctaagagcatggaaggttatcaaagcaggagggatcagggaggcaggggtgtcagtgacaaatggccacaggtgtgtgcgaagaagcctgaattttatcctacagctcaggtgtgggcaaacttctctgtaacaagctgtcaatctgtcacaattactcaactctgccacgggctgagaagactggaaatttctccagcaagatcaaatgcaatgcatctcaacccagacccaccagggcaaaagcagaatctgtccccgaaggtcaacgacatcatcactgacattgagtctagctcaggctctggagctggaaagtttcaggttattagcaaatcggatatcagtgaggtccttctccagcaaatggatgcaggacacagcagtaaggatgacccaaatgaatatggaggctggaaaagcccaaggccaaggtgccagcagattcagtgtctggtgagggcctgcttcctggttcatcgatgttccttcttgctgtgtcctcacgtggtagaagggggagtgcttaccatccgcgttgtccttaaacgggaatgggagggaatccctggaatccctggaatccctgagcctggagggattcacaaggggaagggcagggctcaggacctgcagcccgccatgcctgagcctccctgcccctccgtgggctcctgtgctgcccgagcctccccgaggagcgccgccccctgctccacggcgcccagtcccatcgaccacccaagggctgaggagtgcgggcgcacggcgcgggactggcaggcagctccacctgcggccccggtgcgggatccactgggtgaagccagctgggctcctgagtctgggtccgcaccagcaatcctcaaagtccgcataaaaaccattaagatgtcttctggggaaatcaagagaacagtgaccagggtattgccagaagtggatcttgactctgggaagaaatcttctgagcagacggcgtctgtgatggcctctgtgacattccttctgtcatctccagcatcagctgccatcctttcctctctcctcagggcgcctctccagtccacggtcatgaccaatgcagtttcacctgcagagctcacccctaaacagagcgccagcagcgccatcattaaagccgccaacgccatccagcagcaaactgtcgtggtgccggcacccagccgggccaacgccaaactcgtgccaaagactgtgcaccttgccaacattaaccttttgcctcaggctcagcaacaaataaagcaggcaataatcaatgcagcagcctcgcaaccccccaaaaaggtgtctcgagtccaggtggtgtcgtccttgcagagttctgtggtggaagctttcaacaaggtgctgagcagtgtcaatccagtccctgtttacattccaaacctgagtcctcccaccaatgcagggatcacgttaccaacgcgtgggtacaagtgcttggagtgtggggactcctttgcagttgaaaagagtctgacccagcactatgacagacagagcatgcgcatcgaagctgcagatacacgtggacaaaagacttgcactatctgccagatgctgcttcctaaccagtgcagttacgcatcacaccagagaatccatcagcacaaatctctctacacctgccctgagtgcggggccatctgcaggtcggtgcacttccagacccatgtcaccaagaactgtctgcactacatgaggagagttggttttcgatgtgtgcattgcaatgttgtatactctgatgtggctgccctgcagtctcacattcaaggttctcactgtgaagtcttctacaagtgtcctatttgtccaatggcatcaaatcagaacaaagaggacaccaaatccatgaatgggaaagagaaattggaaaagaaatctccatctcctgtgaaaaaatcagtggaaaccaagaaagtggccagtcctgggtggacgtgttgggagtgtgaccgcctgttcattcagagagatgtgtacatatcccacgtgaggaaggagcaagggaagcaaatgaagaaacatccctgccgccacctgtgccagcacaaccggatcaagcacaaaggcatcaggaaagtgtatgcctgctcgcactgcccagactccagacgtacctttaccaaacgattgatgctagagaagcacgtccagctgatgcacagcctcaaggaccctgacctgaaagaaatgacagatgccaccaatgaggaggaaacagaaataaaagaagacaccaagttccccagtcccaagcacctcttcattgtacacaagttaaaggaacctcagccagtgtccaagcaaaatggagctggggaagataaccaacaggagaacaaacccagccatgaggatgaatcccccaatggcaccgtgtcagacagaaagtgcaaagtagacactgatgaagctgcttttgagccagattataatgaaagtgacagtggaagttatgtatctgtaaaagatgaggaaacttcaggaaacacttctaaggtcctgaaagataagataatggagaaagcaggagaaagcaaaagaaagcctggacacagttggccaggagaccagcaccccacacgggcatttgttcagccctccagcagcccctcctgccagccaaccaccctcatccctcccgtggatttcggggttctgagtaaccaaagcaagcatgggaacattctcagagcatgtccaggggacacctccgggaatatgcattcatctcagaggggagctgagtgcttatttgacaagcacaatgtaaccaagccaagaatggggaagggtatgaaacaagagaggcggccctcttccttctcagggaagccggggctggcaggaagtggggctgcaagtccaacagctgacaccatcgtctatgttcctctgagctgtgtgcaaggaagagtacagtctggggctgcaggcatgacagacttcagagggaaacaaatcaggcataaaaactgctag

SEQ ID NO: 3546 - DNA, 886 bp, Homo sapiens
  SIMILAR (244)..(390): 851254mologous to Homo sapiens Human secreted protein, SEQ ID NO: 7102,accession number G03021,Smith-Waterman Score=223.
atgcctgagcctccccgccactccgtgggctcctgtgcggcccgagcctccccgatgagcgccgcctcctgctccacggcgcccagtcccatcgaccatccaagggctgaggagtgcaggcacacggcgcgggactggcaggcagctccacctgcagcccccgtgggggatccactgggtgaagccagctgggctcctgggtctgtctgcagcttcacccctgaagccagggagaccacgaacccatccggaggaacgaacaactccagacgcgcggctttaagtgctgtaacactcactgcgaaagtctgcagcttcactcctgagccagcgaaaccacaaacccaccagaaggaagaaactccgaacacatccgaacatcagaaggaacaaactgcgaacacgccgcctttaagaactgtaacactcaccgcgagggtccacggcttcattcttgaagtcagcaagaccaagaacccaccaattccggacacattagggtggtaggccaggcatgggggagatcctacattccaggtacccctagcccttcccctaagcaggctaaccttggggattccctggagatcaaccaacttccagtgagagggagtggacaaaagcctctggaccagccattccttctctctctccaagtcctttttcctctctagcatcaaaaccaagcctaagtattttgaggttacatgaacatctctccccttcttttctgtgggcagagtcccttaggcaaataggaggcactgggggcctgagtgggatagctctccaaggtacactcattgacacagggtattcaggtaggggcttgccccaggccaagggagtaaggcaaactgtcaaaacctgggccatatgggccctg

SEQ ID NO: 3547 - DNA, 826 bp, Homo sapiens
  SIMILAR (85)..(774): 261254mologous to Leishmania major proteophosphoglycan,accession number AJ243459,Smith-Waterman Score= 141.
atgatcaagtgggtttcataccagggatgcagggacggtttaacatatgggtggtcctgcagtgtggaaactgtgaggtggttacccgaagtccacgcagcagacacctcatgtctcaaaatatcagcgtgtctcagtagtttctccagcagctacaaagccccatcagtagtagcacaagctgctcctccgagtagtcctcacaagacatcctctctatgtacaacatcagctcctctcgagaccctcaatgcgaacaacatcagctcctccctgagtcttcagctgcacgaccctcaatctagaacatcagctcctccctgagtcttcagctgcaacaatctaaaactagaacatgagctcctctccaggtctgcagctgcatgacactcaaactagaacatcagctcctccccgagtcctcaacagcgcgaccctcaaactacaacatcagctcctccccgagctagaacacctgtcccacctggatctccagctccacgaccctcacagaagaacagccacactggctccttcgttgtcttcagctccacaacctaagacatcagtgggagcaccggctcatcccatggacctccagctcaacgactctcatagacttaaaaggcagcacctgctcctccccaaggctccatctccaccaccctcagatttgaacagcggtagcaccacctcctctccaggtcttcagccccacgtccctccctgaacaatcccttctcatgaaattcagcagtcaagaaatctgcagcggaagtaaatgaataaatgttttgttttcaaatcgaaaaaaaaaaaaaaaaaa

SEQ ID NO: 3548 - DNA, 2239 bp, Homo sapiens
  SIMILAR (1057)..(1977): 271254mologous to Leishmania major L8453.1,accession number AC008054,Smith-Waterman Score=226.
acgtgataccgaaagactaatgctatgtaggagctgacacagcacgggaggactatgaccacctaaggaacagtgagctgtgtcaggacagaaatgagcaagcttgagtctccgggcacatctcaggaaacagtaatgcaaggcgcacgtcagggctgtgactcactcctcagagcaggcttgggtccccagtgtaagaatgaacagacagccctcccacatcatgtagtgtggatggtggggctgcagggcatgtcgtgctcttgccggtgggctgccagagacatgtcagacccacttcttagtgagggcccattcatttcctctctgggttgcatttcatcataatcactcggtacccacgattcttcctgacagcctgaaacaagcaggctttgcatccttttcaggcctggggtctggtcctaccccaggggcttctgttttcacccacaacagattcgcctccatgccagagacaccaccataaagccacttctgctgccagagtccccagtctccaatcaccaagaaattctccaccaaggggcaagctccagccatctaacttgtaatcagtagcatcaacattgtcttcagatttgccgaagagatcggggtcgtgcctacacttgctggctcggcaggctttcaaatgcaggtatctctgagccatttgtgacaccagagcatcactggacaagcctgtgctggcccaggtactctgtgcacctggtaaggctgaacacatccgcaagagcgtgggacctggggaaatcgccagttgtttgctgtcctgccattgccgttctacacatccctggagactatgagcatgggttgtggtgccgtagtggctgggcagtatcagaaatgtccatttttcaccattcccagtgccaacttcccatggcagaaacaggaaggaatgtctggcaacccaccaagggtcagacgccacatcagcctgagcagaagctgcctgacactggctgttccaatgacaattagacgttcttgggaaggtgcgccctttgtgggagctcaggatgggtgtcgtcctcttcttccagggcggcgggcgcttctcctgcaccttggcctggcgcctcttctcggcctcctccgcctcccgtttctcctccttggccaccttgtaaggccacttgggtatccgcaggtggccgctgcctttatgctgcccttccgcgccggcccctcgccgcgccgccggaatttcctgcgccgccaggatttcctgcaccgccagccgcctcttcccccagcacaaggtgctctcggggcacatagtcatgtggtccagggcgccccggtcctctgggccccgcatggagcgcggcgtcagcgcggacagctcgcagtccctgagcctctgcaggcagttcttggagccctcgggcttttgcggcctctcggggagcggcggcagctcaagctggtactttttccccaacagctcccggcaggggcgctccaggagcctctgcatgaggcggacgtataagtggccactcctctggcgacatcccacggcgggggccctcgcgtggacacccgcccctgctagctcagggctccgatgcgatccgttcgaccctgcatggcggctttcaacccgaacgcgtccctccttcaagatcaagaccccctcgccgcaccagcgtccgcagcagccccatgcctcctggacgccctcctccgggacgctctccaagccctcgacgccgtgctcctcctcgtcctgtgcgcctaggagtggggacggcggtggcggggtcatgcagggctccccagccaacctgcggccgggtcccagccagcagcaccatgccagcggccggaggcgtgggctgggggccggggcaaccgtcccggaaaaccgggcgcgccccaaggtccctgcttctcgcttccgcgtccccagagaagccggtagctcccgcccccagcccggcagaaacctcctttctttacattattaagtttgttttcattttaattttattaggacattgatagaatcactttcggatttttgagattaaaaattaaataattttcatctttaccctttttaaatttttcacactttattttaatgattttattcttttgtaaattttaatatattgtaatttatatcttcaattattatggaagaattttagaaaagtcctttcacataataaagactaattaataaaatataaaaaaaaaa

SEQ ID NO: 3549 - DNA, 1911 bp, Homo sapiens
  SIMILAR (1355)..(1420): 721254mologous to Mus musculus Pro-Pol-dUTPase polyprotein,accession number Y12713,Smith-Waterman Score=78.
acaatttatgcagtgaatctttttcccatccttccccaaggagacctctgaccttttaccatggtaactatgcattggggagagggaaatggtcagatatttcggggactactggacactggctctgagctgatgttgattccaggggacccaaaatgtcattgtggtcctccagttaaagtaggggcttatgaaagtcaggtaattaatggagttttagctcaggtccaacttactgtggttccagagggtccccagactcatcctgtggtcatttccccagttctggaatgcataattggcatagacatacttggcagctggcagaacccccacgttggatccctgactggtaaggtgagggctactatggtggaaaaggccaaatggaagccattagagcagcctctacctagaaaaatagtaagtcaacaacaatatcgtatccgtggagagattgcagagattagtgccaagatcaaggacttgaaatatgcaggggtggtgattcctaccacatcccctttcaagtctcccatttggcctgtgcagaagacagacggatcgactaaaattccaggaacttctacctcagtaaaatttctaggggtccagtagtgtgggacctgtcaagatattccttccaaggtgaaggataagttgctgcatttggcccctcctacaatcaagaaagaggcacaacgcctagtgggcctatttggattttggagccaacacattcctcatttgggtgagttactcaggcccatttatcgagtgacccgaaaggctgccagttttgagtggggtccggaacacgagaaggctctgcaacaggtccaggctgccctgcaagctgctctaccacttgggccatatgatccagcagtcaagccactgtgcaacttaaactgcctgtcataaactgggtgcttttctgacccatctagccataaagtggtcatgcacaagttacgtgaggaagtgggtcaaatgaccatggtcttcactcctgccaccctgtcttctcttccccagcatgcaatgatggtgtcatggggagtttcctatgatcagttgacagaggaagagaagaccagggcctggctcacagatcgttctgcacgatatgcaggcaccacccgaaagtggtggacaccactcagtctctttccccagccacccctgtcatcaccaatgggccctggccatggtggcaggggtggaggttatgcatgggctcagcaacatgggcttgcactcatcaatgctgacctggctacagcctctgctgagtgcccaatttgccagcagcagagaccaaaaatgagcactcgatatggcaccattcctcggcaaagttctccagaaggctgtgtgtgatctgaatcagcatccaatatatggtactctttctccatagccaggattcacaggtccaggaatcaaggggtggaagtggaagtggcagcactcaccatcacccctagtgatccactagcaaaatttttgcttcctgttcccacaacattacgttctactggcctagaggtcttagttccagagggaggaaagctgccaccaggagacacaacaacaattccattaaaccgtaagtcaagattgccacctggacactttgggcccctcctacctttaagtcaacaagctaagaagggagtataccccccaaaaaagaaatcattataccaaaaacatgcactttcatatatgtctttgttcactgcagtaccattcacaatagcaaagacatggaatcaacctagattcccatcgatggtgaattggatagagaatatgtggtacatatacaccatggaacactacacagccataaaaatgagtgaaatcgagtcttttgcagcaatatggatgcagctggaggccatt

SEQ ID NO: 3550 - DNA, 367 bp, Homo sapiens; identical to SEQ ID NO: 2951
  SIMILAR (324)..(193): 861254mologous to Homo sapiens FRG1,accession number AF146191,Smith-Waterman Score=187.

SEQ ID NO: 3551 - DNA, 464 bp, Homo sapiens
  SIMILAR (265)..(462): 981254mologous to Homo sapiens FRG1,accession number AF146191,Smith-Waterman Score=339.
  misc_feature (1)...(464): n = a,t,c or g
ggaagggggnnngggcctgatgaccctgatatcgtctaggaattgcggnggaattccgcggctcctggcgcctgtgcagagaggggcagcctcccgcactgactaccctggattcaggatagacgggcgggtgacccgtggccccgtacccacgagtttcggtcctctgaggcatctctgcaggcctctgcctgtaagaagaaaaagagcaaagagaagaagagaaaaagagaagaagatgaagaaacccagtttgatatgttggggaaaatggctttgttggcctcaaatggctgctttattagatgcaatgaagcaggggacatagaagcaaaaagtaaaacagcaggagaagaagaaatgatcaagattagatcctgtgctgaaagagaaaccaagaaaaaagatgacattccagaagaagacaaaggaaatgtcaaacaatgtgaaatcaattatgtaaa

SEQ ID NO: 3552 - DNA, 542 bp, Homo sapiens
  SIMILAR (343)..(206): 891254mologous to Homo sapiens FRG1,accession number AF146191,Smith-Waterman Score=217.
atcatttcttcttctcctgctgttttactttttgcttctatgtcccctgcttcattgcatctaataaagcagctatttgaggccaacaaagccattttcccattttgaaagactggttcccattgttctcttggtccaattgcatctgaatgcccaacaagttcatctgaatttataccaagatattttccatagccagatttcagggcgattcttctttgtgtggagctcccagggtaaaaagaccattgtcgagtgcatgtatataggttccctcatccatttcaatggctatggttcctgaaatttcaccaaagtttgttactgttcaccagattccaacgtatcaagctgggtttcttcatcttctctttttctcttcttatctttgctctttttcttcttacaggcagaggcctggagagatgcctcaggggacccaaactcgtgggtacggggccacgggtcacccgcccgtctatcctgtttccagggtcgtcagcacgggaggctgcccctctctgcacaggcgccactcgtgc

SEQ ID NO: 3553 - DNA, 704 bp, Homo sapiens
  SIMILAR (500)..(294): 571254mologous to Mus musculus Frg1,accession number U62105,Smith-Waterman Score=212.
ccagaagcgtctcatgcaaaaatccatctttctgagcctttttaagaattttactgtcttctttacttattttaagtttgtgctcttggaagctctgaaatttctttacataattgatttcacattgtttgacatttcctatgtcttcttctggaatgtcatcttttttcttggtttctctttcagcacaggatctaatcttgatcatttcttcttctcctgctgttttactttttgcttctatgtcccctgcttcattgcatctaataaagcagccatttgaggccaacaaagccattttccccttctttgtgtggagctcccagggtaaaaagaccattgtcgagtgcatgtatataggttcccttatccatttcaatggctatggttcctgaaatttcaccaaagtttgttactgttccaccagattccaacaatatcaagctgggtttcttcatcttcttctctttttctcttcttctctttgctctttttcttcttactgccgtttattctggcatcttcatgaggccagactcctcgagagggttctcaagggcagtggcttcagctcactccttgatactttctttccatctcgcctcttcgtcttggttcccttgagcacaagcttggtagacttcgcataagattactcggccatggctccgaattccaccgcactggactaatggtctacgagg

SEQ ID NO: 3554 - DNA, 2448 bp, Homo sapiens
  SIMILAR (687)..(1691): 201254mologous to Streptococcus parasanguinis fimbriae- associated protein Fap1,accession number AF100426,Smith-Waterman Score=134.
  misc_feature (1)...(2448): n = a,t,c or g
tcaatgtttgtcagtcacataggattccagaacactgctacgatagcctgaatgtttgttcttcataggggattccagaatactcctgttgtgatctgaatatttgtccctcacactggactccagaacactgctacgagggtctgaatgattgtccctcaagcaatattccagaacactgctgctggggtctgaatgattgttcctcacgcagcattccacagcactgcttctggggtctacatgtatgtccactacataggattccagaacactgcagctgggttctgagtgtttctccctcacagagaattctagaacactgtgacgagaacctgaatgtttgtctgtaacataggattccagaacactcccgctgttgtttgaatgtttgtccctcacataggattccagaacactgctgcttggatcagaaagtttgtcccttacacaggattccagaacactgctacgattgtgagggtctgaatgtttgtccgaaacatagaattccataattctcccgccgttgtttgaatgtttgtcccacacatagtattcgaaaacactacatctggggtccgaatgtttgtccctcacataggattccagaacatccctgttgtggtctgaatgttcgtcatatgattcgaaaacactactgctggggtctgagtatttgtccctcacatagggttccagaacactgctacgagggtctgaatgattgtccctcacgtaggattccggaacactaccgctggggtaaaaatgtttttctgtcacaaaggattccagaacactgctacgagggtctgcatgttcgtttctcacgaggtattccagaacactcctgctgtcgtctgaatgtttgtccctcacacaggattccagaatactactacgagtgtctgaatatttgtccctcaaagagaattccagaacantgctgcttggttccgagtgtttattcctcacataggattccagaacactgctactaggttctgaatgtttctccctcacagaggattccagaacactcctgtggtggtctgaatttttgtccgtcacattggattccagaacaccgctacgagggtctgaatgtttgtctctcacacagaattccagaacactgctacgagggtctgtatgattgtccctcacataggattccagaacactcctgctgtggtctgaaagtttgtccctcacatagcattcaagaatactgctgctgggttttgagtgtttgtccctcacataggattccagaacactgttaccattgtctgaatgtttgtccctcgcataggattccagaacactgagaggattccagaacactactgctgttgtctgaatgtccctcacaaaggatttcagaacactgctacgagggtctgaatgtttttccctcacacagaattccagaacactgctatgagggactgaatgattctcccacacacagaattccagaacactgttacgaatttctgaatgattgtcactcacataggattgcagaacactgcttctcgggtctgaatctttgtctctcacataggattctggaacacttccgctggggtctacatgtatgtccatcacatgggattctagaacactgctgctgggatctgagtgtttctcactcacatataactccagatcactgtgaagagtgtcggaatctttgtccataatataggatgtcagaacaatcccgcagttgtttgaatgtttttccctcacataggattgcagaacactgtccctggggtccgaatgtttggcccacacataggtttccagaacactgctaggattgtctgaatttttgtccctcaatcggattccagaacaatcctgctgtggtctgaatgtttgtccctcacacaggattccagaacactgctgcaggcgtctgaatgtttgtccctcactcataattccagaacaaaagaattccagaagactgcgacgaggatctgaatgtttgtccataacataggattccagaagactcccgctgttgtttgaatgtttgtccctcacgtaggattccagaagactcccgctgttgcttgaatgtttgtccctcacataggattccagaacactgctgcttgagtctgaaagttttttcttcacacaggattccagaacactgctatgattgtctgaatgtttgtcactccataggattccagaacacttgatcatttcttcttctcctgctgttttactttttgcttctatgtcccctgcttcattgcatctaataaagcagccatttgaggccaacaaagccattttcccctctttgaatgccttctctaaatcagtaccctctgaggcagtggggatcagctcttcaacataggaattgcggggctgtccacagacacgaccacctgctgaggggctgtccacagccat

SEQ ID NO: 3555 - DNA, 402 bp, Homo sapiens
  SIMILAR (2)..(148): 421254mologous to Homo sapiens SEQ ID NO 462 from WO9922243,accession number Y19744,Smith-Waterman Score=78.
  misc_feature (1)...(402): n = a,t,c or g
gtcatgtcctccgaggtgtccgcgcgccggatcgccaagaagctggtgcgctccccgagggcctgcgcatggtgcccgaacaccgcgccttcggaagcccgttcggcctggaggagccgcagtgggtcccggacaaggaggagccaccttcctcgtcacgtttggaaactcagagaaacctgaaactatgacttgtcgtctttccaataaccagagatacttgtttctggatggagacagccactatgaaatcgaaattgtacacatttccaccgtgcagatcctcacagaaggcttccctcctggagaaaaagncattcacgnttacaccagccttccggggngagccannctgcctctttaagggtggtaacgaanggngtcacaggtatgttnctgcag

SEQ ID NO: 3556 - DNA, 499 bp, Homo sapiens
  SIMILAR (1)..(252): 951254mologous to Homo sapiens atrophin-related protein ARP,accession number AF118275,Smith-Waterman Score=393.
gtggcctctattacggagaaggctgacagtaccagctccaagaagacaataacgcaggagatcagcaggcccaactcgccatctgaaggtgagggagagagttcagacagtcgcagcgtcaacgatgagggtagcagtgaccccaaagacatcgaccaggacaatcgcagcacgtccccgagcatccccagcccccaggacaatgagagtgactcggactcgtcagcccagcagcagatgctgcaggcccaggcccagcctgttcgcctctaatagccagtttacagcacttgccttagcctgtttcacagacttgtccacttaccttgtcactaatttggggcttttgggctgtgagtgatcctttgatacttcaccaaggggaacgtgggggctttgtgttttgtacttttcactcactatttcactttattaagatgactgtacagcaatttgtatataaagcttatgattaaaaactattttgaacataaaaaaa

SEQ ID NO: 3557 - DNA, 399 bp, Homo sapiens
  SIMILAR (27)..(203): 411254mologous to Gossypium hirsutum proline-rich cell wall protein,accession number L17308,Smith-Waterman Score=98.
aagcctctgctgttctaagcgattcagtcctggtgccaccacgtactccaagctcagccccacgtagaattactggtcccgagattcatagaggagcttggcagccttgtgcatggccactagccacgccaccgcctgcctcctgcccacagtcacgtcctccaccactgtcagcttcagctgggtcacaccctccgtccccggcactgtatactgcaggaacatgcctgtggcccgtgcgttgcctccttcagaggcaggctggctcccccggaggctggtgtaagcgtgaatgtctttttctccaggagggaagccttctgtgaggatctgcacggtggaaatgtgtacaatttcgatttcatagtggctgtctccatccagaaacaagtatctctg

SEQ ID NO: 3558 - DNA, 1639 bp, Homo sapiens
  SIMILAR (151)..(336): 491254mologous to Homo sapiens Human Smad Anchor for Receptor Activation protein-2,accession number Y44750,Smith-Waterman Score= 181.
  misc_feature (1)...(1639): n = a,t,c or g
gatgttcnnnnaattgaacctttgagaccantcgccggnccgnanntnccggnnaaccatttcgtggctgaggcggcgtcatgtcctccgaggtgtccttttcgccttgacgccaagaagctggtgcgctccccgagcggcctgcgcatggtgcccgaacaccgcgccttcggaagcccgttcggcctggaggagccgcagtgggtcccggacaaggagtgtcggagatgtatgcagtgtgacgccaagtttgactttctcaccagaaagcaccactgtcgccgctgcgggaagtgcttctgcgataggtgctgcagccagaaggtgccgctgcggcgcatgtgctttgtgggaccccgtgcggcagtgcgcgggagtgcgccctgggtgttccctcaaggaggcggagtttttacggacaagcagctcaaagtgctcctgagcggagccaccttcctcgtcacgtttggaaactcagagaaacctgaaactatgacttgtcgtctttccaataaccagagatacttgtttctggatggagacagccactatgaaatcgaaattgtacacatttccaccgtgcagatcctcacagaaggctttccctcctggaggaggcaacgcacgggccacaggcatgttcctgcagtatacagtgccggggacggagggttgtgacccagctgaagctgacagtggtggaggacgtgactgtgggcaggaggcaggcggtggcgtggctagtggccatgcacaaaggctgccaagcttcctctatgaatcttcgggaccagtaattctacgtggggctgagcttggagtacgtgttggtcaccaggactgagtcgcttggaacagcagagcctgctccttgcgtaccacagggattaatcctgcttgtgctgggaaatgcaactcactcatgtatttggagaaacaaacaggagtgttcacttatctagtgcaatatgttcacagtttattaatgcttaaaacagctttccatgttttagaatttgtgtattgtcccatactttaaatgggggtgggagagactgaggctacactactgcctaaaactatttttaagccataatataatacccatttttaatgagatccgcaggtcctacctagaaggttctggccccatcaatattccatttcatttaattcttcccacagaaaccagtttggggcagtaggaactcaaggcttctgggtctgcagtggaaccctgttcgcctctaatagcccagtttacagcacttgccttagccctgtttcacaaaacttgtccacttaccttgtcactaatttggggcttctgggctgtgagtgatcctttgatacttcaccaaggggaacgtgggggctttgtgttttgtacttttcactcactatttcactttattaagatgactgtacagcaatttgtatataaaagcttatgattaaaaaactattttgaacatacggacaaggcctcgccttcctgtgtccagatcacctgaaccctcgtgccacagcgcagtctggggtccaggaaaggaaggacttcacagccgccgggggtgaggacggggttttatttgtggcacattttacacagcgttagaggcggtcttggggttggcag

SEQ ID NO: 3559 - DNA, 699 bp, Homo sapiens
  SIMILAR (322)..(630): 311254mologous to Mus musculus jerky,accession number U35730,Smith-Waterman Score=141.
atggggccctactgggctcctgatcccaaatccagagggaaatctcccagagtttatggtcaaagatgtacaccggagtgtacaagtttaggtcaaggttacctgaatcgcactgaacttttgggggaatgcttgataaggcttttggttaagtgtagatgggacagggcacctagactgacctgtcttctggattcgaaacctctaatcaatggccagcaggggcctgaggagggattgagagcacctaaaggaggcaattttggcacattccctcaggctaagagaggtggggaagctgctgaagaagagtctgaagctagcaggggttggctcgtgaggtttaagggaagacgctgtctccgtaacatagaagtgcaaggtgaaacagcaagtgctgctggagaagctgcagcaggtcatccaggagatctagctaagatcactggtgcaggtggctactacactcaacagattttcagtgtagatgaaaccaccttgcactggaagaagatgccatgcaggacattcacggctacagaggaaaaaatcagtgcctatttcaaagcttcaaaggacgggctgaatctgttattaggggttaatgctcctggtacctacgtcctcagaagtaatattagcgtttttctctcagaggaaatgagtagtgataagaggttaacagaaatgggctattaa

SEQ ID NO: 3560 - DNA, 2521 bp, Homo sapiens
  SIMILAR (960)..(1127): 381254mologous to Chlamydomonas reinhardtii vegetative cell wall protein gp1,accession number AF309494,Smith-Waterman Score=63.
atgtgggccccgcccccaaccattgtgtcggagagggaagtggacgagctcctcgagaggaatgcgcagctgaagagagaggtgggcagcaggcccggtcacctgccaggtgaccacatggccaggtgccgccaccactcgggttacctggccgatgacgaggccagccactccatgtgcagtgcacgggtgcagctgcccaagaagccactggtcccagaaatgcggccagcctgcaagccgggccgtgtgccacacccaccatccacatgtggcagctcagcactccagggccaacgccgaaacaagaggcaccctcagccctttggccactttctggatttcctaactgagagccaggtcctggacagcctggagacagtggtggagaaggcgactgagcgcatggctgccatgaagacggaggctggggtgccgcttgtggaggtgcaggacccagtggaggtgccaagtggtagacggcgggcacatgcccggcccagcctcagcaccgtacaccggcaccgtgtacggccgaccctctgcactggacaccccaacaactacccatccagctccagctccatgtccaactgccatagcagcctcatggccggctgtctgggctcccacagccgggacagtgacctaggtgcccaaggctcattgccacctgtgagggacaaactcctgctggagaagaacctcaagcggctgctacagctggagagggaagggaaaggcctcagtcagtcctgctcccagagggactccctgctgtgggattcgctgggtagccagaccagctttcagtggacacaggagcagcccttgtcctggttctcagggctgctgggctcaagctctggcgtgcctgaagcatcagagccgaggcctggagaacaggagccaatcttccgcaagcgagagttcaataaggagatcaagtcattactgagccagctggagtccctcgacctgcctggctactgtccgctccgtgagccccatcgcacgctgaacttcctggctgaccaccgcctcttccctgccctgcaaagcgtggtcagccaggctgtggataagctccgtggcgcccactgccgcgacggccgtcctctgttccccaccagcttggagcccacctcagatctgccgcctctgggctctgagccagctaaacccaccaatggcgggcagccctatgcttccccccgccccacagtctccagccccaagatgcttcagagaaaacgcaaggacagaggaggctccccctccatgtctagtgcccaggtggccaccagattcaaactcaaggtgacacccacggagaagcccaatgtccccagcccctcactccactccagggaggaggcacctgactcagatcccaaattacaaaacccacctgtttccctgagctccagccagagggcccagccctggcagggcctgcacctcaccctgcccacgccagggattgtggtggaggtggcctgcagccagggccacctcaggggccctgtcacacctccactttcctccccctacccccgctcttcctgctaccttctccctgagctctctccagttgcctcttcatctcccgcctcactgtgtccagagagcccctgcagcagcagcaggttcacgaagaagaagccgctgccctccatctcgtcgaagtccagcatgtctcacttctccaaccgcctttatgaggagctcgccgacttcctgacccagcaggcagcctccttggtcatccgcaagtacgagttcgaaaaggacctcagtaagcagctgggcttcttctccttccccatcacccacgtgctcagggacctttccctgggcttaaagaaggtaaaaggctcccgcatccacctgtcctcggagacccaccggagctgcctgctgcgtaaactggaggagtccaaaagggcccggcaggcctcccggctcagcacctcccactgcagcacagagacaccctctgtgcagcaggaaccagccacccacactgcccaggaccaggccacagagccctgccgctccctctacaccaacttgccagccagccggcagctcagccctttggagcccaagctctacatgtctgcctgcaccggcatgggttccagtccccccaagtccaaggacatggacaatgagggccgtgataaagccgagattgaagatgaagatgaggatgagttcaaggatgaagaccaggatgaggacaaggatgaggatggagtctagagcctcccagagcctggagaggaggcctcggtcagccactccgtggacgtgggccacggtgacccaccatgaagtccccactagccactcgattccctgctctgtcagagttgctgcacatcacaccagcccctgccaagagcaggagtcaccacaggctgaatgcccacgaggagctctgctgagactctcaagggagccagtgaaagaaatagaaataaagcctgtgctgctgggacacaaaaaaaaaaaa

SEQ ID NO: 3561 - DNA, 674 bp, Homo sapiens
  SIMILAR (77)..(328): 361254mologous to Volvox carteri f. nagariensis hydroxyproline-rich glycoprotein DZ-HRGP,accession number AJ242540,Smith-Waterman Score=99.
atggctcagtgcagcctggacgccctggaccagcccctcctgcgcctgggccacggccgctgccttcagggcatcactgtgccctggccccacccacccgtgtcagcaccgcccaccgccctggcaccacccaccgagttctcgcccatgaggaagggggaccctgagtggaggtttcaaaccttaggggccgtccctgccgtgcagggctctacccccacctgccccatggcccccatttcatgtctgtggctcaccagcttttccccagacccagctccggagcccacaggcgtggccgatgcagaaacctcaggaagaaccttccagaacgtgccttccacgggacggaaacttccggaacatgccttccacagcatggaaacttctggaacgtggcttccatgggatggaaccttccggaacgtgccttccatgggacagaaccttctggaatgtgccttccacgggaccctctcatgcccttgcacaactgcaccattttcctgtgtcaccgaggaggacgtgggctccgagccgctgagtgacctgttgggggcagggctggcgctggccgtcccagcttaaggacttgccacagcttaagacccatggaaggaaggtacggggaggtgctgaagggatgaagggcagagctgggccttggggcaagg

SEQ ID NO: 3562 - DNA, 1257 bp, Homo sapiens
  SIMILAR (312)..(7): 471254mologous to Arabidopsis thaliana F12A21.9,accession number AC008113,Smith-Waterman Score=248.
ctaccttttcaagtaggcatgcacattcccaaagccatgatatttggctaaatacacaaggaccccagtcgcacaccgtccatctcgctgccggcagaaactgcagttgcagattcctcgacaaggcgggcaatgccagttcggatccagcagagcatccctgacctcttcaccataacggtttcgaaggcaggggccacagaactggcctcgaacgccccagcagtctgggtttctgcagtttgttttggtatcaatagtcttctgacggcattgatgacaagtagagcccagtgaacggttatatatcttctctcgagaattgctgcagacgttctccaactcctcctctgtaatttcttccactgggcgaattatatgcggaagggtcacggatgatctggagcgacggcttctgggcaggtcatcttcattcatgtagccatccacggtcttcctctttctcaccaacatgtacttatcctcttcctcctcctcctccatgggtagagcgtcaagggacccgaggatccgggaccttgacctggtaagaggacgagctctccgttcagggtttctcctggaagcaacacccgggaatgtacgccttcgcggtctccttgattgcattccatcttgtatctcactctctgagaaaccgcaaaatgattcatcgtcagagtcggcatgaaaaataccggccagttcgttagtgacatctggccttggtttctgtaaaaatccacaatggtctaatacatcttgcacctcactttcatgtgatgccttccaccttggaatgactttgtcagatgccagtgccatgctcttggactttccagcctccagaaccatgagccaaataaacttctgttccttataaattacccagtctgtggtattctgtgtcccaacgcgggaaagacagcccgagccccgcccctccgggcccgggtcggcgcgcccagcctgccagccgcgctgctgctgctcctcctgctgtgggaccgctgaccgcgcggctgatccgctctccccgctccaagcgccgatctgggcaccccgccaccagcatggacgctccccgcgtgccggtgagggctgaggtggctgcatggggcactgagagtggttgtgatcctggaaggtggaagagcacagtagccacctagcagcttctgctcgataggaattacttatggtcacaaatgtgcatttgccttgtcctggtgagccttcatcctcactgagaaccat

SEQ ID NO: 3563 - DNA, 756 bp, Homo sapiens
  SIMILAR (32)..(214): 351254mologous to Homo sapiens keratin associated protein 9.5,accession number AJ406949,Smith-Waterman Score=89.
ttaaaggttaactatactatagacgtcttcatcaagctgctgcggcttttcttctactttgaaaaccacaagtaaacaagtcggcttcctgtgcacagcttgcaggacctgtgtcccaacgcgggaaagacagcccgagccccgcccctccgggcccgggtcggcgcgcccagcctgccagccgcgctgctgctgctcctcctgctgtgggaccgctgaccgcgcggctgctccgctctccccgctccaagcgccgatctgggcacccgccaccagcatggacgctcgccgcgtgccggtgagggtttttgctctaacggaagccagaacgtagggtcgggctccctgggccttcccaggagatgtaaacccctctcttgctcccatcccctgaacatgctcatacacagagctcattcccccagtctccttttcttttcctccttctacctcagggaactctcctacagcctgcttagactcaggagtccagctggcttcacctagtggatctcgcacaggggccacaggtggagctgcccacagtccggcccgtgcacccgcactccacagcccttgggcagtcgatgggaccaggggctgaggtggctgcatggggcactgagagtggttgtgatcctggaaggtggaagagcacagtagccacctagcagcttctgctcgataggaattacttatggtcacaaatgtgcatttgccttgtcctggtgagccttcatcctcactgagaaccat

SEQ ID NO: 3564 - DNA, 515 bp, Homo sapiens
  SIMILAR (288)..(335): 431254mologous to Homo sapiens CRCA-1 protein sequence fragment,accession number Y00979,Smith-Waterman Score=40.
ccgctgaccgcgcggctgctccgctgctccccgctccaagcgccgatctgggcacccgccaccagcatggacggttcgccgcgtgccgcagaaagatctcagagtaaagaagaacttaaagaaattcagatatgtgaagttgatttccatggaaacctcgtcatcctctgatgacagttgtgacagctttgcttctgataattttgcaaacacgaggctgcagtcagttcggggaaggctgtagggacccgcagccagtgcaggcactctggacctctcagggtggcgatgaagtttccagcgcggagtaccaggggagcaaccaacaaaaaagcagagtcccgccagccctcagagaattctgtgactgattccaactccgattcagaagatgaaagtggaatgaattttttggagaaaagggctttaaatataaagcaaaacaaagcaatgcttgcaaaactcatgtctgaattagaaagcttccctggctcgttccgtggaagacatcccct

SEQ ID NO: 3565 - DNA, 507 bp, Homo sapiens
  SIMILAR (422)..(490): 391254mologous to Felis silvestris polyprotein,accession number X51929,Smith-Waterman Score=40.
  misc_feature (1)...(507): n = a,t,c or g
ngatttagggggagccngnnnnnnnnnnaatcgatattcatgtgcgtgtggcggaattctatccagagtcaggtgtcactactcaatacacttggacccagcttccccaaaggttcaagaactcccccaccatctttggggaggcgttggctcgagacctccagaagtttcccaccagagacctaggctgcgtgttgctccagtacgttgatgaccttttgctgggacaccccacggcagtcgggtgcgccaagggaacagatgctctactccggcacctggaggactgtgggtataaggtgtccaagaaaaaaagctcagatctgccgatagcagggcacttcaactcagaaagctgaactcattgctttaattcgggccttagaactcagtgaagcataatgcgagacaaggtccagctgttccccctggcatacaagcttatggagcagccccctttgaagatctccaggtggacttcacagagatgccaaagtgtggagatct

SEQ ID NO: 3566 - DNA, 3192 bp, Homo sapiens
  SIMILAR (935)..(1078): 351254mologous to Feline leukemia virus gag-pol precursor polyprotein gPr80,accession number AF052723,Smith-Waterman Score= 57.
atggaggaaggatggattcggttaccagatgggagactagctgtgccacagctgctaggagctgcagttgtactggctgtgcaagaaaccacccatcgagatcaggagtcactggaaaagttgttaggctggtatttctacatctcacttctgtcagcccttgccaaaacgatttcgaccgccttacggatcggctcagacaacgggcctgtgtttttggctgccttggtacagaagacagcaaaggtgtccaagacacagagagccacggaatctcacaggtgtctgagaattcctcctcctgggactctcagaggatccagaactgcagccgtcctcgctttgctgtccctgtccctgtccatgtatctggtcacggtgctgaggaacctgctcagcatcctggctgtccgctctgactcccccctccacacccccatatacttcttcctctccaacctgtgctgggctgacatcggtttcacctcggccacagttcccaagatgattgtggacatgcagtcgcatagcagagtcatctctcatgcaggctgcctgacgcagatgtctttcttggtcctttttgcatgtatagaaggcatgctcctgactgtgatggcctatgactgctttgtagccatctgtcaccctctgcactacccagtcatcgtgaatcctcacctctgtgtcttcttcgttttggtgtcctttttccttagcctgttggattcccagctgcacagttggattgtgttacaattcaccatcatcaagaatgtggaaatctctaattttgtctgtgacccctctcaacttctcaaatttgcctgttctgacagcatcatcaatagcatattcatatatttccataaggatccagaactgcagccggtcgtcgctgggctgttcctgtccatgtgcctggtcacggtgctggggaacctgctcatcatcctggccgtcagccctgactcccacctccccacccccatgtacttcttcctctccaacctgtccttgcctgacatcggtttcacctccaccacggtccccaagatgagcgtggacatccagtctcacagcagagtcatctcctatgcaggctgcctgactcaaatgtctctctttgccatttttggaggcatggaaaaaagacatgctcctgagatattaagatccaaatggcaggggggcgaggcgccccccgcgattcggggagtaataccacccgcctctccccccgcatatattaagatccaaatggcagggaggcgaggcgccccccgcgatgcggggaattatattcggatcaatatcaccggctgtgtgtacacctactgcgatattgaacgtagtatcatgctctctccctccctggagattaggagcaatatcacagctcgtttacgacccaaaacggggacacaaatgcccctgagagtgcagcgttatactgggatagacgaggatggtcacgtggtggagaggcgtgtttttggtgaagaaaggcggagagtcctccaagcaggaactaagtggctagaggaacatgcactagctgattatcaaaacccccaagaatatggaaggacccagttgccaggaaccgacccccagttggacccacatgaaagagaggagatgcaaaggctaaaccgagacagggaagctctcttggaaggattaatgaggggagctcagaaggccacaaacgttaacaagctctctgaggtcattcagggaaaagaagaaagtccagcacaattctacgagagactgtgtgaggcctatcgtatgtatactccctttgatcccgatagccctgaaaatcagcacatgattcacatggctttagtccgtcaaagcgcagaagacatgagaagaaaactgcagaaacaggctgggcttgcagggatgaatccatcacaattactagaaatagctagccaggtgttcataaacagggatgcagtaagccctaaggaaaatggcaaagagaatggaggatggcccccctgtttgagggccttggcagcaactgccctgctagtacaagaagcaaataagctgactcttgggcaaaacctgaacataaaggcctcccgtgctgtggtgactttaatgaatactaaaggacatcattggctaacggatgccagactcaccaagtaccaaactttgctctgtgaaaatccccgtataaccactgaagtttgtaacaccctacaccctgccaccttgctcccggtatcagagagccctgtcgagcctgattgtgtagaagtgttggactcagttgactctagcagacctgacctccgggaccaggcttgggcatcagtagactgggaactatacgtggatgggagcagcttcttcaacccccaaggagagagaggtgcagggtatgcagtggtaaccctggacactgttgttgaagccagatcgttgccccaggccacttcagcccagaaagctgaactcgttgctttcattcgggccttagaactcagtgaggttgagactgtcaacatttacactgattctcgaggacaccagcgagcttccaccttgctgggtttggggaattcccgcgctgactcagaggctcgaaaagcagcatctgcccccttctgggcatcagtgctccctcaagcacctgatcttggacctacttcttctaaagaagaaaaggaccttctccagatttcgaccgccttacggatcggctcagacaacgggcctgtgtttttggctgccttggtacagaagacagcaaagatattaggaaaaaatgtcactggggatgtgaacagccctgcgatattgagagtagtatcatcccctccccccttgcatattgggaaacaacatcacagcaaaaaggaatgtagtaggagtcagggtgataataaggagaaggtcagcaacgaacatgtgagcaatagaatctatgtcatcatgaagttcacgggaaggttctatgactggacgtgtacgaaccttctgtcatggaaccagagattggagaccgtgggaacacatccaaatccacatctccgtgacaaggtggtgctgatttccagtggtcctccctggtgggggaatcacgtagctctgactctggagcgtgttgttgtgtttctctttcagtacgagcttgtctgtggccctgcagttcctcccttatga

SEQ ID NO: 3567 - DNA, 1821 bp, Homo sapiens
  SIMILAR (1608)..(1670): 471254mologous to Baboon endogenous virus strain M7 gag-pol precursor polyprotein,accession number D10032,Smith-Waterman Score= 43.
atgttgaaaaattttaagaagggatttaatggcgactatggggttactatgacaccagggaaacttagaactttgtgtgaaatagattggccaacattagaagtgggttggccatcagaaggaagcctggacaggtcccttgtttctaaggtatggcacaaggtaactggtaagtcaggacactcagaccagtttccatacatagacacttggttaccacagtgggtaagagggcaggcagcagcagtgctagtagcaaagggacagatagtcaaggaaggatcccgctccacccaccgagggaaatcaactcctgaagttctgttcgacccaacatcagacgatccattgcaggagatggcaaaagtcatcccagtggtgccctccccttaccagggagagaggctccccacttttgagtccacagtgcttgtgcctccgcaagacaaacatatccctaggccacccagagtagacaagagaggaggtgaagcctcaggagaaacccctcccttggcagctcgtttaagacccaaaacggggatacaaatgcccttgagagagcagcggtatactggaatagatgaggatgggcacatggcggagaggcgtgtttttgtgtgccagcccttcacctctgccgaccttctcaactggaaaaacaataccccgtcctgtactgaaaagccacaagctctaattgatttgctccaaactattatccagacccataaccccacttgggctgattgccaccagttgctcatgttcctctttaacacagatgaaaggcggagagtgctccaagcagcaactaagtggctaggggaacatgcaccggctgattaccaaaacccccaagagtatggaaaagaagaaagtccagcacaattctacgagagactgtgtgaggcctatcacatgtatactccctttgatcccgatagccctgaaaatcaacgcatgattaacatggctttagttagtcaaagcgcagaagacattagaagaaaactgcagaaacaggctgggtttgcagggatgaacacatcacaattattagaaatagctaaccaggtgtttgtaaacagggatgcagtaagccataccggtgctgaacattcggtagtaaccggcccagtcgcccccttatccaaaaagactattgacatcatcggagccatgggagtttcagcaaaacaagctttctgcttgccccggacttgtactcctgggaccaaggactacaggctggtacaggatttgcgcttggttaatcaggctacagtgactttacatccaacagtacctaacccgtacatattgctggggttgctgccagctgaggacagctggttcacctgcttggacctgaaagacgctttctttagcatcagattagcccctgagaggcagaagctgtttgcctttcagtgggaagatccggagtcaggtgtcactactcagtacacttggacctggcttccccaagggttcaagaactcccccaccatcttcggggaggcattggctcgagacctccagaagtttcccaccagagacctaggctgcgtgttgctccagtacgttgatgaccttttgctgggacaccccacggcagtcgggtgcgccaagagaacagatgctctactccggcacctggaggactgtgggtataaggtgtccaagaaaaaaagctcagatctgccaacagcaggtacgttacttgggatttactatccgtcggggagtgcagcctgggatcagaaagaaagcaggtcatttgtaatctaccggagcctaagaccagaaggcaggtga

SEQ ID NO: 3568 - DNA, 2466 bp, Homo sapiens
  SIMILAR (1888)..(2463): 721254mologous to Homo sapiens olfactory receptor,accession number Y10529,Smith-Waterman Score=733.
atggataaattcctcaacacatacaccctcccaagactaaaccaggaagaagttgaatctctgaatagaccaataacaggctctgaaattgtggcaataatcaatagcttacgaatcaaaaaaagtgcaggaccagatggattcacagccgaattctaccagaggtacaaggaggagctggtaccattccttctgaaactattccaatcaatagaaaaagagggaatcctccctaacgcattttatgaggccagcatcatcctgataccaaagcctggcagagacacaaccaaaaaagagaatttttggccaatatccttgatgaacattgatgcaaaaatcctcaataaaataccggcaaaccgaatccagcagcacatcaaaaagcttatccaccatgatcaattggacctatggcggcggcagctgtcactgggcctagcccaggatgtggacctggggactccccagaagggcaggagcgggaggctcacggagcgtcggcggaaggcacacaggatgctaaagctttacaaaggcctctcggaaggggaggcgttgggactccctgcggggcccgaccccctggaccccactgatctgaacggggcgcacttcgacccggaagtttacctggacaagctgcctagagagtgccctctggcccagctgatcgacagtgagacggacatggtgcagcagatccgggctctagacagcgacatgcaaaccctgacctcccagtgccaagtgtataagtgtgtccagaattggtgggttcttggtctcactgacttcaagaatgaagccgcggaccctcctggagtgaagctgcagaccttctcagtgagtgttacagctcataaaggcagtgtggacccaaacagtgagcagcaacaagatttattgcaaagagcaaaagaacaaagcttccacagtgtggaaggggaccccactgcagcaatcagagctgtccccccaaagaagcaagggaaggggggccctggaaaagaaactcagcttggctgtcagagtttgcagcataaccagtgtgcttattgtaaagaaataggacagtggaagaacaaatgccctcagctcaaaagaaaacaaggtgactcagagcaggaggccccggacaaggaggaaagggccctgctcatcctggtagaagggttgatgagcttttgctgggacaccccacggcagtcgggtgtgccaagggaacggattgccctacgccgacacctggaggactgtgggtataaggtgtccaagaagaaagctcagatctgccgacagcagttgactctagcagacctgacatccgggaccaagcttgggcatcagtacactgggaactatacgtgcatgggagcagcttcatcaacacctaaggagagagaggtgcagggtatgcgtgataacctggacactgttgttgaagccagatcgatgccccagggcacttcagcccagaaagctgaactcattgctttcattcgggccttagaactcagtgaggcccttgccaaaacggtgaggcagcgatgtgtcagctgccgacagcatcatgcgaggcaaggtccagccgttccacccggcatacaagcttatggagcagccccctttgaagatctccaggtagacttcacagagatgccaaagtgtggagatattaggaaaattgtcactggggatgtgaacacccctgcgatattgggagtagtatcatcctctcccccctcgcatattgggaacaatatcacagaggatccagaactgcagcccatcctggctggtctgtccctgtccatgtatctggtcacggtgctgaggaacctgctcatcatcctggctgtcagctctgacccccacctccacacccccatgtgcttcttcctctccaacctgtgctgggctgacatcggtttcaccttggccacggttcctaagatgattgtggacatgcagtctcataccagagtcatctcttatgagggctgcctgacacggatatctttcttggtcctttttgcatgtatagaagacatgctcctgactgtgatggcctatgactgctttgtagccatctgtcgccctctgcactacccagtcatcgtgaatcctcacctctgtgtcttcttccttttggtatactttttccttagcttgttggattcccagctgcacagttggattgtgttacaattcaccatcatcaagaatgtggaaatctctaattttgtctgtgacccctctcaacttctcaaacttgcctgttctgacagcgtcatcaatagcatattcatgtatttccatagtactatgtttggttttcttcccatttcagggatccttttgtcttactataaaatcgtcccctccattctaaggatttcatcatcagatgggaagtataaagccttctccacctgtggctctcacttggcagttgtttgctga

SEQ ID NO: 3569 - DNA, 1830 bp, Homo sapiens
  SIMILAR (67)..(360): 841254mologous to Homo sapiens Human G-protein coupled receptor GRIR-1,accession number Y28279,Smith-Waterman Score=426.
atggtgttggagaaacttgatttccacatgcagaagaatgaaggtggaccctatgtcacaccaggcaaaaggtgtccaaactctacagacccacagaatgtaacggatgtctctcgattcctcctcctcaaactctcagaggatccagaactgcagccggtccttgctgggctgttcctgtccatgtgcctggtcacggtgctggggaacctgctcatcatcctggccgtcagccctgactcccacctccacacttccatgtacttcttcctctccaacctgtccttgcctgacatcggtttcccctcccccacggtccccaagatggttgtggacatccaatctcacagcaattatattctgatcaatatcaccggctgggtgtacacctactgcgatattgaacgtaatatcatgctctctccctccctggacattagaagcaataacacagctcgtttacgacccaaaacggggacacaaatgcccctgagagagcagcggtatactgggatagataaggatggtcacttggtggagaggcgtgcttttggctaccagcccatcacctgcgtcaaccttctcaactggaaaaacaatacacagaactataccgaaaagccacaagccctaattgattttctccaagctgttatccagacccacaaccccaccttggctgattggcaccagttgctcatgttcctctttaacagcgaagaaaggcggagagtcctccaagcagtaactaagtggctagaagaacatgcaccagctgattatcaaaacccccaagagtatggaaggacccaggaatcagtagactgggaactatacgtggatgggagtagcttcttcaacccccaaggagagagaggtgcagggtatgcagtgataaccctggacactgttgatgaagacagatcattgccccaggccacgtcagcccagaaagctgaactcattgctttcattcgggccttagaactcagtgagggtgagactgtcaacatttacactgattctcggggacaccagcaagcttccaccttggtgggcttggggaattcccgcgctgactcagaggctcgaaaagcagcatctgcccccttcggggcatcagtgctccctcaagcacctgatcttggacctacttcttctaaagaagaaaaggactttctccagatattaggaaaaaatgtccctggggatgtgaacagccctgcgatattgagagtagtatcatcctctccccttgcatactgggaaaaatatcacagattatatttggatcaatatcaccggtgggtgtacacgtactgcgatattgaacgtaatatcatgctctctctctccctggacattaggagcaatatcacagctcgtttgagacgcaaaacggggacacaaatgcccctgagagagcagcggtatactgggatagatgaggatggtcacgtggtggagaggcgtgcttttggctaccagcccttcacctgtgtcgaccttctcaactggaaaaacaatacaccgccctataccgaaaagccacaagccctaattgattttctccaagctgttatccagacccacagccccaccttggctgattggcaccagttgctcgtgttcctctttaacagcgaagaaaggcggagagtcctccaagcagcaactaagtggctagaggaacatgcaccagctgattatcaaaacccccaagagcatggaaggacccagttgccaggaacagacccccatttggacccacatgaaagagaggatatgcaaaggctaaatgagacagggaagctctcttggaaggattaa

SEQ ID NO: 3570 - DNA, 459 bp, Homo sapiens
  SIMILAR (287)..(457): 361254mologous to Reticuloendotheliosis virus C end of pol protein (reverse transcriptase),accession number X01455,Smith- Waterman Score=89.
atggaggaaggatggagagtagctgcgccacagctgctaggagctgcagttgtactggctgtgcaagaaaccacctatcgaggtcaggagtcactggaaaagttgttaggccggtatttctacatctcgcgtttctcagcccttgccaaaacggtgaggcagcggtgtgttacctgccgacagcataaagcgaggcaaggtccagccgttccacccggcatacaagcttatggagcagcccccttagaagatctccaggtagacttcacagagatgccaaagtgtggagaagacggcaaaggaattggggatcacacggaaattgcctgctgcctcccggcctcagagttccggaaaggtggaggggatgaatcggactatcaaaatagtattattgtcttccgcgatggatatgtaaaacaacaccacgaggggcgtcaaaccacctgctacatttga

SEQ ID NO: 3571 - DNA, 476 bp, Homo sapiens
  SIMILAR (90)..(374): 381254mologous to Baboon endogenous virus strain M7 gag-pol precursor polyprotein,accession number D10032,Smith-Waterman Score= 179.
ctcctttacggcccaaaacggggatacaaatgtccccgagagaacagcggtatactgggatagatgaggatggtcacgtggtggagaggcgtgtttttggctaccagcccttcacctccgtcgaccttctcaactggaaaagcaatacaccgccctataccgaaaagccacaagccctaattgatttgctccaaactgttatccagacccacaaccacacctgggctgattggcaccagttgctcatgttcctctttaacagcgaagaaaggcggagagtcctccaagcagcaactaagtggctggaggaacatgcaccagctgattaccaaaacccccaagagtatgttgatgaccttctgctgggacaccccacggcagtcgggtgcaccaagggaacagatgccctacaccggcacctggaggactgtgggtataaggtgtccaagaagaaagctcagatctgccgacagcag

SEQ ID NO: 3572 - DNA, 279 bp, Homo sapiens
  SIMILAR (1)..(189): 471254mologous to Murine leukemia virus pol,accession number M93052,Smith-Waterman Score=132.
ccttgggcatcagtagactgggaactatacgtggatgggaacagcttcttcaacccccaaggagagagaggtgcagggtgtgcagtggtaaccctggacactgttgttgaagccagatcgttgccccaggccactgcagcccagaaagctgaactcattgctttcattggggccttagaactcagtgaagatctgattcctagatttcgactgcccttacggatcggctcacataacgggcctgcgtttttggctgccatggtacagaagacggcaaag

SEQ ID NO: 3573 - DNA, 500 bp, Homo sapiens
  SIMILAR (68)..(430): 371254mologous to Feline leukemia virus gag-pol precursor polyprotein gPr80,accession number M18247,Smith-Waterman Score=145.
acccacaaccccacctgggctgatcgccaccggttgctcatattcctctttaagagagatgaaaggtgaaaggcggagagggctccacgtagcaactaagtggttagaggaacatgcaccagctgattatcaaaacccccaagagtgtggaaggacccagtcaccaggaacccacttccagttggacccacatgaaagagaggatatgcaaaggctaaaccgagacagggaagctctcttggaaggattcaagaggggagctcggaaggccacaaacgttaacaaggtctctgaggtcattcagggaaaagaagaaagtccagcacaattctaccagagactgtgtgaggcttatgagagccctgtccaggctgattgtgtagaagtgttggactcaattgactctagcagacctgacctccaggaccagccttgggcatcagtagactgggaactatacgtggatgggagcagcttcttcaacgcccaaggaaagagag

SEQ ID NO: 3574 - DNA, 509 bp, Homo sapiens
  SIMILAR (104)..(3): 911254mologous to Homo sapiens similar to UNC-93; similar to U89424 (PID:g3642687),accession number AC004923,Smith-Waterman Score=175.
cccaggtacacagtgaagatggccacagcctgccaccagtggtagatggtgaagatgaagtcctgtctctccttgtcttcgtacaagactcccaggagtgctgcaggcaggcagtacagggcaggcaggggagaggtgtcacctggggcctggggctgccgagctaccatctacgaactttactaagccctgtatgtgtcccagcccgggaccagagagcgcctagaaagtgctgtgaggcggtcctggcctgccccctggtggagaccctggtcaccacactgctcacacgctaagcagaagtaggagcaggtgcgccgggctgtgtggctgcaggtggtcccgctccgcaccacatgcgtggcctcaaaagaagaaagctctgtgcttagtcatgtcctgtccccaaccccaggtgtacagtgccaagcttgcaggcgctgtttctcctcctcagccgggactagagagatcgaactgtttgcagctgccaactctgcaaatcaaac

SEQ ID NO: 3575 - DNA, 780 bp, Homo sapiens
  SIMILAR (514)..(777): 851254mologous to Cloning vector pEH1 lac repressor,accession number AJ007659,Smith-Waterman Score=355.
atggaggaaggatggattcggttaccagatgggagagtagctgcgccacagctgctgggagctgcagttgtactggctgtgcaagaaaccacccatcgaggtcaggagtcactggaaaagttgttaggccggtatttctacatctcacctttgtcagcccttgccaaaacggtgaggcagcgggattttgccgatttcggaaccaccatcaaacaggattttcgcctgctggggcaaaccagcgtggaccgcttgctgcaactctctcagggccaggcggtgaagggcaatcagctgttgcccgtctcactgacttcccagtgccaagtgtataagtgtgtctggaattggtgggttcttggtctcactgacttcaagaatgaagccacggaccctcctggagtgaagctgcagaccttcttggtgagtgttacaactcataaaggcagtgtggacccaaacagtgagaagcaacaagatttattgcaaagagcgaaagaacaaagcttccacagtgtggaaggggaccccagcagggattttgccgatttcggaaccaccatcaaacaggattttcgcctgctggggcaaaccagcgtggaccgcttgctgcaactctctcagggccaggcggtgaagggcaatcagctgttgcccgtctcactggtgaaaagaaaaaccaccctggcgcccaatacgcaaaccgcctctccccgcgcgttggccgattcattaatgcagctggcacgacaggtttcccgactggaaagcgggcagtga

SEQ ID NO: 3576 - DNA, 721 bp, Homo sapiens
  SIMILAR (364)..(645): 511254mologous to Feline leukemia virus gag-pol precursor polyprotein gPr80,accession number AF052723,Smith-Waterman Score= 237.
atgaggggagctcagaaggccacaaacgttaacaagctctctgaggtcattcagggtaaagaagaaagtccagcacaattctaccagagactgtgtgaggtctatcgtatgtatactccctgtgatcccgatagccctgaaaatcagcacatgattcacatggctttagtccgtcaaagcccagaagacatgagaagaaaactgcagaaacaggctgggcttgcagggatgaatccatcccaattactagaaatagctagccaggtgtttgtaaacagggatgcagtaagccgtaaggaaaacggcaaagagaatggaggtcaggcccggcgatatgccgacctgtttagccctgtcgagcctgattgtgtagaagtgttggactcaattcactctagcagacctgacctccgggaccagccttggccatcaggagactgggaactatatgtggatgggagcagcttcttcaacccccaaggagagagaggtgcagggtatgcagtgataaccctggacactgttgttgaagccacatcgttgccccaggccacttcaggccagaaagctgaactcattgctttcattggggccttagaactcagtgagggtgagactgtcaacatttacactgattctcgccatggcactgaagagggacagcaaatcttgaagcagccggtgtcagagagactggactttgtgtgcagttttctgcaga

SEQ ID NO: 3577 - DNA, 1899 bp, Homo sapiens
  SIMILAR (1429)..(1893): 561254mologous to Homo sapiens Human G-protein coupled receptor GRIR-1,accession number Y28279,Smith-Waterman Score=393.
atgcaagccatcagtgcattcggcgagggaagggtaaagagccacttttattgggaaaaagagatttacataagctgcttagaaacagagttcattggttcccgaggtcgaagccagagttgtcgtcagtgctttggtggagacgccagtgctgggcgaatgttcttccgagagcgccttatctgcgttgctgcagtcctgcagaatgtcgagtggatcatgggaacaatatccctgggggattatattctgatcaatatcaccggctgggtgtacacctactgcgatattgaacgtaatatcatgctctctccctccctggacattagaagcaataacacagctcgtttacgacccaaaacggggacacaaatgcccctgagagagcagcggtatactgggatagataaggatggtcacttggtggagaggcgtgcttttggctaccagcccatcacctgcgtcaaccttctcaactggaaaaacaatacacagaactataccgaaaagccacaagccctaattgattttctccaagctgttatccagacccacaaccccaccttggctgattggcaccagttgctcatgttcctctttaacagcgaagaaaggcggagagtcctccaagcagtaactaagtggctagaagaacatgcaccagctgattatcaaaacccccaagagtatggaaggacccaggaatcagtagactgggaactatacgtggatgggagtagcttcttcaacccccaaggagagagaggtgcagggtatgcagtgataaccctggacactgttgatgaagacagatcattgccccaggccacgtcagcccagaaagctgaactcattgctttcattcgggccttagaactcagtgagggtgagactgtcaacatttacactgattctcggggacaccagcaagcttccaccttggtgggcttggggaattcccgcgctgactcagaggctcgaaaagcagcatctgcccccttcggggcatcagtgctccctcaagcacctgatcttggacctacttcttctaaagaagaaaaggactttctccagcctcagaaggtccaggcgagaagctggcttctggctgcatctgccccagtgtcctctgaggcattcggatggggcgatgactataaaaaccacgtgaaatgcataagtgaagatcagaagtatggtggcaaaggctatgaaggtaaaacccacaaaggcgacatcaaacagcaggcgtggattcagaattggatgaagaacagtttaaaagttcataatgaatccattctggaccaggtgtggaatatcttttctgaagcttccaacagcccacttagttgctgcttggaggactctccgcctttcttcgctgttaaagaggaacacgagcaactggtgccaatcagccaaggcaaaaggtgtccaaactctacagacccacagaatgtaacggatgtctctcgattcctcctcctcaaactctcagaggatccagaactgcagccggtccttgctgggctgttcctgtccatgtgcctggtcacggtgctggggaacctgctcatcatcctggccgtcagccctgactcccacctccacacttccatgtacttcttcctctccaacctgtccttgcctgacatcggtttcccctcccccacggtccccaagatgggtgttatcgtcttccgcgcatttccccttgcgctggacctgtgcgctattggattcgaggttcctacggtcatacatgcggtggtaaatggtggagcctctcatgactccgaatctcagaattgcatcatcgtaaaaagccttcatggaatccggaaccttgccattattggaagttcactttgtgcctttgtaacttatctgttgtag

SEQ ID NO: 3578 - DNA, 1420 bp, Homo sapiens
  SIMILAR (506)..(898): 451254mologous to Feline leukemia virus gag-pol precursor polyprotein gPr80,accession number AF052723,Smith-Waterman Score= 282.
tgaagaaaggcggagagtcctccaagcaggaactaagtggctagaggaacatgcactagctgattatcaaaacccccaagaatatggaaggacccagttgccaggaaccgacccccagttggacccacatgaaagagaggagatgcaaaggctaaaccgagacagggaagctctcttggaaggattaatgaggggagctcagaaggccacaaacgttaacaagctctctgaggtcattcagggaaaagaagaaagtccagcacaattctacgagagactgtgtgaggcctatcgtatgtatactccctttgatcccgatagccctgaaaatcagcacatgattcacatggctttagtccgtcaaagcgcagaagacatgagaagaaaactgcagaaacaggctgggcttgcagggatgaatccatcacaattactagaaatagctagccaggtgttcataaacagggatgcagtaagccctaaggaaaatggcaaagagaatggaggatggcccccctgtttgagggccttggcagcaactgccctgctagtacaagaagcaaataagctgactcttgggcaaaacctgaacataaaggcctcccgtgctgtggtgactttaatgaatactaaaggacatcattggctaacggatgccagactcaccaagtaccaaactttgctctgtgaaaatccccgtataaccactgaagtttgtaacaccctacaccctgccaccttgctcccggtatcagagagccctgtcgagcctgattgtgtagaagtgttggactcagttgactctagcagacctgacctccgggaccaggcttgggcatcagtagactgggaactatacgtggatgggagcagcttcttcaacccccaaggagagagaggttgcagtaaaaacaggggtaccataagcaaccacctctttcctcaacgatgtgatgaaagcaaaagccaagtatcttcatgtatccaacgtaaaaatataaaaagttacccccgtcggctgcagttggagctatggcggcggcagctgtcactgggcctagcccggggtgtggacctggggactccccagaagggcccgagggggaggctcacggagcgtcggcggaaggcacacaggatgttaaagctttacaacggcctctcggaaggggaggcggtgagactcctcgcggggaccgaccccctggaccccactgatctgaacggggcacacttcaacccggaagtttacctagacaagctgcctagagagtgccctctggcccagctgatggacagtgagacggacatggtgcagcagatccgggctctagacagcgacatgcaaaccctggtctatgagaactacgataagttcatccccgccacagaaattgacaaacagcataaaactgtatga

SEQ ID NO: 3579 - DNA, 720 bp, Homo sapiens
  SIMILAR (492)..(569): 731254mologous to Baboon endogenous virus strain M7 gag-pol precursor polyprotein,accession number D10032,Smith-Waterman Score= 90.
ctgcagcaatcagagctgtccccccaaagaagcaagggaaggggggccctggaaaagaaactcagcttggctgtcagagtttgcagcataaccagtgtgcttattgtaaagaaataggacagtggaagaacaaatgccctcagctcaaaagaaaacaaggtgactcagagcaggaggccccggacaaggaggaaagggccctgctcatcctggtagaagggttgatgagcttttgctgggacaccccacggcagtcgggtgtgccaagggaacggattgccctacgccgacacctggaggactgtgggtataaggtgtccaagaagaaagctcagatctgccgacagcagttgactctagcagacctgacatccgggaccaagcttgggcatcagtacactgggaactatacgtgcatgggagcagcttcatcaacacctaaggagagagaggtgcagggtatgcgtgataacctggacactgttgttgaagccagatcgatgccccagggcacttcagcccagaaagctgaactcattgctttcattcgggccttagaactcagtgaggcccttgccaaaacggtgaggcagcgatgtgtcagctgccgacagcatcatgcgaggcaaggtccagccgttccacccggcatacaagcttatggagcagccccctttgaagatctccaggtagacttcacagagatgccaaagtgtggag

SEQ ID NO: 3580 - DNA, 1032 bp, Homo sapiens
  SIMILAR (19)..(315): 601254mologous to Homo sapiens myosin light chain kinase isoform 3A,accession number AF069602,Smith-Waterman Score=261.
atgggctcctgcatggcccgagcctccccaatgggcgccaccccctgctttgcggcggtgggtcccatcgactgccaggctgaggagtgccggcacacagtgtgggactggtgggtagctttgcctaccgccgctgtgggggatccaatagggcagcccatccagtatgctcgctccacctgcgaggccggcgtgggtgagctccacatccaggatgccctgccggaggaccatggcacctacacctgcctggctgagaatgccttggggcaggtgtcctgtagcgcccgggtcaccgtccgtgagggcacgtcccctggcccaaaggggaagactggccactgtgggctgggcagtgtcagtcccttagggatgaaggaactggcactgatggagaatgtggccgagcctggctccgtgaagctctctgccaggactgtccaggtccagccctctcttgcccttagtgtggcaccaggccatggtggggagcatggatgtggagccagcggcctgggtgttgatgaccttctgctgggacaccccacggcagtcgggtgtgccacgggaacggatgccccacaccggcacctggaggactgtgggtataaggtgtccaaaaaaaaagctcagatctgccaacagcagcatgatgcgaggcaaggtccagccgttccgcccggcatacaagcttatggagcagccccctttgaagatctccaggtagacttcagagagatgccaaagtgtggaggtaacaagtatgtactagttcttgggcgtacctactctgggtgggtggaggcctatccaacacgaactgagaaaactcgtgaagtaacccctgtccttcttcgagatctgattcgtagatttcgaccgcccttatggatcggctcagacaacgggcctgcatttttggctgccttggtacagaagacggcaaagggtattcagaacaatattacaggaggggtgtacaccctctgcgatattgacagtcatatcatcctctttcgctctggatattag

SEQ ID NO: 3581 - DNA, 1761 bp, Homo sapiens
  SIMILAR (1273)..(1698): 461254mologous to Baboon endogenous virus strain M7 gag-pol precursor polyprotein,accession number D10032,Smith-Waterman Score= 285.
atgaagatccgcagaaggttcccctccagccttcagctcagtgctgatctgcaagtacctgtgaggaaagcaccgaggcagggagtgagccaggagaaaagaacaaaaccatccctggagctcatgatatcaggaacaatatcgcaggaggatataaggaacaatgtcacaagggggtgtacaccccctgcgatacagagggtaatatcttcctctcccctgctggctattaggaacaatgtcacggaaggggtgtacaccccctgcgatactggggggcgtgtacacctacctgtgatattgctcctaatatccagggatggagggcatgatattagttttaatatcgcagtagatgtacactcaccctgtgacactgatcctaatatccagggggtagagtatgacatgactcccaacatagcaatgaatgtacagccacccggaacaatatcacagaagaggtgtacactccctgcgatattgggattaatatcgtacgcttcttccgtgaatattaggagcaatatcaccgggtggctgtacattgatcgctatgttggcagtcatgtcatactctacccgctgggtattaggatgggtgtcacaggagagatgaaaggcgaaaggcggagagggctccacgcagcaactaagtggctagaggaacatgcaccagctgattatcaaaacccccaagagtatggaaggacccagttaccaggaacccagccccagttggacccacatgaaagagaggatatgcaaaggctaaaccgagacagggaagctctcttggaaggattcaagaggggagctcagaaggccacaaacgttaacaaggtctctgaggtcattcagggaaaagaagaaagtccagcacaattccaccagagactgtgtgaggcctgtgctaagcaggtgttggtaaacggggacgcagtaagccgcgaggaaaagcgcaaagagaatgaacgtcaggcccggcgaaacgccgacctgttggttagctgcagcaatcagagcggtccccccaaagaagcaagggaagagctatggaccaaggactacaggccgggacaggatttgcgcttgcttagtcaagctaccctgactttccatccaacagtacctagcccgtccacattgttggggttgctgccagctgaggacagctggttcacctgcttggacctgaaagacgctttctttcctatcagatcagcccctgagagccagaagctgtttgcctttcagtgggaagatccggagtcagcccttgccaaaacggtgaggcagcgttgtgtcagctgccgacagcatcatgcgaggcaaggtccagccgttccgcccggcatacaagcttatggagcagccgcctttgaagatctccaggtagacttcacagagatgccagagtgtggagggaataagtatttaccagttcttgggcgtacctactctgggtgggtggagacctatccaacaagagctgagaaagctcgtgaagtaacccgtgtgcttcttcgagatctgattcctagattggaactgcccttccggatcggctcagataacgggcctgcgtttgtggctgacttgctacagaagacggcaacggtattggggatcacacggaaactgcatgccgcctcccggcctcagagttccggaaagggtattcagaacaataggacaggaggggtgtacaccccctgtgatattgagagtcatgtcatcctctttcgctctggatattag

SEQ ID NO: 3582 - DNA, 831 bp, Homo sapiens
  SIMILAR (2)..(613): 371254mologous to Sus scrofa pol protein,accession number AF038600,Smith-Waterman Score=321.
agggtatgcagtgataactctggacactgttgttgaaaccaggtcgttgccctaggccacttcagcccagaaagctgaactcaatgctttcatttgggccttagaactcagtgagggtgagactgtcaacacttacactgattctcggtatgtctttttaacccttcaagtgcatggagtgtgatagaaagaaaagggcctattgaattctggggggaaagacagaaaatatccacaagaaatcttgcaatgattagaagcagtacggaaaccccacaaggtggcagttaggcattgcagaggacaccagcgagcttccaccttgctgtgtttggggaattcccgcgctgagtcagaggctcgaaaagcagcaactgcccccttccgggcatcagtcacagcccccatgctccctcaagcacctgatcttgtacctacttattctaaagaagaaaaggactttctccaggcagagagaggacaagtgatggaggaaggatgaattcggtaaccggatgggagagtagctgtgccacagctgctaggagctgcagttgtactggctgtgcaagaaaccacccatcgagatcaggagtcactggaaaagttgttaggctggtatttctacatctcacttctgtcagcccttgccaaaacgatttcgaccgccttacggatcggctcagacaacgggcctgtgtttttggctgccttggtacagaagacagcaaagatattaggaaaaaatgtcactggggatgtgaacagccctgcgatattgagagtagtatcatcccctccccccttgcatattgggaaacaacatcacag

SEQ ID NO: 3583 - DNA, 2379 bp, Homo sapiens
  SIMILAR (1801)..(2376): 691254mologous to Homo sapiens olfactory receptor,accession number Y10529,Smith-Waterman Score=702.
atgaggggagctcagaaggccacaaacgttaacaagctctctgaggacattcagggtaaagaagaaagtccaacacaattctacgagagactgtgggaggcctatcgtatgtatactccctttgatcctgatagccctgaaaatcagcgcatgattcccatggctttagtccgtcaaagcgcagaagacatgagaagaaaactgcagaaacaggctgggcttgcagggatgaatccatcccaattactagaaatagctagccaggtgtttgtaaacagggatgcagtaagccgtaaggaaaacggcaaagagaatggaggtcaggcccggcgatatgccgacctgttttcacggaccaagaactaccagccggtacaggatttgcgcttgcttcatcaagctaaactgactttccatccaacagtacctaacccgtccacattgttggggttcccgccagctgaggacagctggttcacctgcttggacctgaaagatgctttctttcctatcagattagcccctgagaggcagaagctgtttgcctttcagtgggaagatccggagtcaggatggcccccctgttggagggccttggcagcaactgccctgctagtacaagaagcaaataagctgactcttgggcaaaaactgaacattaaggcctcccgtgctgtcgtgactttaatgaatactaaaggacatcattggctaacgaatgccacactcaccgactaccagactttgctctgtgaaaatccccgtataaccattgaagtttgtaacaccctccaccccgccaccttgctcccggtatcaaagagccctgtcaagcctggttgtgtagaagtgttggactcaattgactctagcagacctgacctctgggaccagccttgggcatcagtagactgggaactatacttggatgggagcagcttcttcaacccccaaggagaggtggagggtatgcaggggggacaccagcgagcttccaccttgctgggtttgcggaattcccgcgctgactcagaggctcgaaaagcagcatcttcccccttctgggcatcagggctccctcaagcacctgatctgggacctacttcttctaacgaagaaaaggactttctccagcatgatatgaggcaaggtctagctgttctgcccggcataagagcttctggagcagccccctttgaaggtctccaagtggacttcacagagatgtcaaaatgtggaggtaacaagtatgtagtagttcttgggcatacctactctgggtgggaggaggcctatcaaacacgaacagagaaatctcgtgaagtaacccctgtgcttcttcgtgatctgattcctagatttcgacggcctttagggatcggctcagacaacgggcctgcgtttttggttgccttggtacagaagacggcaaaggaagattttcacaggggtgtgttcaccccctgcgatattgggagtaagatcatcctctccacccaggaaatgactaacaaggtcatggggatgtgtactccgcctgcgattttgggagtaatgtcatcctccccaaacctggatgttagcaaccagatcacaaaggggttgtacacaccctgcgacattggatgtaatatgatcctctcccgacctggatacagagaaagataccacaccgcggaggatccagaactgcagccgctcctcgctttgctgtccctgtccctgtccatgcatctggtcatggtgctgaggaacctgctcaacatcctggctgtcagctctgactcccccctccacacccccacgtacttcttcctctccaacctgtgctgggctgacatcggtttcacctcggccacggttcccaatatgattgtggacatgcagtcgcatagcagagtcatctctcatgcggactgcctgacacagatttccttcttgctcctttttgcatgtatagaaggcatgctcctgactgtgatgacctatgactgctttgtagccatctgttgccctctgcactacccagtcatcgtgaatcctcacctctgtgtcttcttcgttttggtgtcctttttccttagcctgttggattcccagctgcacagttggattgtgttacaattcaccatcatcaagaatgtggaaatctctaattctgtctgtgacccctctcaacttctcaaacttgcttgttctgacagcgtcatcaatagcatattcatgcatttccataatactatgtttggttttcttcccatttcagggatccttgtgtcttactataaaatcgtcccctccattcttaggatttcatcgtcagatgggaagtataaagccttctccacctgtggctctcacctagcagttgtttgctga

SEQ ID NO: 3584 - DNA, 2692 bp, Homo sapiens
  SIMILAR (2009)..(2686): 701254mologous to Homo sapiens olfactory receptor,accession number Y10529,Smith-Waterman Score=825.
atggtgtcagacatccggaaagaagacgggatgaatgttttacctctgaagtacatcccaaatgtgggagttaacttcagctttgctggggtctatttggccagtgaaactctgcctggttccttcgcacatccggaagccacttcacggggggccgtcgcaactggaaccacacacttggcatcggcggttgagccaaatggggactcgtggtgcaagcaacgctccccacgtgttagcgtgcattatattcggatcaatatcaccggctgggtgtgcacctgctgcgatattgaacgtaatatcatgctctctccctccctgaacattaggaacaatatcacagctcgtttacgacccaaaacggggacacaaatgcccctgagagagcagcggtatactgggatagatgaaaatgctcatgtagtggagagacgtgtttttgggtaccagcccttcacctgcgtcgaccttctcaactggaaaaacaatacatcgccctataccgaaaagccacaagccctaattgatttgctccaaactgttatccagacccacaaccacacctggaccgattggcaccagttgctcattttcctctttaacagtgaagaaaggcagagagtcctccaagcagcaactaagtggctagaggaacatgcaccagctgattatcaaaaccccgaacagtatggaaggacccagttgccaggaaccgacccccagttggacccacatgaaagagaggagatgcaaaggctaaaccgagacagggaagctctcttggaaggattaatgaggggagctcagaaggccacaaacgttaacaagctctctgaggtcattcagggaaaagaagaaagtccagcacaattctacgagagactgtatgaggcctatcatatgtatactccctttgatcccgatagccctgaaaatcagcgcatgattcacatggctttagtccatcaaagtgcagaagacatgagaagaaaactgcagaaacagactgggcttgcagggaagaatccatcccaattactagaaatagctagccaggtgtttgtaaacaggtatgcagtaagccgtaaggaaaacggcaaagagaatggaggtcaggcccggccacacgccgacctgtttgtcagctgcagcaatcagaggggcccccgcaaagaggcaagggaaagggggccctgggaaagaaactcagcttggctgtcagagtttgcagcgttgatgaccttctgctgggacaccccacggcagtcgggtgtgccaagggaacagttgtcctacactggcacctggaggactgtgggtatcagttgtccaagaagaaagctcagatctgccgacagcagactgggtctctaaaggatggcccccctgttggagggccttggcagcaactgccctgccagtacaagaagcaaataagctgactcttgggcgaaacctgaacataaaggcctcccgtgctgtggtgatgaatactaaaggacgtcattggctaacgaatgccaggctcaccaagtaccaaactttggtctgtgaaaatccccgtataaccattgaagtttgtaacaccctacaccccgccaccttgctgccggtatcagggagccctgtcgagcctgattgtgtagaagtgttggactcaattgactctagcagacctgagctccgggaccagacttgggcatcagtagactgggagccacacgtggatgggagcagcttcttcaacccccaaggagagagaggtgcagggtatgcagtgataactctggacactgttgttgaaaccaggtcgttgccccaggccacttcagcccagaaagctgaacttaatgctttcatttgggccttagaactcagtgaggaggatccagaactgcagccggccctcgctttgctgtccctgtccctgtccatgtatctggtcacggtgctgaggaacctgttcagcatcctggctgtcagctctgactgccccctccacacccccatgtacttcttcctctccaacctgtgctggcctgacatcggtttcacctcggccatggttcccaagatgattgtggacacgcagtcgcatagcagagtcatctctcatgcgggctgcctgacacagatgtctttcctgctccttgttgcatgtatagaaggcatgctcctgactgtgatggcctatgactgctttgtagccatctgtcgccctctgcactacccagtcatcgtgaatcctcacctctgtgtcttcttcgttttggtgtcctttttccttagcctgttggattcccagctgcacagttggattgtgttacaattaaccatcatcaagaatgtggaaatctctaatttggtctgtgacccctctcaacttctcaaacttgcctgttctgacagtgtcatcaataacatattcatatatttcgatagtactatgtttggttttcttcccatttcagggatctttttgtcttactataaaattgtcccctccattctaaggatttcatcgtcagatgggaagtataaagccttctccacctgtggctgtcatctagcagttgtttgctggttttatggaacaggcattggcatgtacctgacttcagctgtgtcaccaccccccaggaatggtgtggtggcatcagtgatgtacgctgtggtcaccccatgctga

SEQ ID NO: 3585 - DNA, 1390 bp, Homo sapiens
  SIMILAR (1173)..(1364): 501254mologous to Murine leukemia virus pol polypeptide,accession number AF019230,Smith-Waterman Score=156.
atgacagttgggggtaaagacattgattttcttgtagataccagtgctgaacattcggtagtaactgcctcagtcgcccccttatccaaaaagactattgacatcatcggagccatgggagtttcagcaaaacaagctttctgcttgccccagacttgtactataggaggacataaagtgattcatcagtttttgtacatgcctgattgtcccttgcccttgttgggaagagacttgcttagcaaactgagagccactatctcttttacagagcacggctctttgctgctaaagttacccggaacaggagtcattatgacccttatgctcccccgagaggaggaatggagacttttcttaacagagccgggccaagagataagaccagctctggctaagcggtggccaagagtgtgggcggaagacaaccctccagggttggcagtcaaccaagcccccgtgcttatagaagttaagcctggggtccagccggttaggcaaaaacagtacccggtcctcagagaagctcttgaaggtatccaggtccatctcaagtgcctaagaacctttagaattatagttccttgtcagtctccatggaacactcccctcctgcctgttcccaagcctgggaccaaggactacaggccggtacaggatttgcgcttggttaatcaggctacagtgactttacatccaacagtacctaacctgtacacattgctggggttgctgccagctgaggacagctggttcacctgcttggacctgaaagatgctttctttagcatcagattagcccctgagagacagaagctgtttgcctttcagtgggaagatccagagtcaggtgtcactactcaatacacttggacccagcttccccaaaggttcaagaactcccccaccatctttggggaggcgttggctcgagacctccagaagtttcccaccagagacctaggctgcgtgttgctccagtacgttgatgaccttttgctgggacaccccacggcagtcgggtgcgccaagggaacagatgctctactccggcacctggaggactgtgggtataaggtgtccaagaaaaaaagctcagatctgccgacagcaggtatgttacttgggatttactatccaacaggggctcgagacgcagcccaggatcagaaagaaagcaggtcatttgccatctagcagatcctaagagctgaagacagttgagagaattcttaggagctgtggggttttgtagactgtggatcccaaactttgcagtattagccaagactttgtatgcggtcaccaagggggcggggaccgcgaacctttggaatgcagatcccaacaacagcaagtctttcatgagttaaaggaaaaacttctggca

SEQ ID NO: 3586 - DNA, 1863 bp, Homo sapiens
  SIMILAR (1201)..(1860): 701254mologous to Homo sapiens olfactory receptor,accession number Y10529,Smith-Waterman Score=795.
atgggccagggcgtgaaacgagggtggcagtacagaaagaatccaaggaaaaatcggggagcaatatcactccccacgacccgccttagatatgacgaagcacatcgcagggggcccttcacctgcgtcgaccttctcaactggaaaaacaatacaccgccctataccgaaaagccacaatccctaattgatttgctccaagctgttatccagacccacaaccacacctgggctgattggcaccagttgctcatgttcctctttaactgcgaagaaaggcggagagtcctccaagcagcaactaagtggctagaggaacatgcaccaactgagtatcaaaacccccaagactatggaaggacccagttgccaggaaccgacccccagttggacccacatggaagagaggatatgccaaggctaaaccgagacagggaagctctcttggaaggattaatgaggggagctcagaaggccacaaatgttaacaagctctctgaggtcattcagggagaagaagaaagtccagcacaattctacgagagactgtgggaggcctatcgtatgtatactccctttgatcccgatagccctgaaaatcagcgcatgattcccatggctttagtccgtcaaaccccggaagaaatcacaggaaaactgcagaaacaggctgggcttgcagggatgaatccatccccaattactacaaatagctggccagaagcttatggagcagccccctttgaaggtctccaggtggacttcacagagatgccaaagtgtggaggtaacaagtgtgtactagttcttgggcgtacctactctgggtgggtggaggcctatccaacacgaactgagaaagctcgtgaagtaacccctgtgcttcttcgagatgtgattcctagatttcaaccgcccttacagatcggctcagaaaatgggcctgcgtttttggctgccttggtacagaagacggcaaagatattaggaaaaaatgtcactggggatgtgaacagccctgcgatattgagagtagtatcatcctctccccccttgcatattgggaacaacatcacagaggatccagaactgcagtcggtcctcgctttgctgtccctgtccctgtccctgaatctggtcacggtgctgaggaacctgctcagcatcctggctgtcagctctgactcccccctccacacccccatgtacttcttcctctccaacctgtgctgggctgacatcggtctcacctcggccacggttcccaaggtgattctggatatgcagtcgcatagcagagtcatctctcatgtgggctgcctgacacagatgtctttcttggtcctttttgcatgtatagaaggcatgctcctgactgtgatggcctatggctgctttgtagccatctgtcgccctctgcactacccagtcatagtgaatcctcacctctgtgtcttcttcgttttggtgtcctttttccttaacctgttggattcccagctgcacagttggattgtgttacaattcaccatcatcaagaatgtggaaatctctaattttttctgtgacccctctcagcttctcaaccttgcctgttctgacagcgtcatcaatagcatattcatatatttcgatagtactatgtttggttttcttcccatttcagggatccttttgtcttactataaaattgtcccctccattctaaggatgtcatcgtcagatgggaagtataaagccttctccacctatggctctcacctaggagttgtttgctggttttatggaacagtcattggcatgtacctggcttcagccgtgtcaccaccccccaggaatggtgtggtggcatcagtgatgtag

SEQ ID NO: 3587 - DNA, 2057 bp, Homo sapiens
  SIMILAR (3)..(707): 481254mologous to Friend murine leukemia virus pol protein,accession number M93134,Smith-Waterman Score=516.
ccagagaagcccttcaaggtatccaggtccgtctcaagcacctaagaacttttggaattattgttccttgtcagtctccatgcaacactctcctcctgccttttcccaagccacggaccaaggactacagtcaggtacaggatttgcgcttgcttcatcaagctacactgactttccatccaacagtacctaacccgaccacattgttgggtttgctgccagctaaggacagcgggttcacctgcttggacccgaaagacgctttctttcctatcagattagccccagagaggcagaagctgtttgcctttcagtgggaagatccggagtcaggtgtcactactcagtacacttggaccgggcttccacaagggttcaagaactcccccaccatcttcggggaggcgtgggctcgagacctccagaagtttcccagcagagacctaggctgcgtgttgctccagtaggttgatgaccttctgctgggacaccccacggcagtcgggtgtgccaagggaacagatgccctacaccggcacctggaggactgtgggtgtaaggtgtccaagaagaaagctcagatctgccgacagcaggccttggcagcaactgccctgcgagtacaagaagcaaataagctgactcttgagcaaaacctgaacataaaggcctcccgtgctgtggtgactttaatgaatactaaaggacatcattggctaacgaatgccagactcacccagtaccagacttggctctgtgaaaatccccgtataaccattgaagtttgtaacagcctacaccccgccaccttgctcccggtatcagagagccccgtcgagcctcgttgtgtagaagtgttggacacaattgactctagcagacctgacctccggggccagccttgggcatcagtagactgggaactatacgtggatgggagtagcttcttcaacccccaaggagagagaggtgcagggtgtgcagtgataaccctggacactgttgttgaagccagatcgttgtcccaggccacatcagcccagaaagctgaactcattgctttcattcgggccttagaactcagtgaggaagaaaaggactttctccaggtagagggaaggacaagtgatggaggaaggatggattcggttaccggatgggagagtactgtgccacagctgctaggagctgcagttgtactggctgtgcaagaaaccacccatcgacatcaggagtcactggaaaagttgttaggccggtatttctacatctcgcctttgtcagctcttgccaaaacggtgaggcagcggtgtgttacctgccgacagcatgatgcgaggcaaggtccagccgttctgcctggcataggagcttatggagcagccccctttgaaggtctccaggtggacttcacagagatgccaaagtgtggaggtaacaagtatgtactagttcttgtgtgtacctactctgggtgggtggaggcttatccaacgctaactgagaaagctcgtgaagtaacccgtgtgcttcttcgagacctgattcctagatttcgaccgcccttacggatcggctcagacaaggggcctgcgtttttggctgccttgttacagaagacggcaaagatgggcacacgcagtgacacacagctagcacacataggcacagtcctgcgggacatccatgtcagtgtctgttctgatgggccgaatctaagaacaggtttgaacgtcatccttgggggtgtggagtggcagagcactcctgggaatcttgtaagaagacaaggagagacaggacttcatcttcacatctaccactggtggcaggctgtggccatcttccccgtgtacctgggctcgagcctgcacatgaaggttggtggacggtcctttgaacaggaagaagacacggagcacattcctgttagctacgacagagaggggcaggaatgtgacacagaactcaagggacaggaaggagatgagttggaggctgggtcagtggtccctgccagtgatgctggtgactcacatgacgatgttgatgtgtag

SEQ ID NO: 3588 - DNA, 1876 bp, Homo sapiens
  SIMILAR (657)..(4): 931254mologous to Homo sapiens unc-93 related protein,accession number AJ271326,Smith-Waterman Score=1057.
tcactgctcctccggcccgtctcccccctgcgcctgttcgtacgggcagggccggcggccgagtccagcgggctcggggccaggcctgggccctgcgggcggcgcctcctcctccgcgccgtccccatgctcgccctccgcgtcgctctcgtccgagttgtcctcctccaagtagcggtaaccgcgcaccttgtgctggggccgcgggatgcggggctggcgcggggccacgccccggcgcagcttctgctccatccgcaggtaggagaccgcggccgccaccagcgtcaccagcagcaccgccagcttagccttcatgtgcaggctcgagcccaggtacacggtgaagatggccacagcctgccaccagtggtagatggtgaagatgaagtcctgtctctccttgtcttcgtacaagattcccaggagtgtgctgagtccagtcttgttcagggcactgcccacaccccaaagggcagctgccacatagaggatccagctgtgttgcaggacccgaggcacaggggcccagaaaaagaggatgaaggtgagcagcaggtgcacccctgctccggccaccaggggcaccggggcgtggcagccacaggcccagcaggccccaggagtgagggcgactgaggcgcccaggctgtaagcccacgatgaggtaagccagcccgctccagccccaccgagcacacgccatagcccaaggcgataaccagtggcaggcaaagagcacctcgaagccgctgtagataaagaaaggcacgaggtggcgcaggcggtagtcacgcacgtgcttgaagggcagctggaagatgttgccccagcccacgctgcgcagatcgatctcctccgtgggccggtaagcggctccgcacaaacccagcacccaggccatgccatccgatccagaccctttctcgcagactcggtccccagaaccacactctgcttcactgactgtccagcagcatggccaggaagccactgccatgagcacgctctccaccacaatgaggtttccgctccgcgggagcgtccgcagaaccgtcttgttgaagccgctgaggatcccgtggctgttggtgccgcagctctgcacattgtacagcgtgtggttcaggtcatacaggtagtggttcaggaaataaatcatgggcagctgggcgcaggcgaagctcagatggaagaagctgtagaagatggcttggaagaccaggagatagggcgcgtgggagccccgcggaggccgctgcttcatcccctgcccatcctgctccttgtagtgggagtactcatggtacttctgcgccatcctggtgatgtagttgcccatggaagcccaaagaggcacgatggccatgcccagggccacagccgagggcacaagcgtgtagtagcgctcccagtagttggtggagacaaagagggcgtagatgcccacagcgaggaacatcatccacttcgttccaaaaaacctgatgagcacaggtgtgtagagcagggcggcgatgggagtcacgttgatgcccatcagcattttgctgtcgatgtcgggcagccccatgttgccatacttcacctcgcggtaggtctcgtcgtagtgcaggatcagctgcatctgcaggaggcccaggtagacgccgtaggtgagcatgcccccggcgctggcagccagcacgttcttgagcacgcccaggcgcttgcggcggtagtagcggcgctcctcctcctcctcgttgtagttggggtacgcgcccaccagctcgtccagcggggcctcgggcccgtccgggaccccgagcaggtcctcgtcgccctgcggccccgcagcccccgccatcgggtagagcggcggctccgcctccat

SEQ ID NO: 3589 - DNA, 351 bp, Homo sapiens
  SIMILAR (273)..(154): 571254mologous to Homo sapiens Human secreted protein clone ic2_6 protein,accession number W99668,Smith-Waterman Score=128.
tcaaagttcttctcttgaaggctttttcctgtggcactggcagatggctgtgctatcttctggctgaggaacaagttccattccatcacgtacttcgggtttgctggactggcgctcggcatatttctgaaacgtgggtttaaagggaactgcgggagagcgagtgaggttctggccctccgagttgaccgcctgcaggtagaaatagcggaccggcaggacgacggccgcctgcagcccgggcccccacaccaggctccgcggcgcgctgaccagcacctccggggcccccgcggccaccagcagggcgaggcgcagctgcagcagcagggcccgcgggaggcggcgcat

SEQ ID NO: 3590 - DNA, 453 bp, Homo sapiens
  SIMILAR (446)..(315): 541254mologous to Homo sapiens Human secreted protein sequence SEQ ID NO:155,accession number Y87116,Smith-Waterman Score =103.
atggcgaatgggaagcgccgccactgctgcgccacactcggccgggacctgcgccgcgccaccagctcccagcggcgccagctgcgctccctgcgggggccaaacctgcaggccccgccccctgcggcaggccccgccctcaccaatcaccaccggccacgcccgaatatggctcggtcagccccgccctcggagctcttcggccacacccccgaaagagctgccgtaggggccgacagaaacctcatacaggagagctctgggtggcatctggcagctgcccctctgggacgaagcttccagaggaaggatcaggcagcaatacttacttttctgcagtctctgctggagatactcagtcaaacattatctggaatggacctccagcaaactccaacagacctgcagctgaggggcccgactgttagaacaaaaactaacaaacaggaatag

SEQ ID NO: 3591 - DNA, 477 bp, Homo sapiens
  SIMILAR (62)..(367): 371254mologous to Schizosaccharomyces pombe serine rich protein,accession number AL021746,Smith-Waterman Score=112.
ctatttagcaagtgctgctattttcagaaatatgtcttcggtggtttgcttggtttgtttcttttttacatcacagatttgcctgcaaacagataatgcaccatatacagtcctctctattaatgaaaacctttcagtgttgggctctatgttttcaaactttttaaggagctttctgaggtctacaaaagcttctgccaaacccttcattgttactcttcttaggagttcttttttctctgtttcctcttctcttgcctcttcttcagctatgcattcctgttccagttccaacagctcctcattcttcaattcctcaagaaccacctcaaagagctcctctacatcatcctcattcacacctagttggagtcgtttgctcttgagtgtcttcgtccagattccattcatacacgccttggtgaccatgccaaagttcttgatgcagtcatagtaagggaggagaccacccttcat

SEQ ID NO: 3592 - DNA, 594 bp, Homo sapiens
  SIMILAR (116)..(562): 301254mologous to Homo sapiens Con1,accession number S80905,Smith-Waterman Score=88.
gtacatttctccttttccatgctgcactgcaccctggaattggcctgtatgcgctgcatcgagatgctcttgccctctgactgccagctgggtttggtccatgtggagcctggaatcaaaaccagagggagaagcgaccgcaaagcccgggagctgagtccgcggcgtgaagcggcggaggtcagcagcgagggggcagggccggcgctggcggccacggagcttgcgcgtcgctgggctcggaacccagggacgcgagccagcgctgggagctggcggagagacggctctgccatccggctcaggcagtgggcgcccgccccgcccccagcgcccacgcgactccggccccgaggctctcccgagcgcagcgttctggaagcgccgccgctaagcgtctgcgtctgcgcctgcgctgaccccagtcccggactcggtccgaggcgcgcagcccggagggggcggggccgagcccgaagggaaggcagtgcgcatgcgcggggcgagccggccggcactgtcacagctgagcggccgcgagatcggtccctgtccgcagggtcgggtagtggccccctcggggacagcgtgtga

SEQ ID NO: 3593 - DNA, 778 bp, Homo sapiens
  SIMILAR (771)..(289): 301254mologous to Meloidogyne incognita cuticle preprocollagen,accession number U68729,Smith-Waterman Score=118.
tcatctccaacatttttcatgtctaatccaccgaggagatctcctgaaggctttgaagtctctgggcgcgtgaataaagatgtcaccctggcactcgccgtgcttcttaatgagcatgggtttgatgtggaagccgcagcccctccctatgccagcaaaacgctctccgtaggagctcattctccctcgaatctcagggatggccttgcattctgatgggcgcacatggtgatttagggaaagggaaagtccacagtccacactgtgggctccttgctccccgaggcatgggcctgctgtgggttggtacctgtgacccatggtatggtcctgcgcctcggcagctcggcttccagagcccggaaacggcgcgctgcttcgcacctcctctccgcgatgcagcccgttccttccgctgcttgactcacacggctgcctcctactcactggggatccgtctgcagctccttctccagggcagcggccggcagggctggcgggagcagggggcgcagagaggtcaggggcagttgaagtggggcctcgtgagccaggccgtgacggggctgggtcttgatcctggattgggggcctcccggaaggctcgaagcagggagtgctgtgtgttaagaagccctgtagctggctggagacctggaacctgtgctggtcgtcctgtaaggcaggggacctgggtccctccgctcctccccaggctccccatccaccccctccctcttggtccccgctgtctccattggcttctcctcccacgaaa

SEQ ID NO: 3594 - DNA, 1068 bp, Homo sapiens
  SIMILAR (387)..(479): 1001254mologous to Escherichia coli K12 putative regulator,accession number AE000300,Smith-Waterman Score=170.
atgcattcaggaacctttaacccacaagatttcgcctggcaaggcttaacgctgacacccgcagcggggatacacatccgtgagctggtggcaaagcagccgggtatggtcggcgtgcgcttaggcgttaaccaaacggggttgcgcgggctttggctatgtgcccgcagtgttaacgagccgggcaaagagattcggcatgcctgcaggtcaaaagttgttgctaatgaccccacagcggtgagaaaactcgaatactactggagccgtgatatatttagcgatcgagaagccagctacatgtcgcatgaaaaccacttcggctacgcggcctggccgccttttgcgcgaacaaggactggcagccattccgcgcctcgcgataaccaccagcccgccctggttatccaatcatcgaagacaaaaagctgcctgcacagcaaaaagcacgcgatgaatactggcgtacgctgttacaacgctgatgggatcgcagccacaactggcagcagaagtgatgccgtggttaagtacttaaccccagtcagtgctgaagagttatttttcgggcacggccaaaccggtaatgatggcacggaaaggaagccaaaagggaaaggcagggaaaaggtgagattcttggacttggagagaggaaaagagggaaaagtcgtggacttgccagagagggaaaggggagccgaaactgaagggcgaagtccgggcggtgcagagagtcggggtatagagcaggcaggtgttaatggcatgggaaggaagagtaagaagtggggcaagaaggtgtcgcggtacgaggggaaggtgagactcaagaaggtgccggctaagaagctggtgccggcgtggaaggagaaggtgtggggcgaggaaacaacgaagggcgaggaaagatcccgaggcgaagagacagttttcatcgagaaggggcagggcgaggaggaggggcgttaccagagggcgggacggggcgacgggcccgcgcgggaagaaccaatcgccgagaacccggggaaggaacgggtccataaagaccaagtggaggagtag

SEQ ID NO: 3595 - DNA, 735 bp, Homo sapiens
  SIMILAR (128)..(430): 341254mologous to Caenorhabditis elegans Similar to cuticular collagen; C18H7.3,accession number AF067607,Smith-Waterman Score= 95.
ttagctctgactgcgagaagctcccacccgcaaagggctactgtgccaaaagcgagcgtagtggccgccgcttcccccacaaaattccgtcactcgggagctgcgttgcagtggagaaacctgggtcccgtccgggcccaagggaggaggctcagcacggccgctcccgcagccccgtccaggcgcctcttccctccccctcctttccgcggcggtcgcggcggcggctggagcgggagccgggggcggcgaggggcggagccggggcggagccacggcgctggcggccccggcgacgacggcaggtgtggatggggcgaaggtgcgggaacgtccactcccgcgcgcccctctcggggaccagggcggcctcccaggaggagcttggtgagcagctgcgacctgtgcataacttggggcgccgccaggggctcgcaggttccacgtccggcgcggcagtgggcacacggcagtcgacacccgggtccgaggaccgccggcgcccgttggcgcccaaacgaggatgcgccgcggggtccggcgcatcccggagcgccggccgcccttggctcttcgcggaaccgccgcctcctcttgtccaaatctcaggtcgtcatcctggcccgaagtcacaggttcgctctctgtccctaaacctcgaggaaggagttgtgtgtgtccatgagcgtgttggcggagagcgctttcatacagcgatgtttgagttgagctcat

SEQ ID NO: 3596 - DNA, 792 bp, Homo sapiens
  SIMILAR (474)..(515): 781254mologous to Homo sapiens Human secreted protein, SEQ ID NO: 6297,accession number G02216,Smith-Waterman Score=52.
tcaaagctttgttgaccatctccaggatacgatggccagctgccttggagagccagtcactccaggtgacacggtttggtactggacgtccgcggtcccctctcccacgccgccccatactgggccccgtatccagccgccaccgctgctgcagcaagaaccgccccactgcctccgcgcagtgccattgtttaaagggacctcagcctgacttccaggagctacgcaagacttggccaagtcaatgcgcatggcaaggagagagccgcttctccccatcacagcgattcccagggttgtcgtagaaaccactccctgaggcttcgcaaagcaggagccctccgtagcagggcttcggtgtcggggctccgaggctccggcctgacttctccacggggtacacaggaacgtctccggacgccaggacctgaaatgggccgaccaggatgaggaaaccacaggcagaggccggggaagcagcgcggcatcccatcctcaggcctgcccggacggtgttcgggatcaagaggaccacactccagcccaggacaaaagccccacggtagcacattgtccggcaggagaggagcagacccacgtccaagaagaagggtgtacctttccacgcctcttctctgcgaaaagaagccacaccatgacacaatcttgaagaggaagccgggaatgggagacggcaacaatccctgtccctggaacgctggcctctatggacaagccacccgcttcgcacccctccccttatgcccgaggcggaggcacggcgccgtatcc

SEQ ID NO: 3597 - DNA, 342 bp, Homo sapiens
  SIMILAR (6)..(170): 421254mologous to Homo sapiens testis-specific methyl-CpG binding protein 2,accession number AF120994,Smith-Waterman Score= 84.
atggccctgcggctggaccggacgcggcggctgcaggcagagcaggaagagagcgcaggctgggcagcggcgtacgcttcggcgacgtcagcttccggggccgtggacgggggcgcgcccgagcctcctggaaacctccccaccaaggacctggggaacccaagagcgggacccggaacagaccgccgtgagagaggaggggcgccggccgggattcgcggcccggagctcgggaccgggaatatgaagaaattgcttctctctctaccaatttactaccatcttgctggagagaaagggcaggtggctaagattgttcgcattccttcagcagatgtgtag

SEQ ID NO: 3598 - DNA, 438 bp, Homo sapiens
  SIMILAR (314)..(436): 461254mologous to Caenorhabditis elegans Similarity to Aspergillus acid phosphatase (TR:G755244),accession number Z75537,Smith-Waterman Score=109.
tttcgtggcggaagcggagtgagtgactagatggtgactgatgtcgtaactagggggggcgagttggggcagcgacacgttcccccaggggaaagctcagggctcttttgcgggcagtgtggggaaagagagactcgagacccgtcctatcgtggaggagccgtcggttccgcttcagggccctcaagaatggggcccactggagtccccgtctggctgtgtttggagacctgggggctgacaacccgaaggccgtcccccggctgcgcagggacacccagcagggcatgtatgacgccgttctccatgtggcaacttctctaactacaaggctcgcttcagcatgccgggggataatgagggcctgtggtacagctgggatctgggtcccgcccacatcatctccttctccaccgaggtccatttctttctccatta

SEQ ID NO: 3599 - DNA, 422 bp, Homo sapiens
  SIMILAR (22)..(414): 471254mologous to Caenorhabditis elegans Similarity to Aspergillus acid phosphatase (TR:G755244),accession number Z75537,Smith-Waterman Score=360.
ctgcgcagggacacccagcagggcatgtatgacgccgttctccatgtgggagactttgcctacaacctggatcaggacaacgcccgtgttggggataggttcatgcggctcattgaacccgtggctgccagcctgccgtacatgacatgccctgggaatcatgaagaacgctacaacttctctaactacaaggctcgcttcagcatgccgggggataatgagggcctgtggtacagctgggatatgggtcccgcccacatcatctccttctccaccgaggtctatttctttctccattatggccgccacttggtgcagaggcagtttcgctggctggagagcgacctccagaaagccaataagaaccgggcagcccggccgtggatcatcactatggggcaccggcccatgtactgacgaaa

SEQ ID NO: 3600 - DNA, 418 bp, Homo sapiens
  SIMILAR (85)..(288): 351254mologous to Homo sapiens Human secreted protein sequence encoded by gene 49 SEQ ID NO:115,accession number Y91394,Smith-Waterman Score=67.
tttcgtcgggagccaccccgcggcgcggctgcggctgcggctttgcctcggcgcaacagggaaaataaaagaagcaaaaacaggccctgctgtgagggaccacgaggcagtgccaggatgaaagagttggagtaacctagaccattgcaggtactgtgccttctgcctgaaatgtgctcacctcgcctcgctgactcctactcgccagttagtgttcggcccatttctgcccccgtgagatttcttcacagatgttgccctcccccatttgctgagtttcctgcatgccggctccttcagcactcaagggtacctctttgattctgcttctcacagggctgaggccccagcttgtggccaccacaacgtatcaagctatctccagggttgggctcaggactcaaagctgacgcagctg

SEQ ID NO: 3601 - DNA, 448 bp, Homo sapiens
  SIMILAR (239)..(183): 471254mologous to Halobacterium sp. NRC-1 Vng1838h,accession number AE005085,Smith-Waterman Score=37.
tttcgtccgggagccaccccgcggcgcggctgcggctgcggctttgcctcggcgcgacagggaaaataaaagaagcaaaaacaggccctgctgtgagggaccacgaggcagtgccaggatgaaagagttggagtaacctaggtgattctgagtgaatcagtcaggaggccttcctggaggggaccattgcaggtactgtgccttctgcctgaaatgtgctcacctcgcctcgctgactcctactcgccagttagtgttcggcccatttctgcccccgtgagatttcttcacagatgttgccctcccccatttgctgagtttcctgcatgccggctccttcagcactcaagggtacctctttgattctgcttctcacagggctgaggccccagcttgtgggcaccacaacgtatcaagctatctccagggttgggctcaagactcagag

SEQ ID NO: 3602 - DNA, 3393 bp, Homo sapiens
  SIMILAR (298)..(3390): 991254mologous to Homo sapiens sodium bicarbonate cotransporter,accession number AF069512,Smith-Waterman Score=5408.
gtcctaccgagggaggagctacaggccaccgcgaccagcagagagcgaaggcaggagggaccagcctggcccagccccttcattttactgtcgggggtagtgaggaggaagaggaagaggcgaaggctggcggaggaggaggacaattatatagagtctgttgtgaaatttagatctatgttcaacaagaacaacagcaacaaactcagaagcactcctcgctaccgccggggagacccaggatacctaaactttactgagttggggccactcaagcctgaacagaaggatcagtggagccaacatagaccagatgaagaagctgtggtggatcagggtgggaccagtacaattctcaacattcactatgaaaaagaagagctggaaggtcacagaactctgtatgtgggagttcggatgccgcttggccggcagagccatcggcatcaccgcactcatggccagaagcaccggagacgagggcggggcaaaggagccagccagggggaggaaggcctggaagccctggcccacgacacaccatctcagcgtgttcagttcattcttggcaccgaggaagatgaagagcatgtgcctcatgagctgtttacagagctggatgagatctgtatgaaagagggagaagatgctgagtggaaggaaacagccaggtggctgaagtttgaagaagatgttgaagatgggggagaacgctggagcaagccttatgtggcaaccctttcattgcacagcctgtttgagctaaggagctgccttattaatggaacagtcctcctggatatgcatgcaaatagcatagaagaaatttcagacctgatcctggatcagcaagaactgtccagtgacctgaatgacagcatgagggttaaagtgcgggaagcccttctcaaaaagcatcatcatcagaatgaaaagaagagaaacaacctcattcccattgttcgctcctttgctgaggttggcaagaagcagtctgatcctcatttgatggataaacatggtcaaaccgtgtctcctcagtctgttccaactacaaatcttgaagtaaaaaatggagtgaattgtgaacatagtcctgtggatttaagcaaggtagaccttcatttcatgaaaaaaattcctactggggccgaggcctccaatgtcctggttggagaggtggatattttggaccgtcccattgttgcctttgtgaggctgtctccagctgttcttctctcaggcctaacagaagtgccaatcccaacaagatttttgtttatcttattgggtccagtagggaaaggtcagcagtaccatgagattggcagatccatggccaccatcatgacagatgagatttttcatgacgtagcatataaggcaaaagagcgagatgatctcctggcggggattgatgagttcctagaccaggtgacggtgctccctccaggagagtgggatccctccattagaattgagccacccaaaaatgtcccttcccaggagaaaaggaaaatgcctggagttccaaatggaaatgtttgccacatagaacaggaaccacatgggggtcacagtgggccagaacttcagcgcactgggcggctatttgggggcttggtgctggacatcaagcggaaggccccctggtactggagcgactaccgagatgcactcagcttacagtgtttggcttcctttctgttcctgtactgtgcctgcatgtcacctgtcatcacctttgggggactgcttggagaagccactgagggacgcataagtgcaattgaatccttgtttggagcttccatgactgggattgcttattccttgtttgcgggacaggctctcaccatcctgggaagtactggaccagtgcttgtgtttgaaaagattttgttcaaattctgcaaagactatgctctttcatacctctccctgcgagcttgtattggactgtggaccgctttcctgtgtattgtccttgtggcaactgatgccagttcccttgtctgctacattacccgtttcactgaagaagcatttgcctccctaatttgcattattttcatctatgaagcaatagaaaaactgattcacctggcagagacctaccccatccacatgcacagccagctggaccaccttagcctctattactgcaggtgtactctgccagagaatccaaacaatcacactctccagtactggaaggaccacaacatcgtgacagcagaagtccactgggctaacctgactgtcagtgaatgccaggagatgcatggagagttcatgggatctgcgtgcggccatcatggaccctacactcctgatgtcctcttttggtcctgtattctctttttcaccaccttcatcctctcaagcaccttaaagacgtttaagacgagccgttatttcccaaccagagtacgctccatggtgagtgactttgctgttttcctcactatcttcacaatggtgattattgattttttgattggagtcccatcaccaaagcttcaagttcccagtgtgttcaagccaacaagggatgatcgcggatggattattaatcccattggccccaatccctggtggactgtgatagctgcaattatcccagctcttctctgtactatcttgatattcatggatcagcagatcacagccgtcattattaacaggaaggaacataagctcaagaaaggctgtggctaccacctggacctactgatggtggccatcatgctgggtgtctgctccatcatgggcctgccctggtttgtagctgcaactgtcttgtccatcacacatgtgaacagcctcaagctagaatctgaatgctctgctcctggagaacagcccaagttcctgggcatccgagaacagagagtgacaggccttatgatctttgtgctgatgggctgctcagtcttcatgacggctatcttaaagtttattccaatgccagtactctacggagttttcctttacatgggagtttcttcactacagggaattcagttctttgatcgtctaaagctctttgggatgcccgcaaagcaccagccagatttcatctacctgcggcatgtgccgctgcgcaaagtgcacctcttcaccctcatccagttgacctgtctcgtcctgctctgggtcatcaaggcatctccagctgccattgttttcccaatgatggttttggccttggtctttgtcaggaaagtcatggatctctgtttctctaagcgagagctgagctggctagatgatctcatgcctgaaagcaaaaagaagaagttggatgatgccaaaaagaaggccaaggaggaagaggtcatagtccttgcaccaactgtatacctgggggcctcaaattacagaacatag

SEQ ID NO: 3603 - DNA, 766 bp, Homo sapiens
  SIMILAR (508)..(747): 981254mologous to Homo sapiens UDP-GalNAc:polypeptide N- acetylgalactosaminyltransferase,accession number Y08565,Smith- Waterman Score=436.
tcacgggggcagaaatgggccgaacactaactggcgagtaggagtcagcgaggcgaggtgagcacatttcaggcagaaggcacagtacctgcaatggttgtcctttctgctttcaaaaccttcatttgaaattgggcctttatcaactagcatctggaggatcagcaggagctgcctgccagcctcctttgcctcgggcccctctctctctttcacaatcaggacagccgtattcatattccttgagcactgtttgacgagggaggagctacaggccaccgcgaccagcagagagcgaaggcaggagggaccagcctggcccagccccttcattttactgtcgggggtagtgaggaggaagaggaagaggcgaaggctggcggaggaggaggtgagaacgaggactcggcagaagcgagatcccccgaaaggaagtcgagcacttcatgcagctgggctctgctgtggcagggccctgactgctgcctcctggttgggcctgcaggtgagtgcttccacggctggctggagcccctcctggctcgaatcgctgaggacaagacagtggtggtgagcccagacatcgtcaccatcgaccttaatacttttgagttcgccaagcccgtccagaggggcagagtccatagccgaggcaactttgactggagcctgaccttcggctgggaaacacttcctccacatgagaagcagaggcgcaaggatgaaacctaccccatcaagcagcctgttggtgttattggagact

SEQ ID NO: 3604 - DNA, 789 bp, Homo sapiens
  SIMILAR (284)..(760): 311254mologous to Leishmania major L8453.1,accession number AC008054,Smith-Waterman Score=165.
atgaagataagcactgtgcagacaacagaaaaggacaagacagcaggtgactgggataggatagaagaggacaggaatggcctccctgaagatgtgccacttgagtgggacctgagcattgtgctggggcagccaggtgggtcacatcgccaccccgatcctggccagacgctggtcaaagtgttaattagccagatctcccctagagggagaagcatccagagggtgctaaaagcttcaggggcaaggagcaaagacagctggcaatgcagtggtctggaagcctttgtccaaacacagggaagctctgccctcagcggcggccactgggaccgactgcccgcccccgacccaggcaagatgcccaactgcgaccgcgcgccccccaagatcgcctcccgagtctcgccacaggcgtgcttcccgcgcccatccccgccggtcccctccgccggccccctccgcgcctctacaccggccgaccaggcccggcggcccgctcgggctgcccggccgccggatgcgctcagcaaacgcggcccctgtcggatttctgctaaattgcacagcggcggcggcggcggcggcggctgccgggagaaggcgcaggaggaaccggagggccgtaccgcgcgctcgctcactccgcccctcccgctcgcccctcgccccggccccgccggccgccggctcccacccgcgcacacgacccagcccccaggacgcaccgggtgcccgagccccgcaggccgggacacctcgcagctgccgtattttctgctaaagtga

SEQ ID NO: 3605 - DNA, 549 bp, Homo sapiens
  SIMILAR (379)..(510): 701254mologous to Homo sapiens dJ1022E24.3 (KIAA0835, similar to myelin transcription factor 1 (MYT1)),accession number AL121581,Smith-Waterman Score=162.
ctttagactcatagttccttaattccccagtgaagatctgagaaaggctgccattctaacacccttcaggccacgtagtggagatgttacttgctgtatccttgggatggcagacctggcacagtctttataggatgaaacccaagactctcagggtgcgcacatacacaggaggatcccttgaagccaaatgggctgactgggtcacacagggctgagcaggaggccagaggttactgccgggagggcatttatggtccacagcacagagaagggaaacctgggcggagcccagtggactctctaagttgaagaaataaggttgggagtcgggggagggcgaagcagctaaagttctcagggcaaagtactagagttcacaggtcagagagtagggaggaggaggaggagaaggaggaagacgaggaggaagaggaggaggaggaagaggaatacgagaaggaggaggagaaggaagaggaggaggaggaggaggaaagagatctggagtttagtaaaggacccttcttgtcttcagttgagtcatga

SEQ ID NO: 3606 - DNA, 1366 bp, Homo sapiens
  SIMILAR (5)..(718): 251254mologous to Leishmania major L8453.1,accession number AC008054,Smith-Waterman Score=109.
ggcccctgggtcctcgccgccagcagtctgagtgcggtgccccgacactgacatggcctccaggcagcaacggccttcccgggcagcagggcgcctctccgttaagtgcgagccccggcgcaggggccggatctggccgggggccggcggcggtgtgggagcggcgcgtcatgtacaccatcaccaaggggcccagcaagctggtcgcgcagcgccgcacaggtcccacgcagcagcaggtggagggccggctcggcgagctcctgaaatgccggcagcccgcgccgccgacctcgcagcccccgcgggcgcagccctttgcgcagccgccgggaccctggcccctgtcgagaaaggtgtggaggttccagcggggcgggggctctctggggctccatcctagtgaggtaagtgccctctaccagaggcgccttctggcgggagtgcccctctcagctgaggaggaaccgagagcggcgctggggcacctgagcccaggaaggcaacaggccggccgggaccgcgagtgcctggcggagcaggcgcagcccaggactcccggctcccacctccggctgtgcggccccattccctccacggccctgtcccgggctttgtgtgctcagggctcggccagctggggccgctcatccctgccctgggcccggctggccgggacgggcccaggggcccaccagacgttgcgtgcggcactgcgggagccatctcctttggcatcgccccttgtctcgggccgtccagggccaaggcttgtgttcaatcgtgtgaatggccggcgggccccctccacgtccccatccttcgaggggacccaggagacctacacagtggcccacgaggagaatgtccgctttgtgtccgaagcctggcagcaggtgcaacagcagctggatggtggcccagccggtgagggcaggccaaggcctgtttataccatggagaggaccgccaatccccggctgcagaactttgtgccccattgacctagacgagtggtgggcgcaagcagttcctggcgagaatcaccagctgttcctagtggctgctgggaggggggcgctgctacacggccgacctgtcgccaggagaaaggcatggcggccctgcccacccactgcgcctggctgggtgccggccacacctgaaagtgccagcatttggacttttgcaccttttttttccctgggcccggctgtggcgacggaaggtgccatgtccaagggccgaacccgtctgacctcagccctgctcactgtgcccagggaccagcgaccagcccctggggctggcagggaggagctccaggctaataaagtggagaaactgtcaaaaaaaaaaaaaaaaa

SEQ ID NO: 3607 - DNA, 1782 bp, Homo sapiens
  SIMILAR (919)..(782): 371254mologous to Mus musculus neuronal-STOP protein,accession number Y16008,Smith-Waterman Score=62.
tcagtgtcttaaagggtccagaagccgagacccagtgtccccgaggaaagtcctgttgctccccgaggagtccccagcttggtagcctgtgcagttactgagggcactgtggtggtgggacacagtgctcctggcctgctccttggtgccagaaccttcttcctccctcagcttccccaactctctccacacaaaggcagctgtggcatgcatggccaggtgctcacaggaatcctgtgtgacaggtgccttctctagactcttgagcacgtgcacagctctcagtgccagctcaaggctctctcccgttgtgtcctccctgactgccagtccatggtgctcttgttcttccttggcagtgctcttgtttgggaaatgacctttttgtgtgaacttgttttgacgtgccagcttgatgaagagctcctccagggccagggtcctcccgtccctgcggcctgtgaggtggccagcggtggggctgtggctggcagggtatggaacgtgggcagggagcgtggccgtggttgtgtggggctgtctgctccagggcctagagcgtgcacatgaccacactgccaagtggccctgctctttgtggaatccagagacgactgcagagcagcactcagaggagacctgagtctctgcatcctctccagctcggctgggaagctgcccaggcgggggagggactgccccatccagctgttgtccacctcccagcctccccacggctgcagctgtcccagctccatcagtcacgtccaaggctgcctccagggtagggagatggggtctttgtttcttccggcttactggtttgatgatggtcaggccctgtgtgtaggggctggacttggggagtgtgagctgtaaggatgggtgtattttgtcctccaagtgtggcaggaaggagggagatgcccatcctggcattaccattttctgcagccagatacatgccttgccttcttctctcttttttacctgaaattcagcagagtccttgaagtctctaacaaccttgcattcttcagaagctatgttgctagtttctggctgccagtttgcatttcttaggcggattttctgattccaggctcgggagggctcccctgcactgacgggtgggggccccaggacggcatctgtgctcagtgcgaacgctgagcttccttttatggtgcgtgcacgcctgctgtcattaatgtagaggctggatttccctctccaattgattaggcagctctctctgttctctcctctttgcagggaggaggccactccttcaccccagttcctgatcttcaatgctctgtcttcctccttagtctgcagaacgcacccaactctgtttcgggtgggtgtgggcaggttgacctcagggctgggggaaggtttgattggctttggcattctcatgcgagtgagtttggaagacttatcaaggaggcagttttgaatgacatttgaaggcaggaagaagatcgtatcaggtgtcagggtgggcagggtggcttcctggagcgaggcccactcctggccaagagccactcctggtacaagtgaggactgagatgggcgatggggtgggcggtgcgatgggccagttcgttgaccagctcttgtactagatccatcagcaatgtcgcttagcgaggctttcttcagctttggaggcatgctggcttcgtaatcagcgtcaccctgtaggtgttgattgagcccgctgggcgtagcacaggtactcccatgggacacctcctcatctatgcccat

SEQ ID NO: 3608 - DNA, 1401 bp, Homo sapiens
  SIMILAR (1064)..(1240): 271254mologous to Saccharomyces cerevisiae mal5, sta1, len: 1367, CAI: 0.3, AMYH_YEAST P08640 GLUCOAMYLASE S1 (EC 3.2.1.3),accession number Z38061,Smith-Waterman Score=67.
atgcacggggatgaactacacatctccttcagggaaccgttagacaatcgaaaactgattttatccagctcgcctaggagtcgattccagacttccccgtgggtgagtaataaacaaactgttcgtgtctgcgggaccgtccactcgactcctcgcatgtgccgtgggtcgaagaggcacaatctgcccataataacaaagaaatcgtaccccaaaaagggccctggtcctctaaacacaaccaagcaagaggcccaccaagatctgaaagcaacaccaacaaagcggtcaactgcgctgggcgatcaacgaaaacacaaacaccgcgcggcaccagcggaaccacgaggggaatacttgagtgcacacaagacacacaaaaatgtccaccacgaatacaaacacaagctcactggacgcgcctcccacaacacagcagatgagaagtacacgagagagagggacatctcactgcgccaccttcgtcggcactcaagaacacatacaccctcccactacctactagcagacaacgacaccacaatataccaactgactgtggtgcctggccctgggccccgcactggggaacttccccgctgccacgcgcgcgttaccccgagagtcagcggcgaggaagctctcccgccaccccctcggagcccggaaaattcaaacacgcacctgcgcacccccagccagacacgcacccctacgcgcgctcggcctccgctttcccgagacgagtccgcaacagccgtggccagatccacgggtgggcttctttctcaggagttccccagtctgggcaccatcctctcagcaatatccatggtggagtccatcactttcaacaaatatgacaatccccccagaatccagcttcttttgcccacattagcttattacacatctttgaccagtcaccatggccagaggatgccggctctgctgaccatgcctgagctcagtccacacctagtgcccaccgtcaccgaccacaatacgttcaatggaccaccgacccaccttcgactcacggaacattcgaggagtcgagtggacggtccctcagacacacacagtggctgtgaaaaagaaaacaatcgggacaccggcccgcgactcccactcattcccaacgactcccaccacccgtatggtaaagtccctcaaaacttcgacggggacatctaccgacctctcgtcttcaagatctatactaaagtcacctacgtcctccattttcacctctcttacgattttctctatttggagagacccagacagtatggatttgtgcgtctaagaaagagagtggagttccaccgctgtttcatctcagaagtcctgacggacgagatgtattacagaatcgtcgtatgtccgctcctgcggtga

SEQ ID NO: 3609 - DNA, 1830 bp, Homo sapiens
  SIMILAR (1830)..(1093): 931254mologous to Homo sapiens HOXC13,accession number AF263466,Smith-Waterman Score=1257.
ctaatgtagccggaaatccggcgcgatcgatggctgagacccagagcagagcagggaccgctggccccggtccgcgaacaaagcaaactccggggacttggggttccggccaggccggagcccctgcccaccctccctgctatatccaggaaagcagaagcggtttttcggccccaggccgcgcgagaaacgcactctggagccgccaatcctctctgcatggcacctggaggcgcggaaggttccggtgtaattcagcgggaggtggaaggcaggccccgatcccacagcgcgcctatgctcagcctttggtccgagcggccgccctcctgcgtgtgcctcggtccagacggcgctgccgattttccaaggagaggccgtggcccgcgtccgccgctgcaggactccccagcttcgccctccgctccgcgctgcagccctgcgcggtgctctcggttgccactctagccgaggcctcgagacaaagacgcgccgggcactggtggacgacccgggcgcctgggacactccctgactcgcgcctggagtgctcagcatcccggccctgtggcgaaggttgtgagaccttggtccaattccccgaccgtcgtggtcccggctgcggtcctctccagggtccagggagaggaaacccggcgcgcccacagccccggctgactcgagcagctcccgcgcccgacagcgccggcagctctggtctcctccggaggggctgctgtgcccccgcgaaggacgagatgacccctgctggccggagctgtggaggttgcctcgccgagacccggatctgtccagtcgctcgtccctgagcaccctgggccgttcaaagagctcaggaatattgtcttgtctaattccccggaggcttcgtattctgcccctgcaaactgacgacctcctccagcagaaatcaggcggagggaatggcaggagctgcgtgggggagttcttggcggaggacttgtcttctccttcccaccccacagctgcgtaggctcgactggcgcgtgggggctcccgacttggaggggtgtgggcagtggtattcagggctttttctccgtcccgccctgggaagggagacttccagaggtgggcggactgcgactgctccttggagcagtacacctgactgtcccagccattggagagagcccagtgctggtagccttcgacggggatgagggcgtcgtgacgcggctccgggtgcccgctgatcccgggcaccaccgacacgtccaggtagccgggcatcgcctggtaggagctggcgaagctggggtagaaggcgaactccttggccctagaggacaggtcgtcaccgggcagggcgcccgacggctccgggtatttatcgcccgggtggtaggcgcaaggcttctgctgcaggttcacgttgtgcgacaggcggcagccgtagtagctgcccccgaaggggtagccgtagcccagggtggcgctggacgaggtggggggtgcccggcggcggggcacactggcgcgccccgctccggggccgggatgtccgtatagacggcgccctgggggggcgcccaggggagccggcgggcggcccagcacggggtgcggaagcaggtcgcggcagtggctggccgggcagctgctgcccagaccatccatgctcggggctttgccggggctcgctccgctgcagccaccccccgctccgcccgtgccgccgcctcctcctccgccgccgccgccgatgccgctctccgccgcgctgtcctcatagacgtacataaggctctccggccagcgtggatgcaggagcagcgaagtcgtcat

SEQ ID NO: 3610 - DNA, 1311 bp, Homo sapiens
  SIMILAR (1278)..(1210): 561254mologous to Mus musculus collagen pro-alpha-1 type I chain,accession number U08020,Smith-Waterman Score=59.
ctaatgtagccggaaatccggcgcgatcgatggctgagacccagagcagagcagggaccgctggccccggtccgcgaacaaagcaaactccggggacttggggttccggccaggccggagcccctgcccaccctccctgctatatccaggaaagcagaagcggtttttcggccccaggccgcgcgagaaacgcactctggagccgccaatcctctctgcatggcacctggaggcgcggaaggttccggtgtaattcagcgggaggtggaaggcaggccccgatcccacagcgcgcctatgctcagcctttggtccgagcggccgccctcctgcgtgtgcctcggtccagacggcgctgccgattttccaaggagaggccgtggcccgcgtccgccgctgcaggactccccagcttcgccctccgctccgcgctgcagccctgcgcggtgctctcggttgccactctagccgaggcctcgagacaaagacgcgccgggcactggtggacgacccgggcgcctgggacactccctgactcgcgcctggagtgctcagcatcccggccctgtggcgaaggttgtgagaccttggtccaattccccgaccgtcgtggtcccggctgcggtcctctccagggtccagggagaggaaacccggcgcgcccacagccccggctgactcgagcagctcccgcgcccgacagcgccggcagctctggtctcctccggagggctgctgtgcccccgcgaaggacgagatgacccctgctggccggagctgtggaggttgcctcgccgagacccggatctgtccagtcgctcgtccctgagcaccccttgaaaaaagtttcccaaatgtggttaatcctgggaagaagaaagcccaaccaaccctctccccgtcaaacatgactgctccttgatccttgatgacttgatccttcaggatgtctatttctgagttcagcctgggccgttcaaagagctcaggaatattgtcttgtctaattccccggaggcttcgtattctgcccctgcaaactgacgacctcctccagcagaaatcaggcggagggaatggcaggagctgcgtgggggagttcttggcggaggacttgtcttctccttcccaccccacagctgcgtaggctcgactggcgcgtgggggctcccgacttggaggggtgtgggcagtggtattcagggctttttctccgtcccgccctgcagggatctggagtccagtgcctccaggaaaccttccctgctctccccccttggagcgaatcctttcagcaaatttcagctgcat

SEQ ID NO: 3611 - DNA, 549 bp, Homo sapiens
  SIMILAR (2)..(145): 1001254mologous to Homo sapiens dJ137F1.1 (novel member of the potassium channel subfamily K ),accession number AL136087,Smith -Waterman Score=253.
ttacctggcgctgggcaccggcgtgttctggacgctggagggccgcgcggcgcaggactccagccgcagcttccagcgcgacaagtgggagctgttgcagaacttcacgtgtctggaccgcccggcgctggactcgctgatccgggtcaggggcgagcggcgtcggcctgggcgcggcgggatggggtagcgggccgcggggtgtacgggccgagggcgagggggcctattcaggccctggtcaggtgtttcctgttcagggaaacgtcgggaacgcagacgcgggcacaacgggggtgggcgttcctgcaggttggtggcctcctctgcccaccagacttcaaactctttctgtagcttcaccttggctttgtccatgagcagctgcaagtgctcgatctccaccttcagggctttcaggcgagtgaacattgttttataccttctcttttcttcctccagttgtgatcgcagcttctcctcctgctggtctggcatcagaggcacggccatgttttccgagattccactcttatccttaagccccat

SEQ ID NO: 3612 - DNA, 3066 bp, Homo sapiens
  SIMILAR (1504)..(2685): 871254mologous to Homo sapiens KIAA1629 protein,accession number AB046849,Smith-Waterman Score=1892.
atgtctctggaggtggacaggtctgtagaaaccatgtgctccggggatgagatactcttgcccgacttgcccaaggcagacgttgctgatccactgtggggtcctttcccagtgcagaactgtcttagtctggccagaagtgacagcagggagcagggcttggttttggtgatggaaagcaggaaccgagaggtggtcccacctggtgtcagttacagtaaagatggagcgaagtccttgaaaggagatgtgcctgcctctgaggtgacttcgaaagactcgacgttcagccagtttagtccgatctctagtgctgaagagtgtggtgacgacgagaagatcaaggtggatgaccccctgacaaggaggacgtgcaatcaagcttcagggtcggctccccagcaggactatgataagctgaaggcatttggaggggaaaactccagtaaaactggactctctccatcaggcaatatggagaaaaacaaagttgttaagagagaagcagaagccaattctataaacctgagtgtttatgaaccttttaaagtcagaaaagcagaggataaattgaaggaaaactctgacaatgtgctggaaaacagagtcctggatgggaagctgagctccgagaagaatgacacctgcctccccggcactgcgccatcaaagacaaagtcatcctccaagctctcatcctgcagctctgccatcatggctctcagcgctaaaaaggcggcttcagactcctgcaaagaaccagtggccaattcgagggaatcctccccattaccaaaagaagtaaatgacagccaggcgcgggcgcctctccagtccacggtcatgaccaatgcagtttcacctgcagagctcacccctaaacaggtcacaatcaagcctgtggctactgctttcctcccagtgtctgctgtgaacgaaatgaagacggcaggatcccgagtcattaatttgaagctcgctaacaacaccacagtgaaagccacagtcatatctgctgcctctgtccagagcgccagcagcgccatcattaaagccgccaacgccatccagcagcaaactgtcgtggtgccggcacccagccgggccaacgccaaactcgtgccaaagactgtgcaccttgccaacattaaccttttgcctcagggtgcccaggccacctctgaactccgccaagtgctaaccaaagctcagcaacaaataaagcaggcaataatcaatgcagcagcctcgcaaccccccaaaaaggtgtctcgagtccaggtggtgtcgtccttgcagagttctgtggtggaagctttcaacaaggtgctgagcagtgtcaatccagtccctgtttacattccaaacctgagtcctcccaccaatgcagggatcacgttaccaacgcgtgggtacaagtgcttggagtgtggggactcctttgcagttgaaaagagtctgacccagcactatgacagacagagcatgcgcatcgaagtaacatgcaaccatggtacaaagaacctcattttttacaacaaatgcagcctcctttcccatgcccgtgggcataaggagaaaggggtggctgcagatacacgtggacaaaagacttgcactatctgccagatgctgcttcctaaccagtgcagttacgcatcacaccagagaatccatcagcacaaatctctctacacctgccctgagtgcggggccatctgcaggtcggtgcacttccagacccatgtcaccaagaactgtctgcactacatgaggagagttggttttcgatgtgtgcattgcaatgttgtatactctgatgtggctgccctgcagtctcacattcaaggttctcactgtgaagtcttctacaagtgtcctatttgtccaatggcatgtaagtccgccccaagcacacattcccacacctacacacagcatcctggcatcaagataggagaaccagaaataatatataagtgttccatgtgcgacactgtgttcaccctgcaaaccttgctgtatcgccactttgaccaacacattgaaaaccagaagttgtctgttttcaagtgtccagactgttatcttttatatgcacagaagcaacttatgatggaccatatcaagtctatgcatggaacattgaaaagtattgaagggcctccaaacttgggtataaacttgcctttgagcattaagcctgcaactcaaaattcagcaaatcagaacaaagaggacaccaaatccatgaatgggaaagagaaattggaaaagaaatctccatctcctgtgaaaaaatcagtggaaaccaagaaagtggccagtcctgggtggacgtgttgggagtgtgaccgcctgttcattcagagagatgtgtacatatcccacgtgaggaaggagcaagggaagcaaatgaagaaacatccctgccgccacctgtgccagcacaaccggatcaagcacaaaggcatcaggaaagtgtatgcctgctcgcactgcccagactccagacgtacctttaccaaacgattgatgctagagaagcacgtccagctgatgcacagcctcaaggaccctgacctgaaagaaatgacagatgccaccaatgaggaggaaacagaaataaaagaagacaccaagttccccagtcccaagtggaagttggaagaaccagttctcaagagtgccatgtgtggcttcaccaccgaaaacctgcttcagttccacgaacacatccctcagcacaaatctgatagttcttcctaccagtgccaggagtgtggcctctggtacacgtctcacgtctctctgtccaggcacctcttcattgtacacaagttaaaggaacctcagccagtgtccaagcaaaatggagctggggaagataaccaacaggagaacaaacccagccatgaggatgaatcccccaatggcaccgtgtcagacagaaagtgcaaagtgtgcgtgaaaacttttgaaactgaagctgccttaaatactcacatgcggatacatggcatggccttcatcaaatccaaaaggatgagctcagccaagaaatag

SEQ ID NO: 3613 - DNA, 848 bp, Homo sapiens
  SIMILAR (1)..(375): 811254mologous to Homo sapiens unnamed protein product,accession number AK001559,Smith-Waterman Score=568.
atggaaaataagaaagtggccagtcctgggtggacgtgttgggagtgtgaccgcctgttcatgcagagagatgtgtacatatcccacatgaggaatgagcacgggaagcaaatgaagaaacacccctgccgccagtgtgacaagtcttttagtttgtcccacagcctgtgctggcacaaccggatcaagcacaaaggcatcaggcaaggcccagactccagacgtacctttaccaaacgattgatgctggagaagcacgttcagctgatgcatggtatcaaggaccctgacctgaaagaaatgacagatgccacccatgaggaggaaacagaaataaaagaagacaaccaaggtccccagtcccaagcagaagttggaagaaccagttctggagttcaggcctccccaaggagcaatcactcaaccactgaaaaagctgaaaatcaatgtttttaaggttcacaagtgcgctcgtgcgtggcttcaccaccgaaaacctgctgcaatttcacgaacacatccctcagcacaaatcggatggttcttcctaccagtgccgggagtgtggcctctgctacacgtctcacgtctctctgtacatgcacctcttcatcgtacacaagttaaaggaacctcagacagtgttcaagcaaaatggggctggggaagataaccaacaggagaacaaacccagccacgaggatgactcccctgatggcaccgtgtcagacagaaagtgcaaagtgtgcgcaaaaacttttgaaactgaagctgcctcaaatactcacatgcggatacacggcatggccttcatcaaatccaaaaggatgagctcagccgagaaatag

SEQ ID NO: 3614 - DNA, 3012 bp, Homo sapiens
  SIMILAR (1048)..(2256): 751254mologous to Gallus gallus dystrophin (AA 1 - 3660),accession number X13369,Smith-Waterman Score=1537.
gctgtaaggaggcaaaagttgcttgaacagagcatccagtctgcccaggagactgaaaaatccttacacttaatccaggagtccctcacattcattgacaagcagttggcagcttatattgcagacaaggtggacgcagctcaaatgcctcaggaagcccaggcaaaaaaagagaattttagaccaatatccctgatgaacatcgatgcaaaaatcctcaataaaatactggcaaaccgaatccagcagcacatcaaaaagcttatgcaccatgaccaagtgggcttcatccctgggatgcaaggctggttcaatatatgcaaatcaataaacgtaatccagcatataaacagaaccaatcacaaataccacatgattatctcaatagatccagaaaaggcctttgacaatattcaactacccctcatgctaaaaattctcaataaattaggtattgatgggacaaatctcaaaataataagagctatctatgatgaacccacagccaatatcatactgaatgggcaaaaactggaagcattccctttgaaaactggcacaagacaggggtgccctctctcactgctcctattcaacatactgttggaagttctggccagggcaattaggcaggagaaggaaataaagggtattcaatcaggaaaagaggaagtcaaattgttcctgtttgcagatgacatgattgtatatctagaaaaccccattgtctcagcccaaaatctccttaagctgataagcaacttcagcaaagtctcagcatgcaaaatcaatgtgcaaaaatcacaagcattcttatacaccaataacagacaaacagagagccaaatcatgagtgaactcccattcgcaattgcttcaaagagaataaaatacctaggaatccaacttacaagggatgtgaaggacctcttcaaggagaactacaaaccactgctcaatgaaataaaagaggatacaaacaaatggaagaacattccatgctcatgggtaggaagtgtcaatatcgtgaaaatggccatactgcccaagaaaatccaatctgatttgacaagtcatgagatcagtttagaagaaatgaagaaacataatcaggggaaggaggctgcccaaagagtcctgtctcagattgatgttgcacagaaaaaattacaagatgtctccatgaagtttcgattattccagaaaccagccaattttgagcagcgtctacaagaaagtaagatgattttagatgaagtgaagatgcacttgcctgcattggaaacaaagagtgtggaacaggaagtagtacagtcacagctaaatcattgtgtgaacttgtataaaagtctgagtgaagtgaagtctgaagtggaaatggtgataaagactggacgtcagattgtacagaaaaagcagacggaaaatcccaaagaacttgatgaaagagtaacagctttgaaattgcattataatgagctgggagcaaaggtaacagaaagaaagcaacagttggagaaatgcttgaaattgtcccgtaagatgcgaaaggaaatgaatgtcttgacagaatggctggcagctacagatatggaattgacaaagagatcagcagttgaaggaatgcctagtaatttggattctgaagttgcctggggaaaggctactcaaaaagagattgagaaacagaaggtgcacctgaagagtatcacagaggtaggagaggccttgaaaacagttttgggcaagaaggagacgttggtggaagataaactcagtcttctgaatagtaactggatagctgtcacctcccgagcagaagagtggttaaatcttttgttggaataccagaaacacatggaaacttttgaccagaatgtggaccacatcacaaagtggatcattcaggctgacacacttttggatgaatcagagaaaaagaaaccccagcaaaaagaagacgtgcttaagcgtttaaaggcagaactgaatgacatacgcccaaaggtggactctacacgtgaccaagcagcaaacttgatggcaaaccgcggtgaccactgcaggaaattagtagagccccaaatctcagagctcaaccatcgatttgcagccatttcacacagaattaagactggaaagaagccaagttggagaaggggagtcagcaatttgggagagatgctagttgaggtatatctaaaagcactaatgagtgaagacttgagaaaagggattaatcaggatgaattctcaccaaccatatattattttccgataacagtgtttggtagtgagggggatctattgctaggtaaaatacgatggattcaaggagcttactgtttgatgatagggcaagatgtgttcatggatactagattgagagtgagtgcatgctttttaaaaaccaaaatgaagactgtacttgttgtttttgatcagaatgaagacaatgagggtactgtaaaagaattgttgcaaagaggagacaacttacaacaaagaatcacagatgagagaaagcgagaggaaataaagataaaacagcagctgttacagacaaaacataatgctctcaaggatttgaggtctcaaagaagaaaaaaggctctagaaatttctcatcagtggtatcagtacaagaggcaggctgatgatctcctgaaatgcttggatgacattgaaaaaaaattagccagcctacctgagcccagagatgaaaggaaaataaaggaaattgatcgggaattgcagaagaagaaagaggagctgaatgcagtgcgtaggcaagctgagggcttgtctgaggatggggccgcaatggcagtggagccaactcagatccagctcagcaagcgctggcgggaaattgagagcaaatttgctcagtttcgaagactcaactttgcacaaattgtatatgaaattgttgtgcatatttcaaagaagaatagaatgcagggtaactctcaaacttgttatttggaattaggtcagataattttgtaa

SEQ ID NO: 3615 - DNA, 1010 bp, Homo sapiens
  SIMILAR (169)..(726): 311254mologous to Plasmodium falciparum interspersed repeat antigen,accession number M17877,Smith-Waterman Score=227.
atgccccgctacgtcccccttctgctgctcctgcttctcctgaggtgttcacaacggggtggaggagttaattttggtgagaaggatgcaaaagtccccgggacctggagagatggagtcagggtccctggagaaggagcctcttgggactcagacagggccagtcccgagcgaaggtacggaataggactaagccaaagcatttccactaagcacccagagaccagccctaaagactcaagaataagagaaaatgatgtaactgcagatggaaggaccactgaggaccacatcactgcagacccagggaccaccgaggactctgtcactgcagacccagggaccactgaggacaatgtgactgtggacccagggaccaccgagggctctgtcactgcagacccagcgaccaccaaggactatgtgtctgcagacccagggaccaccaaggattctgtcactgcagacccagggaccactgagaactttgtcactgcagacccagggaccaccaaggactccatcactgcagacccaaggaccactgagaactttgtcactgcagacccagggaccaccaaacactccatcactgtagacccagggaccactgaggactctgtcactgcagacccagggaccaccaaacactccatcactgcagacccagggaccaccgaggactccgtcactgcagacccagggaccacagaagatgaaaccactaaacatggtgacactcaccttctgtgaactacttcagtcacagcagtgaaacccaccaggctcctgacacccatgggaattatcctcatatccctggctgcaaccacagtcactgttgtgctctttgttggattgggcttcattgtgaaagagtgtttcctgcctccattaaatccatccaccagggttatttatcatccccatgtcatggactacagtacaccataaagaggaccccagcagtgactacagttggttctagaaaaaggagacccctcatccgg

SEQ ID NO: 3616 - DNA, 542 bp, Homo sapiens
  SIMILAR (542)..(3): 681254mologous to Mus musculus glucocorticoid-induced gene 1,accession number AF292939,Smith-Waterman Score=583.
  misc_feature (1)...(542): n = a,t,c or g
acttttcttttntgctcaaggagacagatggagcgagtgttttctttttcatggtcaaggatccggctggcttttttggtgtctgatgttttcacatcttcctccatggccaaggaaaacacgtgttgatgagacatttttttaccacagtcacgttttaagtcctctgactgaaatgtgaaggtcatttcccgcttaatgctccccaccttcaacgcgccccgggccgggcccctggggactgcgtggccgggtccgaggggcacgaaacgctcctcgccgtcctcgtcgtcttcgtcgccgtccaccacctcgacgaccacctcctcgtcctcctcttcctcgtcgtcatcctcctcctccgcgccccctcggggcttctcctccacacgcccgagccccctccgccgcctgctcccgccctcctcgtcctcgccgtcctcgtcgtcttcgtcgccgtccaccacctcgacgaccacctcctcgtcctcctcttcctcctctgcctccgccggtggccgcagggccgggactcgcggccg

SEQ ID NO: 3617 - DNA, 853 bp, Homo sapiens
  SIMILAR (814)..(344): 721254mologous to Mus musculus glucocorticoid-induced gene 1,accession number AF292939,Smith-Waterman Score=545.
caactgctagcaaaatgcatgttggaaaccaagggcttggattttgctgtactgggtttaccgggttctctcacaagcgcctgtgatggaaactcatcggacaattgttcttggttggaagaaggggctgagagattgacaagaaacaccgctttctggtttcaataagcttgaatagcccttcaaaataaggagaaggggacactccttcccgtccccaccgggcacgaaccggcgcctccgtggtcccatcacccaagttccccacctcactggggagaagcgccctttcccggcacccacaccaaacaacaaacccgacacggcctttgaggaaagcgggagccgccgccttcaacgcgccccgggccgggcccctggggactgcgtggccgggtccgaggggcacgaaacgctcctcgccgtcctcgtcgtcttcgtcgccgtccaccacctcgacgaccacctcctcgtcctcctcttcctcgtcgtcatcctcctcctccgcgccccctcggggcttctcctccacacgcccgagccccctccgccgcctgctcccgccctcctcgtcctcgtcttcctcccctagaagcagcagcaccggcgacgaggcggcggcggcggccccggtggcccgaggggggccggtcccggcgctgcgcggcggcggcggcagcggcggcctccagctctccggggcgggcgccggggccgggcccgggacagggggcgggagcccgggtagggcggcttccttggcgggcgcgggcgccggcccggcaggctgcagcgcggcgcccccccggcggctgcccaggctggagcgcttggctagacgccgcgcctgcat

SEQ ID NO: 3618 - DNA, 373 bp, Homo sapiens
  SIMILAR (224)..(21): 1001254mologous to Homo sapiens G-protein gamma 7,accession number AB010414,Smith-Waterman Score=342.
cccatatgagcccccagttataaaataatacaaggtttcttgtccttaaaggggttctccgaggcagggactccgaccagcagggggtcgttccgggcatgttgctcacagtagctcatgaggtcagacgccgctttggagaccttgatgcgctcaatcccggcttctatgcgtagctgttccaccagcttccgggcctgggctatgttgttagtggctgacattgtctgccatcagctctgggccccgttgttcagagagcttttttagttttcccaggaatcacagcttgctgtacaccctgtgcaggaggtctcgccgtctgcagcaccgagatcccgaaaccaagctcctctccctgcgctcgggcccc

SEQ ID NO: 3619 - DNA, 513 bp, Homo sapiens
  SIMILAR (21)..(500): 271254mologous to Gallus gallus C-Serrate-2,accession number D87558,Smith-Waterman Score=105.
tcatccctgctgccctgagctgctgctgtcctgagtggcaggccctggtgtagcagatcctgcaagattccagctgctgccagagcccaagggtgccagggcattcctgtggcaagggcaccactctatgtgttttttccagggagtggagcttggtttcgggatctcggtgctgcagacggcgagacctcctgcacaggtcggtgctgtaatgcatttctttgttatgatttgaggttcagttggctgttttgcaccctggatgtaagacgtggggttgccgtcaaggcgggcgtcttggccttgacctgggtctgtcggctgtttgtatccaccaagtatgggtaatggggagcaggtgtgggtaacagctgctagctcctggcagagtttcccgcccacgaggcagggaacgtggcactcactggtcctgctggtgccggagcccctggatggggtcagggtgggaagcccacagcggtgctgcatgcctttccggtgtcttcgtgccat

SEQ ID NO: 3620 - DNA, 518 bp, Homo sapiens
  SIMILAR (1)..(99): 441254mologous to Homo sapiens Human secreted protein, SEQ ID NO: 6428,accession number G02347,Smith-Waterman Score=68.
ccctcgtctgccggagcccgcgcgcccagccgcccgacttcgccgccgcctggagccggctggccgcgacctcagccgcccgccgcccgccggggagtcctgtgtatggaaactcacatgagtcagctcagtctagaagggtagtaatttctcataatatggataaagctctgaaagaagtgttcgactacagttatagagattacattctgtcctggtatggaaacctcagcagagatgagggacaactttaccatctgctcttggaagacttttgggaaattgccagacagctgcaccacagactgagtcacgtggatgtggttaaagttgtctgcaatgatgttgtgaggactttactcactcatttctgtgacctgaaagctgccaatgccagacatgaagaacagccaagaccttttgtgttgcacgcatgcttgaggaactcagatgatgaatcttgaagccggtagtggagttactgagtaatccagattacattaaccaaatgctgcttg

SEQ ID NO: 3621 - DNA, 1023 bp, Homo sapiens
  SIMILAR (385)..(960): 281254mologous to Drosophila melanogaster CG1514 gene product,accession number AE003442,Smith-Waterman Score=215.
atgggggcagatttgaccacactggctctgggctgtcaagacagccaatctgggctgctgtctctggctgctgttatggcttcattcccggggccactccacttaatacagggacagtacttcagggtaaatgaggcatgcaggcgcctgcaccctccgggcaaggacaaggcgtgtgagagtctctgggtctgccccagcgacgccgtcgggcctctgggcggtgcagcctggtccggcatcatcctggacgcgcgggtaatcagggctgagggagcccaagcaacttcagatgctggagttatgaagaaaaatgagtcagctcagtttagaagggtagtgaagttctcataatatggataaaggctctgaaagaagtgttcagactacagttatagagattacattctgtcctggtatggaaacctcagcagagatgagggacgaactttaccatctgctcttggaagacttttgggagattgccagacagctgcacgacagactgagtcacgtggatgtggttagaagttgtctgcaagggtgttgtgaggacctttactcactcatttctgtgacctgaaagctgccaatgccagacatgaagaacagccaagaccttttgtgttgcacgcatgcttgaggaactcagatgatgaagtaagatttctacaaacgtgttctcgggttctggtgttttgtctcctcccctcaaaggatgtgcagtctctcagcttacgtataatgcttgcagaaattctcacaacaaaagtcttgaagccggtagtggagttactgagtaatccagattacattaaccaaatgctgcttgcccagctggcgtacagagagcaaatgaatgaacatcacaagagagcctacacctatggcccctcttatgaggacttcatcaagctcattaacagcaactctgatgtggagttcttgaagcaactaaggtctgttgaaggaacggtagagaagagtggtagaagatgtgtgctggtcgttttcaacaactga

SEQ ID NO: 3622 - DNA, 4317 bp, Homo sapiens
  SIMILAR (1798)..(3312): 581254mologous to Sus scrofa domestica submaxillary apomucin,accession number AF005273,Smith-Waterman Score=1481.
atgcagtccatgactaagatgtactgtggacccctggaccagcctgctagcccatgctccaatgttgatgacatcgaagtaaaactggaaataatgttattaacagaaagggatgatgggaaagaggtgttggatgttggagaggagagaagatatgaaatagaagaatatgacagcaaatggactagaaaatataattgcctagctgtcttaagggtccattcagggtcccaaatcacaaccatgaagttgatcttatggtacttggttgtggcactttggtgcttcttcaaagatggtaaaatagcagcaagcagatcaggtggcttctcttatggtagttcatcctctggtgacttggacagaaaaaagccactctttagcttggaatttggttctccaggagagactgaagacaagtccagacaacgtcaggatgctgggagtccaaagtcagaagacaccccagcaggtggcttttttaacagtagttcatcctccggtgactcagacaggacaaagccattctttagcttaggacttggtgctccaggaaaggctgaagacaagtccggagacagtcaggatgctggaggttcaaagtcagaagacaccccaccaggtggctttttttatggtagttcatcctctggtgactcagacaaaaaaaagccactctttagctttgaatttggtgctacaggagaggatgaagacaagtccagagaacgctgggatgctgggaattcaaggtcagaagacagcccagcagatagcaccaacacaagatatggtgctggctttagtagcagtggtgcctctctggatgtgggatttggttgggggatatctgatgaaaagggattggaagtcagtaaagctgatgggagagaaactagaggcagtggatctgctgggggtgaaaccatagtctttggacctgatgcagttggaactggttcttctggtttgaaacttggagcagggaaaggtgatgctgcatttggttttgaagtttctgattcgaattcatttggtgacactggcattagtagcaaaacagttgaaggaaatcaaacgagtagttctggaggatctgtttccattgatctaggtgataccagtttcagaagtgagaatcaatttgttggtggtggctctctaaattcgatatccaatttatgggattctggtcaagagggatttggaatcaatgaaattggagggaatggaatgagtggcagtgtatctgctgaggctggattcaaaggttttggatctgattcaagtagctcagtgggaatgcttgagtctcttgaatttggacttggaggaaaaaaagttggagctggatttgattttaagtattctggttcaaggaaatttggtggtaatgagcttagtgaaaatggaataaaagttactagagaatctagttctagtgatttaggtgattcaagtgcaagaaatgggtttgaaaattctagtggcatctctgaagattcaggagtcatattggggtcatctgatcaacatgaagttgaactcagtagaactggtgggaatagaaagagaagcagtgaccctgatgaggctggaaacttgagtcctggatctgatgtcagtgactcaggaggaaacacttggtcttctgattctggaagtggtggaggaggtaagagtgcagatgaacttggtgttggtgcttctggactaaatgaatttggtgaaactggccttagtggttcagggcaagatattaatgagcacattgccaatagtaaaattcctggtgattgtcccaatgctgttggtaaaagctatgaagtttgtgaagatggaatacagcactgtaacaaaattattggaacctactttgagaaatgtggaaaggttgctgctctatccaatgactacaaaatgatctgcattgatgaatactgccaaactagagacaaaacatctacatgtgacacttattcagaactgtcccgcctctgtgcctcagatggtcctggcacctttgaatcctggcgaagcgactccgatgtggtttgtggaacacaaagatgtccagaacaacatatctacaaagaatgtggaccctccaaccctgcaacttgttctaatgtggctccttttcaagacagtgaatgtgtgagcggctgcacctgcccagaaggttatctgttggatgacattggagagaaaggaaaatgtgtattaaaagctgaatgtccctgtgaatccagtggaacagtgtatcagccaggagaagtccgagaaggtccttgtggttctcagtgcacatgccaagatgcaaagtggtcttgcaccgaagcattatgccctggaagatgtaaggtggaaggaagttcccttaccacctttgatggtgttaagtacaactttcctggaaactgccacttcctggccgttcactctgttccagttgacaaatacgtattcaacagtgatggaacagtcacaaatgacaagattagaaatcaaggttattactattcagataaaatacagatattcaatgcatcttcctcataccttcaagtagaaacatactttcatgtgaaactacaaatacaaattgttcctgtgatgcaattgtatgtttctatgccacccaaccaattcacagacactgtgggactctgtggttcctacaacaacaaagcagaggatgatttcatgtcaagtcagaatatattggagaagacatctcaggcatttgctaactcttgggaaatgatgtcctgtcctaaaggaaacccctcttcatgtattagtatagaaaaagaaaaatttgctgaaaggcactgtggaattcttcttgattcaagtgggcctttggcttcctgccacccaattgtgaaccctaaaccctatcatgaggaatgcaaaaaatatacttgcacttgtgaaaacagtcaggactgcctatgtacaattttaggcaactatgtgaaagcgtgtgctgagaaggaaacatacatagtgggatggagaactggcctatgtgaacattcttgcccaagtggcctagtgttcaagtacaatgtaaaagcctgtaatagttcttgccgatccttgtcagaaagagataggagctgtgatgtagaagatgttccagttgatggatgcacctgccctgatgcaatgtaccagaataatgaaggaaactgtgtactgaaatctcagtgtgactgttacataaacgacgaggtcatgcaaccaggcaaactcatccatattgatgacaataaatgtacctgcattaaagggtcttggagttgtacccaaaatgaatgtcaaaccatctgccacatctatggggaaggtcatgttagaacttttgatgggaagagttacagttttgacggtctctgccagtattcatttcttgagggcaaagtgtgtggtctttgtggaaataacaatggtgatctcaaggatgatttcacaacaagatactcttcagtagcttctggagcactggaatttgggaatagttggaaaacaagccaagaatgttcagatacagtggctcagactttcccatgtgattcaaacccatactgtaaagcctgggctgtgcggaaatgtgagatcctcagagacagcaccttcagagactgccacaacaaggttgaccccagtgcttaccatgatgtgtgcattgaagaagcctgtgcatgtgacatggaggggaagtacctgggattctgcactgccgtggctatgtacgcagaggcgtgtagtgcagttggagtctgtgtctcatggagaaaaccaaatctgtgtcctgtctactgtgattactacaatgcgcctggggaatgcagatggcattatgaaccttgtggcacagtgactgcaaaaacatgcaaagatcagctcgttggccagaaattttcttcacttttagaagtttccactacaacagctaccaccatattaagcaccggagcagcaattacactggttaccggtggcccaagcacaggaacaactctaggtcctctcaccgaaccttttactacaggcattactgaaacttcagttcccatcatctcaacatctggaaatgcaggcatgacaggagtagtgagccccaccgtcactggtgcttcaggcatggcagatgttaaacattttcaacctagcctccaccttgctcaccttcctccaaacacaatggtgtttaaagtgtggtttctggaccagcagcatcagcatcttctgggaattccctatcacattatggctatcctttacgtcggagacaaatttctgatctga

SEQ ID NO: 3623 - DNA, 987 bp, Homo sapiens
  SIMILAR (8)..(478): 371254mologous to Sus scrofa apomucin,accession number M21174,Smith-Waterman Score=172.
catatcagctggagtaacagggacaagtggactatcagctgaagcaacagggatacctggactatcggctggggtgacagggaaaactggactatctgctggagtgacagagacaattggactatcagctggactatcagctagggtgacagagagtactggactatcagctggggtgacagggacaattgaataatcagctgtggtgacagagacaactagactttcatctggagtcacagggacaattggaccatcagctgaagagacaggggcaactggactatcagcagaagtgacagggacaactggatcattagctgaagtgacagggacaactgggctatcagctggggtgacagggacaattggatcatcagctgctgggctgtcttctgaccttgaattcccagcatcccagcgttctctggacttgtcttcatcctctcctgtagcaccaaattcaaagctaaagagtggcttttttttgtctgagtcaccagaggatgaactaccataaaaaaagccaccggtgtgggaagttctagatatagcagttgtcccagagaattcttttgtagtaactgtttcactttcagatgctgaactgtctggtgtgacagaggtgcctgggttcttttgggcctgggattgagctcctctgccctgaagggggcttcccaggccccagttgaagattatcaggttagggactttcctcattgaggagcatgcacactcctccaaaaattgtcctgctgtgttaccagggccagtgtccccagtacctgatgttccagctgtgtttccactgcctgcgctggtggtggcttccacagacccttctgttgaacgtgagcatgttgccatctcagcaacatcaattataaggaaaggcctataaatatgttcttctgtgcatatggtaaaaatagtgatgatcagcgcactaccacctacgatgtgcaactgtgttcttgaatccat

SEQ ID NO: 3624 - DNA, 975 bp, Homo sapiens
  SIMILAR (76)..(777): 271254mologous to Encephalitozoon cuniculi polar tube protein,accession number AJ005666,Smith-Waterman Score=114.
gctgggttgtcactgatgggcagcatttgagcctgccacactggcctggaaagttcccttccagtctggattttgtctgctccttcctttccccctcaccccgttacctcttcacctcccatctcatttcacttgtgtagctcagtctctcccacgcacataattggggacagtgggggctctcttaccagcctcctcagcaacgcacgtccatcaggcctggcctcagtggccagccacattgatgtcacactggaattgttaccccagagagggcgaagagataggctatctccccacctcccaccctactccccactatattcccgttttgaccacctcagcccctcagctgccccctctcactttggccaatcccaggcaccaatcagacttcctcctccacctggagcccctagcatttccttgtcccctcttccccaaaacctctgtaaagggtacgagagggaccccctgccgagccgcccgccactcagggcagtccgatctaagaagcagaagctgggttggaggctggctgggcctctgtccaagtccccagatgggataaacttgccttttctcacatcccctcttgggtgccttgatctttctttgcccccggggccaggacccactgtgctgttttctgtcagtctgtggcacagcaccaagctctgccagcaccagtccctgacagggctaggaggacagcctggtcagcagggctccagttcccccagtgccgtgtttcgggggtcaagggatgtaagtggagtcattgcacagagacagaccagtcaggagaaggagctggaatctggcctcttgtcctaacctcaggagccccctccccatcctctccccaccctccctatcggggtacttcactgtttcttttctacttgtgtatactcgagaaagggaagatggttaataaaagggatttgtgctgctgaaaaaaaaaaaaaaaaa

SEQ ID NO: 3625 - DNA, 2182 bp, Homo sapiens
  SIMILAR (847)..(1242): 261254mologous to Triticum aestivum glutenin, high molecular weight subunit type x precursor,accession number AF216868,Smith- Waterman Score=88.
atgccctcagagcctcatcgctgtggagcaaaggaagccgcctcccacagggagccaggtcctgctgcagcccagagcggcccagggaacgccacttcccacagccacgccacacggaacctccggggacgcccaaaaacacctactgcaaacgtggtgaaacacctggccatgaaagaagccagggccaagcccgacagacgcaggacacaggacacagaccaaacgacagcacagcacccagagggggcaaaagtacaaggtcacgaccagtttccaggaggctctgtccactttgggtgccgccccgcaccctcgccccccagaagacagggacgctcgcctggcatggggcaggcgctgatggatttccgcacgaagccctttccccagcagcctaactcgcaggtgtacggccacaccctcagtcctgaagaccagcccctacaggaagcccctgctacacagctgtccgagcaactgaatgtatccctaaccgacacgccccccgccaagtccaacttcccctacgcagctttccttgaggactcaaatgtggccacgtgccctcctctgtggcccctgcctttaaggagacacttgtcccagtgggtccctccaaactgggaacctggggctgcctcaggttcctcacgggagcatggggggattcgctgcaatgccacagccacagtgctcagcaccctcctatcacccacagaagcctgtctgcagagcgctgatggtgaccaggcactttctaagcactcagcggatacgaatgcttcacagccccaaacccaggggttcctggtgtccccccgtcacagatgaagatgctgaatcagacaggggatctgggcagcagcagagccagcgcaccccggcagaggttcttgggaagccccaggtcttggagaggttcctgttgcccacacaaaccaaacaggaaggcagccacgacgaggagacccggcatgttcacaactgcagagagggcagcaccgaaaagcaaggaaggcaccccctgccggccaggccttctccggccagcagcaaacgccttctccaccagggccttctccgccagcagccaaacgcctcctccgccagggccttctccggccagcagcaacgccttgctctgcttcaggcggctaccttggaactaggcagcgagcccttggggctggggccctggggggctgcgagccgacaccggccacaggagaggaaagcaggccatgtcatctcagatgacccctctccccatctgacagcagctctctctgccctctcggttttgccaagcacaccaagccagaaacgcaggactacttggcgccagcactggcatgaaagcgacaaagtgggctggtgcatgccgccagcggacagcgaaaacagaggcatgggcctcaagttggcaaagggtttcagacacaaaaccagaagcactcgccagaaaaacaaagactctggctcacaccctcagtaccaggctttcgacctcagactgacaattacagcaggtttctctgctgcggaggcgtctgagcttgaggggagctgtgctgccgcaacccagatctccagcttgcaggtggcctgtcacgggacttctcggccccacaatcacgtcgtggatgacatcatgaattcaactgcaggacccccaagtggtgtctgtggagaactggagaatgtaatgtctgggaaacccacacagttggtgtcagaaatgttgcaggttcggctcttctcccagcggggcctcattccaacaaagcctcagaatgacctaggtttctgtgaactggaccccgccgaggccttgcatctgaaatcggccaagctgcaccggctgaaacgtcaccggctcctaggacggccgcacgccaaatgcctctcctcaaggcccttcggccagagggtttgtggaaaagtggaatggcagccacgcagcccggcaccccaggtacaaaccggggactcagtaaccaagcggggcggcatccacaggctcccagggacacctccttccccagcgttgcctccatgccgggccagctcacttgtgggaaagcagccggccatggacaagccacaagccaggaaatgcaccgctggccctgtggtgacacctgggaggaggagcaggggcaggctcgagttgttttaa

SEQ ID NO: 3626 - DNA, 426 bp, Homo sapiens
  SIMILAR (85)..(315): 961254mologous to Cloning vector pCMVLacI lac repressor,accession number U64448,Smith-Waterman Score=355.
tggactcttgttccaaactggaacaacactcaaccctatctcgggctattcttttgatttataagggattttgccgatttcggaaccaccatcaaacaggattttcgcctgctggggcaaaccagcgtggaccgcttgctgcaactctctcagggccaggcggtgaagggcaatcagctgttgcccgtctcactggtgaaaagaaaaaccaccctggcgcccaatacgcaaaccgcctctccccgcgcgttggccgattcattaatgcagctggcacgacaggtttcccgactggaaagcgggcaaagacagatggatcttggagaatgacagtggattatcgtaagcttaaccaagtggtgagtccagttgcagctgctgtaccagatgtggttgtactgcttgagcaaattaacacatctcctg

SEQ ID NO: 3627 - DNA, 266 bp, Homo sapiens
  SIMILAR (3)..(137): 861254mologous to Mus musculus Pro-Pol-dUTPase polyprotein,accession number Y12713,Smith-Waterman Score=211.
ctgctgtaccagatatggtttcattgcttgagcaaatgaactcatctcctggtacctggtatgcagccattgacttggcaaatgcctttttctccattcctgtccataagccccaccagaagcaatttgccttcagctgccactcctgtcatcgcccaatgggccctgaacaaagtggccacggtggcagggatggaggttacacatgggctcagcaacatggacttgcattcaccaatactgatctggctacggtcaatgccaag

SEQ ID NO: 3628 - DNA, 2286 bp, Homo sapiens
  SIMILAR (1029)..(1124): 871254mologous to Mus musculus Pro-Pol-dUTPase polyprotein,accession number Y12713,Smith-Waterman Score=153.
atgtcactgtggtcctccagtaaagtagaggcttacggaagtcaggtacttaaaggagttttagctcaggtccaacttacagtgggtccagtgggtcctcggactcatcctgtggtcattttcccagtgccagaatgcataattggcatagatatgcttagtagcaggcagaacccccacactggctccctgactggtagggtgtggactattatggtgagaaaggccaaatggaagccattagagctgcctctacctagaaaaatagtaaatcaaaaacagtatcacatccctgaagggattgtggagattagtgccaccatcaaggacttgaaggatgcaggggtggtgattcccaccacatccccattcaactctcccatctggcctgtgcagaagacagacggatcttggagaatgacagtgggttactgtaagcttaaccaagtggtgactccaattgcagctgctgtaccagatgtggtttcattgcttgagcaaattaacacacctcctggtacctggtatgcagccattgacttggcaaatgactttttccccattcctgtccataaggcccaccagaagcaatttgccttccgctggcaaggccggcaatacacctttactgtcctacctcaggggagatgggaaataaatatgactaaaattcagggaccttctacctcagtaaaatttctaggggtccagtggtgtggggcttgtcaagatattccttctaaggtgaaggataagttgctgcatttagtccctcctacaaccaagaaagagcacaatgcctatctggatttcggagggaacacattcctcatttggcccatttatcgagtgagccgaaaggctgccaattttgagtggagtccagaacaggagaaggctctgcaacaggtccaggctgctgtgcaagctgcttggccacttgggccatacgacccagcagatccaatggtgcttgaggtgtcagtggcagatagggatgctgattggagctgttggcaggcctccatagccataaagtgggtcatgcacagcagcattccatcatcaaatggaagtggtatatacgtgattgggctcgagcagatcctgaaggcacaacaaagggacaaggacagcggagatggtggcaattggcagagaggcaagacagcagagacagagaggcagcaattggtgagagacaagagacagcagttggcaagacagcaagagacggtgaagcagtctgtgattgaggatgtggtgaaactgagtggacagccaagtgtccatagtacagctgcctcgtgtgggacccactgctctaacgagccagcccccgacacagaagctgagcacccccaagctggggaacctagagagacctgcacccgggtcccacgtggaagactggctggtgccattttgtcttctgtggatggatccaggactaaacctgtttcttatgagtcacaggcacaaaggaagggcactacaaccacaaccaatatcagtaaagctttggaagacctctgctacctatttaaaataatcaacactcagccagaagagattaccacagttccagagacaatgctggcacaaggcttccagcccatcctgtccactgacacggagaatgaaatcgtcctgcctctgggctccttagatcaggaagtagttacggaaaacagatctccgcccttctgcagcccccttaagattaaggaggagtatctaatctctgaagggggaatgaggcccttctgcaaggtattcctgctctttccaggaaccatcggcagctggtttggggaaagaagcaacgactccaagtgtgacctgacgttgcaaggatacaatgaggtgagccacgcacagggcttcacgtgccctttgagtgtccaacactccatcagcaagaaatcaaggccgcgcctcttccccgggaaactcgagtcccgaatttcctcggaaagcgccccagcggccacggccaacggatgtgacgaggctcatctgataccggggggaaagtttcgagaacccttaaaggggcagcgagggcctgaactagggccccggccccgcgcgcttgggggtccgcgggggtctattcgcccggcagtggcgggagcttccgggggtgactcggaggtcagatgctactggaacccgctgcctcccctggcacccagccctcaggccacctaccagctctctgcggactgtctaattaatactcgtttagccatagacgccaagacgcagaaatgcgttgagtaa

SEQ ID NO: 3629 - DNA, 1219 bp, Homo sapiens
  SIMILAR (499)..(621): 731254mologous to Mus musculus Pro-Pol-dUTPase polyprotein,accession number Y12713,Smith-Waterman Score=152.
gagacctctggccttttaccagggtaactgtgcattgggaaaggcaaatgatcagacatttcagggactactggacactggctctgagctgacattgattccagggtacccaaaacgtcattgctgtcccccagttaaagtacgggtttatggaggtcagacagatggatcttggagaatgacagtgggttatcataagcttaaccaagtggtgactccaattgcagctgctgtaccagatgtggtttcattgcttgagcaaattaacacgactcctgccataaagtgggttgtgcacagcagcattccatcatcaaatggaagtggtgtatatgtgatcaggcttgagcaggtcctgaaggcacaaccactgctgagtgcccaatttcagcagcagagaccaatactgagccttcggtatggcaccatttcttggggcatcagtcagctacctggtggcaggttgattatattagaactcttctgtcatggaaatggcagagtgcttctgccaagactaccatccatggactcacgaaatgccttatccatcatgatattccacacagcattgcctctgactaaggaacttgctttatggctaaagaagtgtggcagtggtactgtttttcccatagccaggattcacgggtccaggaatcaaggggtggaattggaagttgcaccactcaccatcacccctgctccttccccaactaaccacgaccctcgcaacactcacctcacttcccccttaaatgttggccctactaagcaggaggcagttcctcgcgcagaaagatacaacttcctcttcaagggagatcagttggagacccaagtgtgtgttttggaagtgagaggaaggtgcctgcggagggagaggctaaagggagaagaaaggaggatgtgggtggaaaaaagattagaaggaggtgagaagacccagaaccattgcacctgtcactatgactacatgactacgattactcccatttcacaggggaagagagctgaattatcttggagcttctcctttgatatagcagttgtacagctgacccctggaagagcagaaatccttggctcgggttctggagtggatgggagacagtttactgataaacttattaaaaattttgaagagggttgtggtaggattgagaaggcaattattcttgatgatgatgatgatgacgatgatgatgatgaaatgtga

SEQ ID NO: 3630 - DNA, 1221 bp, Homo sapiens
  SIMILAR (369)..(223): 971254mologous to Homo sapiens GKAP42,accession number AF319476,Smith-Waterman Score=264.
ctgtctctgagccttggtttcttcatcaggaatagagatacttattctgcagggccaatgattggcatctaagagatgataaacatactgaatagtgagctcattcttgatactttgtgattcatcaacttgcagaagtatttctgccttatctttcactccttctacacagacacggcaaccatccgatttctcaatcttttccccacctttcccccttttctgctcatctctttgtctccactcttgccaattttcttctcgtgaatccttctgtactgggtttgacaatggaagatcatgttgagcgttacaaacagcatgggaggatttctggggaattttcttaaaagcaagattcctgagctgtggaaatacacatttccccaaagccaactcactttcatttcccacaatgatccaggattccaatagctcagtgagtaaaacagacccggtctctgcttttaaggggctcacaaagtaaagaggaatataatgactcgtaaaaatatagagggtactgtggtcgtgtgggtggagtgtatctagcttttgggggttctgtatgttagctcccctggtttttggtattctggttcctgcactaattcgtttacgataattggcctccagctgcatccatgttgactctgatggtgctagttgccgccgaattgcttcccctaccagttccttaagtttcttcttatgatcccggctggttttcttatagaaataaagatctttttccaactgctggattttatcttcatatgttttgaaagtttccataatgccttctccatcttgttcaaggctgacctggctacggccactgctgagtgcccaatttgccagcagcagagaccaacactgagccctcaatatggcaccattcctcagggtcatcagcgagctacctggtggcaggttgattatattggacctcatcacccctagtgatccattagcaacatttttgcttcctgttcccgcaatattatgttctgctggcctagaggtctttgtttcagaggaagaaacactgccaccaggagacacaacaatgattccattaaactgaaagttaagattgccacctggacactttgggctccacctggcaggctccacttcacattctagttctcttgctatttccactacttctacagtcccctcctccatagaagtcttgaacccctcaaaggcatccat

SEQ ID NO: 3631 - DNA, 1374 bp, Homo sapiens
  SIMILAR (1310)..(1372): 711254mologous to Mus musculus Pro-Pol-dUTPase polyprotein,accession number Y12713,Smith-Waterman Score=79.
atgtgccctgctgtcacatgcattgaaaggttttgtaaatgtattgctctcagaacacctcagggacttcctgtggacccactcactggtctacaggatgcggggcttgacgtcacacagaatgctaccatgagggctctttctgagctggctataaagaaattctctgacctactttgtttgaaagtagatcataagaccctcattccagaggtcctgccctacacccaggggaaaggaatgccacacagagaggccaagaagaatctgaaagacagtgagcagagggggagagccactgagaagaaagagtcaagggagaaaagtctggatgtggatgggagggatgagggcacccacactgctcatgggaaactgccttccaaatcctcagtgctagttccttattgggagtggagttggcggtcccctgctgctgttgctgtctcctggcctcaccaggtgtctactgttagaatgagggcattgattggaaaagaatgggaccctgcaacttggaatggggacatgtgggaggaccctgatgaagctggggacactgagttaataaactctgatgaacatttttggccagaagtaacagcttccccatccccagtagtggcaacgtcctctcccccacccatgctgctatcagcctttccacctttgtctgaagagataaaccctgcgctgcctgaggcagttgccaggcaaaataatgttgattctcctcagaagccacccccaacacctctgtttgcttctaggcctataactagactaaaggcttggtgggcccctagagtgtcagaatgcataattggtatagacatatttagcagctggcagaacccctgcattggctccctgactggtagggtgagggctactgttgtgggaaaggccaaatggaagccattggagctgccatcacctagaaaaattgcaaatcaaaaagaataccacatccctggagggattgtggagattactgccaccatcaaggacttaaaagatgcaggggtggcgattcccaccacatcctcattcagctctcccatttggcctgtgcagaagacagatggagcttggagaatgacagtggattattgtaagcttaaccaagtggtgactccaattacagctgctgtaccagatgtggtttcattgcttgattttgagtggggtccagaacagcagaaggctctgcaacaggtccaggctgctgtgcaagctgctctgccacttgggccatatgacccatcagatccagtggtgcttgaggtgttagcctttgggaagctccataggcgaatcacagtggaagcctctaggattttggatcaaggccctgtcatctcctgcagatag

SEQ ID NO: 3632 - DNA, 945 bp, Homo sapiens
  SIMILAR (1)..(654): 641254mologous to Mus musculus Pro-Pol-dUTPase polyprotein,accession number Y12713,Smith-Waterman Score=668.
atggtgggaaaggccaaatggaagccattagagctgcctttacctagaaaaatagtaaatcaaaaacaacaccacattcctgaagggattgcagagattgctgccaccatcaaggacttgaaagatgcaggggtggtgattcccaccacatccccattcaactctcccatttgtcctgtgcagaagacagatggatcttggagaatgacagtggattattgtaaacttaaccaagtggtgactccaattgcagctgctgtaccagatgtggtttcatttcttgaggaaattaacacatctcttggtacctggtatgcagccattgacttggcaaatgcctttttctccattcctgtccataaggtccatcagaagccatttgccttcagctggcaaggccacaatatacctttactgtactacctcaggactatatcaactctctggctttgtgacataatcttatttggagggaccttgactacttttttgcttctgcaagatatcacactagtccattacattgatgacattatgctgattggatccaatgaccataaagtgggtggtgcacagcagcattccatcatcaaatggaagttgtatatacatgatcaggctcaaacaggtcctgaaggcacaaccacctctgtcattgcccaatgggcccatgaacaaagtggccctggtagcagggatggaggttacgcatgggctcagcaacatggacttccactcaccaaggctgacctggcgacaaccactgccgagtgcccagtttgccagcagcagagaccaactctgagccctcgatatggcaccattccttcattgcctctgaccaaggcactcactttacagctaaagaagtgtagcagtggacccatgcttatggaattcactggtcttgccatgttccccatcatcctgaagcagctggattga

SEQ ID NO: 3633 - DNA, 1270 bp, Homo sapiens
  SIMILAR (502)..(624): 651254mologous to Mus musculus Pro-Pol-dUTPase polyprotein,accession number Y12713,Smith-Waterman Score=145.
atgggggatccttctagacgtcgaacatgcagggctatgcaagccaagtatccattggtttttaaagggtgtggtgtatgttggggttctctagatccaagatgcagggttgcaagccaagtatggccaataccaaaacgcctctcccgcggttggccgtttcataatgcagttggcagacaggtttccgactggaaaagcgggcaggattttgccgatttcggaaccacccatcaaacaggattttcgcctgctggggcaaaccagcgtggaccgcttgctgcaactctctcagggccaggcggtgaagggcaatcagctgttgcccgtctcactggtgaaaagaaaaaccaccctggcgcccaatacgcaaaccgcctctccccgcgcgttggccgattcattaatgcagctggcacgacaggtttcccgactggaaagcgggcagtgagcgcaacgcaattaatgatactttgccttttaccagggtatctgtgcaatggaaaaagaaaattatcagccattcagggactattggacaatggctctgagctgagtttattcccagagaacccaaaacgtcattgtggtctcccagttaaagtaggggcttatggaggtcagaagacagacagatcttggagaaagacagtggattattgtaagcttaaccaagtggtggctccaattgtcgctgctgtaccagatgtggggtttcattgcttgagcaaattaacacatctcctggtacctggtatgcagccattgacttgacaaatgcctttttctccattcctgtccataaggcccatcagaagcaatttgccttcagctggcaaggccagcaatatacttttactgtcctacctcaggggagatgggaaataaatatgactaaaattcagggaccttctacctcagtaaaatttctaggggtccagtggtgtggggcttgtcaagatattccttctaaggtgaaggataagttgctgcatttagtccctcctacaaccaagaaagaggcacaacacctaacgggcctatttggatttcggaggaaatacattccttatttgggtgtgttactctgtcccatttatcaagtgacccgaaaggctgccagttttcagtggcgtccagaacaggagaaggctctgcaacaggtccaggctgctatgcaagctgctctgccacttgggccatatgacccagcaggtccaatggtgcttgagatagcagtggcagatacagaggctgtttggggccattg

SEQ ID NO: 3634 - DNA, 1979 bp, Homo sapiens
  SIMILAR (10)..(303): 811254mologous to Mus musculus Pro-Pol-dUTPase polyprotein,accession number Y12713,Smith-Waterman Score=409.
ctgacaatttatgcagtaaatctgtctctcatccttccccaaggtgacctctggccttttaccagggtaactgtgcattagggaaaaggaaatgatcagacatttcaggaactactggacactgggtctgagctgacattgattccagggtacccaaaacgtcattgctgtcccccagttaaagtacgggtttatggaggtcaggtaattaatggagttttagctcaggtctgacttacagtgggtccagtgggtccccggactcatcctgtggtcatttccccagtgccagaatgcataatacatacttagcagctggcagaacccccacattggcttcctgactggtagggcgagggctattatggtgggaaaggccaaatggaagccattagagctgactctacctagaaaaatagtaaataaaaaacaatatcacatccttggagggactgtggaaattagtgccaccattaaggacttgaaagacacagaggcggtgactcccaccacatccccattcaactctcccatttggcctgtgcagaagacagatggatcttggagaatgacagtggattattgtaaacttaaccaagtggtgactccaattgcagctgctgtaccagatgtggtttcattgctggagcaaatcaacacatctcctggtacctggtttgagtggagtccaaaagaaggctctgcagcaggttcaggctgctgtgcaagctgctctgccatttgggccatatgacccagcagatccaatggtgcttgaggtgtcagtggcagatagggatgctatttggagcctttggaacgccgccattggtgaatcacagcggaggcctctaggattttggagcaaggctctcctgtcttctgcagataactactctccttttgagaggcagctcttggcctcttactgggctttggtggaaactgaacgtttgacggtgggtcatcaagtcaccctgcgacctgaactgcctatcatgaattgggtgctttctgacccatctagccataaagttagtggtgcacagcagcgttccatcatcaaattgaagtggtatatacatgattgggttcgagcaggtcctgaaggcacaagtaagttacatgaggaagtggctcaaatgcccatggtctccactcctgccaccctgccttctctttcccagcctgcactgatggcctcagggggagttccctattatcaattgacagaggaagagaaaactagggcctggttcacagatggttctgcacgatatgcaggcaccacccaaaagtggacagctgcagcactacagcccttttctaggacacccctgaaggacagctgtgaaggaaaatctccccaccaccccgtcatcgcccaatgggcccatgaacaaagtggccatggtggcagggatggaggttacttgtgggctcagcaacatggatttccactcaccaaggctgacctggctatggccactgctgagtgcccaatttgccagcagcagagaccaacactgagccctcgatatggcaccattcctcagggtgatcagccagctacctggtggcaggttgattatatgggacctcttccatcatggaaagggcagaggtttgtcctcactggaatagacacttactgtggatatgggtctgcctattctgcacgcaatgcttctgccaagactaccatccacggactcacggaatgccttttccactgtcttggtattccacacagcattgcctctgaccgaggcactcactttatggataaagaagctccaagtgcttcagttttgggactcgcactggctctccttgctcctcagcttgcagacagcctattggaggaccctgtgattgttaagggtacagatgaagctgaatatttccagtcagtacgggaagagcctgattctggggtgaagaggaaaaaaatgttgaaaagtgggaagaactactga

SEQ ID NO: 3635 - DNA, 765 bp, Homo sapiens
  SIMILAR (377)..(556): 341254mologous to Drosophila melanogaster RACK1,accession number U96491,Smith-Waterman Score=95.
atggggaaaatagtccagcctgagaaagcagtaagtgcaaaggcaggggtgtgtttgaagggctgtgactgttccgagtacaaagttcagtgtgagtggcaggatacctcaccaaagtacttgggcattgtgctttcttttggagaagagccagtgacacatttacgctgggatttacatgcttggagttacgctcttagcaaggtaataagcacaatatgtaggagaggaaaattctcagaatttaaagctcatacagctccagttcgaagtgtagacttttcagctgatggccagtttctagctacagcttctgaagacaaatccataaaagtatggagcatgtatcgccagcgcttcctgtattccttgtatcgacatacacactgggtacgctgtgcccaaattttcacccgatggaagactaattgtgtcatgtagtgaggataaaactattaaaatttgggataccacaaataagcaatgtgttaataacttctcagattccgttggatttgcaaattttgtggacctttaaccccctagtggtaccatgccatagccttcagcaggttcctgatcaaactgtgaaagtctgggatgtaagagtgaacaaattacctacagcattaccaaggatggtttactacggagctaaatgccatttgtggggctgttggagcttcacggaaaatagtgaacttagctttcaactgttctgcacatctatacccatctggttttgagttatttggtgctgcatag

SEQ ID NO: 3636 - DNA, 812 bp, Homo sapiens
  SIMILAR (33)..(563): 271254mologous to Araneus diadematus fibroin-3,accession number U47855,Smith-Waterman Score=89.
ctaggcggccggcagcgcagggctgcccgctaccccgcagccgagggcgcgcagagtggggagacggcgcctggggccaggggcgcgcggagccgggggcgcgggcggggcggctggctgcagggccctgcgcgccaccgcgcgagccgctgggtcacagcccgggccgcacagcccgggccgcaccgcccgctccgcgaggaagtgacgactgcgccgtcccgagagcaacaaagttagagtctgcgggccgcactcgcctgcgccccgcacccctccgagcagcccggggatccagcacgcaggtaagccgcgggctcggcgccccctcccgccaccgggcgccggcgtggggctcggaatcgttccggggctcgggctgggccgcgcgggcgcggatgtggcgggccgggttgggccgggcgctggggtgccggggtgctgcagggagggagctcggcggccggggtcggggcgccgggctgcgccggtgttgtcgccgctttgccgcgggacttcaaacagcaagggctgcagcggggccagctccaggcgccgttggccttgagttcgcaggttggagcctgctgaagctctgccctctggtatgtttatgatgaggaaatcctgttcagtggcccttacatcatcattgtcatcatcaccatcatcatcatcatcatcatcgtcatcatcatcatcaccgtcgttaacccggccagacgtctctcccagagtgacagcagcaactggggacatgtacagaggctccttctcaggcctgacaaaggcactcagaacctggcccaggc

SEQ ID NO: 3637 - DNA, 1071 bp, Homo sapiens
  SIMILAR (134)..(39): 401254mologous to Nicotiana tabacum extensin (AA 1- 620),accession number X13885,Smith-Waterman Score=58.
atggggcggacctggttcaagtcccggctgagcactcaagggctgggagcagcctccgtcgggtcaggggtattttcccacaaggtggactcggtgggtttgaaagatggggagctggggacccctggacccggcttaaggctccgtggcccggcccgcatctcctgccgccgtcgcaggccctttgaagctgccccatcctttggtgcttttgaaatgtctttattaatcacctaccgtttgccaagccagaggtggcaaaggtgctggggaatgaaagggaggcgagtgatttctctgactccttcaggcccaggcctccgaattcctccaactcccagtttgaccatatttgtgacaagtcagagacgatacagcaaggggaagaagacacgttcccttccctctagaaagtcacagtcacgcacagaaggcagaaggcttgcagtgcacagcgacgggataaaggaaccagctctgcaacagaaccctccagaggaggcaaaggaggtctctcaggcagagcgagaacatgtcattccttcagggacagcagaaccaccacagcgtctcctggacttagcagaggtcgctggtgtggctggagcaggggatgccaagcctgctgagggcttcatgggccgcagggaggagtttggtttttctcctgagggcactggggagccacagcagagtttagagcagaagaaggacacaatttgtgccctgtgcccgtgcgtttgccgattcccagggcccgagcgctccggcgagtgtgtgtgtaacgccctctccctggacgcctcgagtttaggaaacggcggagccgcccggattgaaattctcggcccgtgcacgcccggcggagaaatccatgacgcattgtttagacagacgcctttaaaccgcgccgcggcggggggcggcggccgggggcgcctgcgcggggaagtcctggttgcaggcattgtgggcaccacccgtgctgcccacaggaagatcattgtccgtagcagcatcctgagctgtgacctgcgtttatttccccatggggacgtggggtctccctga

SEQ ID NO: 3638 - DNA, 169 bp, Homo sapiens
  SIMILAR (4)..(159): 901254mologous to Homo sapiens dJ579N16.1 (KIAA0685),accession number AL096767,Smith-Waterman Score=244.
gacttctctgactaccagatccagcagatgacggccaactttgtggatcagtttggcttcaatgatgaggagtttgcagaccatgacaacatcaacgccccatttgacaggatcgcggagatcaacttcaacatcgacactgaggaggacagtgtgagcgagcggggct

SEQ ID NO: 3639 - DNA, 189 bp, Homo sapiens
  SIMILAR (2)..(184): 711254mologous to Homo sapiens dJ579N16.1 (KIAA0685),accession number AL096767,Smith-Waterman Score=193.
cgccccatttgacaggatcgcggagatcaacttcaacatcgacactgaggaggacagtgtgagcgagcggggctcccagcgcagctctgaggcctgctgcagcgaccgcatccagcactttgatgaagacgaggacatctcggaggacagcgacactcgcggtgctgcccaggtgaaggccagagccag

SEQ ID NO: 3640 - DNA, 352 bp, Homo sapiens
  SIMILAR (63)..(278): 371254mologous to Homo sapiens Protein encoded by the human mutant Pitx3 gene,accession number Y02613,Smith-Waterman Score=86.
acagtaagcacaatcttaagctcactgcaacctcccagcctcaccgcccgatgcagctcaagcctgcatgcgtcccacctgtgctgtcctcccctcacatgtggggcaggtctgacacctcagagggtcctgctcactgacccccggcagtcctggagggtctgtgtggtactggggctctaggcgtctcccccagccaagctgcaagctcagcaccaggctggctctacccgccctgttgaccggcaggccccatctgtgctcacagctcctccccttgtttggccaccctttcctcagggcatctgcagcaagtggggggcacagcacgggaaacggggccaaggccaca

SEQ ID NO: 3641 - DNA, 9026 bp, Homo sapiens
  SIMILAR (8829)..(313): 1001254mologous to Homo sapiens neurofibromin,accession number M89914,Smith-Waterman Score=14667.
atcctctcttacaattgagatttctcagttaaaagtttcctgacctcccactttctttgcagttgttctgaacacttacatataccagatacacgccaaaagtagaagaaaaaagttaaagaaaaggcagcattaaatttaggcaaggcttcgaagagttgatcatctggcaacatggcaaaccggatgggttcattataaaacaggaagtgcagcattacaacatggggggaaagggcaaggacagggaaggggtcactagtgaagagcccatgttaagttgattttaaaaaagaaagcaagcaagcttcacacgatcttcttaatgctattacgtttgaaactgccagcgcttctttgcttctgcacttggcttgcggatccgtggcgagttcgtccactgttacagtggccagtggtaggggagagttcaacgttctccttgtcgattcctggggaatgctgggaagttgcaagtgaggtcatggaattagaaaggttaaggttggcagtgatactaagctggctctgcagtgcaggagggtaaggagatgtgggagtcaggagggattcttcactggtttcttcatcaattccaggcaggtacgtgtcaatcaaggcatcaagaaacttaacaataagctcagcatagtctggaatttgtgtttgctttgaaaacggtcctgcaaaccgccacaagccattaaaaccaaaactttgcaggtaagatgtttggtattgtggtggggattcttcatggtacaccacactctgcacaattccatggattggatttaacaaatttggatcttggcacaatgataacagggtgttgatcttagagtccaacaaattatgcacaacaggaaagactttgggaaacacaacactggcctctgctaagtattcataaagaattcgttgatcaaactcatctgtggtatattttaccagtgtagctagaacagtaagaagcagcgcctggatcttcggatcagtaagtacttcttcatccaagagaacatttgattcagacactgaaactttacgtaaatgtgggtgctgttgtgatgaggaaatcctctgagtttccatttcataatcagtttctgctactctcctcattttggggggtgttgtgatccctgattccatttcttgccttttaggagcctttgtgtctgatatcaagtgatcaaaacttttccttgttccaagcaacttcttagtgttggcctgagaaggttgccccatgtccaggctcatggatttcctggctcggggactggtctggccgacagttggataggtggctgcaaggtatccttcagaacctttgggagaggaccatggctgagtctcctttagtgtcctataggaagggtcaccatgatgaatgggatatgtatccataggaacattttccattgaaatatcagtaagaagaagtgactttctatgttttaggctgcagcgacttcgaacttcttcagacactgtaagtaaagctgctaagtaggccacgctctgtgtattcacttcaaatttgtcacaatttctgtgtttgttaaccagagttagtagtgtatgtaaaattctgactgttcttgcaacaatagcaggtgaaggatgcctgtacccttttaaaaggtgtccaaccaatgcaaagttaaagttagagttgaaattgagtccaacaaaatgatccatttgcttgcagtgccactccagaggattccggattgccataaatacttcctctggactcttgtcattgaatatacggagactatctaaagtatgcaggttttgttcaagaagtgcggtacctgctgaatacaagttgacctcatcaagctgcagcacagccacagctacccaaaagagggctttgtgcagaggcgagtccttattaagaagtggctgtaatttggttagtgctattactgtagcttctatcagaacttgactgttgtaagtgtcaggtccttttaagcaactctcaagtgccttgctaagaatacggattatctgctttatctgcccatgagacactcgtttgctaatacacccaaagacaacaagagctcttggttgcagggatggattatattggaatgcaaatctttgagctagttctgtccactggtccagccacttgcacgttggaatatctctcatgcatgcctccatgatctccaacaaagcttctgtgactgtttccaaggatgtcaaagcaaaagtctctctctcataggagccaggagagaatgacctgtcccggtaactggaacggaaggcaatgacagcagctgacttgactttgctaatgccaaacagcaagtaaaatttgggtaatgagaactctgtcagactgagtctcaaaacttgcttggtctcttcactaaaatgaagctgtgaacaagtacacagagagtgaatgatattaatgaccagtccatgtgtggaagctctaagggagagcggacctgtggctactaagaaagtaacaacgtggaagaggtagggaagatgagctgccacatcaagggaattgttgaaggacagcatcagcatgtagcgtgctaaaatagcaatatcatcccacataagatgttgttctaaagtaggagttggagataagcatgtcttgtcaattattttgcacatccttccaataaccttgcttgaaaccaatttcacatttccagaagccaaagctacagcagtatctgccatcacctcagcttttattgatcccaagccacctgttgcactggttttgatgaaactgtctagtacaacatcaagcagatctgtaatctgcccaaggcttccccatatttttgcttgaatagatgggtacatctgtttttcattgatggtcattgttatcagcttgtcaagaatagcagtaactctttgtcgtttggcatcatcattatgcttgcaaaaacgaactagatttgacagccatggagtcatgtattccaaacaaaggtgtttcaattcaatactagatttgctaaatccagaaatacactcttccaaaaattctaacgtgaggtgtggctcattggctgccagtgtcttactaatagagacaataaagagggtgttgttggcagggatacataaacctgatgtctctagtaactggccctcgatttttaaattaaaggtacaagttaaggcacacagaagattataggcagctgaccgtaaactcgggtcagaactgcctaaattaagtaatgcgatattgagcagtgtcccagggacatcttttggccgaatcttggtgtgttgggggatagagtcgggctgtgacagttcccagcgggtccggatatgaatgatagactggacaatggcttcacactcctggtgcatgaaggtgagcggcgtgccctggtttgcaatggttaaggtgaactggttctcatctactaggcagatttcttcaatttccgaagcataataaatgtcatttagaaagactgattgccctaggacttttgttcgctctgctgaagttacttggacagcagtagaaccaactttaatggaaactttggtgtctttgtgagctagcttgagagcattgtggaataccttcaggtcctcttctaaagccaaggtggcagcaggtagtttctgttgttcatgctctatgtgctcagccagtttcccaggacagtctatgaaaacaagccttttgctacctttgaggccagtcagcagccgctcatgatacttggtgtactccctgacccaggagttacagttatagatatagactgcggagacgttgtcgtaagcaaagccaggaaaaacaacaaaccacttagagagaaagtctgttttaaagcgattgctaggcccggtatgggtaaggtccactacaatttcatatggctttgcataatatggctttaaagtcagtaagacatggtatatcagcaaatcaccattgatttgaccagttttgaacctccgtgcaacataataaaaaataggattcccagctttggaagtcccagcttggtagaaaatacttaacgttttcaaagccttgaattcttctttttcatgtacctgatgcctagtcataaattcctcaaactttgaactggtaaggttaaggctggaccagtgtgtatctgccacaggtttgtgctctggaggacccaggtatgcaagaagtgttgccatcttatcaaaaggtcgtcttccaacagctttatgatccctgttgctggaaagatactgcccaattttctcctgattgttccagagtagacgatgtaaagcaagcacattgccgtcacttatgaaggaaagactatgatttactgcatcacttgtaggacaatcagatgctatatcaaggaaaaacctgcgtgctgcatcaaagttgcttttcacaaaatcattgaaaggccgcatatgttcttcttttgtgaagagaacatgattggcaatactctgaagtatctttgacattaacttcaagcccctttcgattctaggtggtggctttttatctaaaatccctgcttcatacggtgagacaatggcaggattgataaatctgaggaacatggcacttcctactgcaccgatgctgttctgagggaaacgctggctaaccactgattttttgttttcctttttttcttttactgtagctttattcagtagggagtggcaagttgcctggtataaacagtggcacacacttcgaagttgaggggggaattctgaggaggaactgatgatggcatggaagaacttttcagtcatctgaaggaggttccgctggttttcctcaaggctctctgatggttctaacctggtaggatccacttcaaagctaacatgttgccaatcagaggatgtgatcacaattcgtaataaaggatccaggagtttttgtagataggtagcaccatataccttgaaacagaatgtcattattttactggccaagctgttgcctcggaagagagtctgcatggagtctgccaattctacttctttagaaaacatgttccagagcagttggtagagtaaatgccgagaatcaaacagagtaaccagaactcgagctagttcatcccactgagaacaaggaaccacattggccagagccatcgctatagggagttctccttgatcacccatcattgtgaccagttccaccaatctctcaaaccgatcagccaatactgtttctgcaagtgtgtcaaattctgtgccttgttgaaggatttttgtcagaacttccataaatgtagctcttgtctggagatccttgtggtaacctaagcctatggagtgcatgagaccactgtctacgttggcattgagtaagtttgacattgcaaggaccgtacagtgcctcagtgatgccagcctccgagacatgccacgtttcctgccacctgtttgcgcactttcatcttcaacttcactgcagtcattcaaaaggttcataaataatgtgaagtatttaagaaataactgtgatttggcttccatcaattccacaccatctccttcttcaggctgcagagggagaccagctagaagtgaaactactgcttccatgcttgcctggtccaaatctcttgtaagacattttacatcatcatctgctgcttggtttgatgttcccataacccagtctgtcaggtattctaccatcttattcctaaatttcatctcttggcaaaatgagaggtcatctctccttgccatcattacttcaactaattgacacagtttcgtttttatttgaattgcatggaccatattcccaagcacacgaacatacctgaccagatttaacatcattgtttcaatgctagcttgccctagatgttcagagctgccttcagtatgattatctagcaagttcttcattatagctatggtttgttctacaaattgagtattggtatcagtcaataaaacctgtccttgggagtcaaaaaacttgctgatggtattcttcaatttgttaaatagcattggatacagagcaggactcaattctagacccaccagatccttaacattggtccgtatttgaagtcccactttctcatggttacacaccattaaggacaacagccgatccataaatttgctgacaggtgtatctgcgtttccctctgaagacatcactgaaatcatagaacccttacgttcactgactggacccatgggtgggctataggttgccaggccagaattgcttctctgctggaggcacactcccccaagggcacaaaggaagccagtcatgttgatccattcctgtagggagtctgtgtcagacaaatctatggatcctcctccactcacatgggacattcgcctcttaacaatggtcttgtgaaggctttcagcagcctggccatcttccattttggcttttggatagttaaggattagctttgttgcttgttcccattttgcatgtgtatcttcccaagcctcagtgtttcctgcagtgggatgctcaatgcgcctcagcagtgccatcactcttttctgaagtgctgctcttcctgttgacatcatattgctgacagaggcaaactccatgaatgtgttatagttgggcaagaggttatgcactgacacttcatccaccccacaccggatatctgcttcctcacagaggtggcggaaacaggacatggcaaccagaacagcttcagtgtcagggttccacagaaacatgtacagggccacttctagtttggtctgggcttgtcggcaaatcgggggggttccgctgcatcctgctgcactatccatagaggagttcccttttcccttccggagagaggctccaggagtacgtagtaattcttcatgatccatggacatttgactggtatttccactagaaggaatatcacatcctaccccgtaaaaaaggagaaagtgacaggaacttctatctgcctgcttatttttaagaagaaatttattcctgcagatcaatatttcccgcaaccacttgagaatttctgtgctactaagcatttgatgactagttaatttcttgcagatgtaaaaaagcatttgtgagctaatctcccaaaatgtttctacaggagcatcaggattccacaaatcaatgctatctaactgatgaagaaccagcagagcctccattgcttcctgagcaatctctggcatgtgtgactgagggaccagttggacgagccctgtaattaattctgctgtactgccttgggtttcgggcccctgttttcttggattacaaagcaagagctttggatctgcatgaattagtttcaccatggacaagagaagatacttatagcttcttgtctccaggtctgtaggtttttctttaaatttaaggcttgttactttttctttaaatgtaagactcggtgccattcgtattgctgggtgtgctccacaaccttgcactgctttatgaagtgtttcaccaaacatatttcgaagttcaaccgagtgacaatacacagcatcaatcttaggccaccaatccaatgcggaattggtgatgattcgatggagtgaatttaccagcacatagtgaaatgtagaaggtgaattctgagccaggcagatcttaaagtgttggttgttgtgagggcttatacgaaagcaagaaacaaggcagtcaatcattagatccacatctgcaggctgactgcctcttgagaatggcttacttggattaaaaagcaggttcttaagatcaaccaccatggactgaacaagtaggaaaatgacagagttatcttcccaattgatgtaagtacttgctttacacagtttgacacaggcaattgcagcactttctgtcagctgcctacttcctccatggccagcaagagcttttcgtagactgtccagaaataacttcttattcatgttgttttcatcaaccacgtctttggatatatcctggattatttctggacacaagataaggagaatgatttgtagtggccaaactgctgctttacgtttggtgctttcagcaaaaccatccaccaagtcaaatagcttttctgcacattcagccatatcagtctgtgggatctggtatagttttgtaaattcatctggataattttctacccagttccaaaatgccttttccaggctatttataactgctaactgcgcaaccttctttagggctttaaatttaaatgctgtttccttcaggagtcgttttaattttgcacaatccacattgatatactgtaacaattctatatcatgaacatcaacattgtcttctgaacaaacagttaattcctgtaacctggtagaaatgcgactaaagactgcattgaagttgttgcagctgagagaaaataaaaccccagaggcagaattccgaagttcagctgcatgctggtttccttcacgacaggtgtgaagaaaatggcagatttctggcagcaactgtttgaccagcatcgtttcatctaatctcattgtgtcctttggttgcccagcaagacatttttccagtgtatccaatataatcaactgagagagatataaatttttttcagcagcttctccaaatattctcatattgttaacattctttaaaatagtagtgaggccgcttataaccaaagaaaacttgtatttggaaatattgattagacattccttgttgtgctcagtactgactttggtatgtgtgttctgctgtcctgtttttattggaagctgctcgtcgaagcggctgaccacggcctggacccattccaccggcctgtgcgcggccatgtcctccccgcggccggggggcggcggagggaagggtgggccggcgccctgggccgggaagagggcggggagcggaggctgaggtgagggaagaggcaaggagagggtctgtggagtgcaggctcccagtgttcccacgggggtggggatggggggtcagcgccgagcgggagtgggaggcccccgcgccgccccgg

SEQ ID NO: 3642 - DNA, 484 bp, Homo sapiens
  SIMILAR (189)..(70): 421254mologous to Ascaris suum collagen,accession number J04657,Smith-Waterman Score=76.
ttctgttgggcagacttctgtggagaccttaccaggcgtcagcatgtggcacaagagacagtccctgctgggggcagttggtgactctggagctggtgctccgaagccattagcgctgccaggctccttgcagctcatggagtcctgcctgggtgcaggcagtcctggccgtgtgccagctttgctctgcattcaggtggttggagagtctcacattctcactcaggagagcttcgtggaggagacgctgacggagaccaactgcaggaacactgtggacttgttgaggaggctcggggctgaccctcggcacccgcatggtgctgggacgcaggaggctcggggctgcccccttggtgcatgcacggtgctgggacgctgtcagacgctcctgtctttgccccgaagcagaggccaagagaggcacaagggccgcacacctgcctgctcctcttggacacgggtgcccgagcataccctgcaa

SEQ ID NO: 3643 - DNA, 5049 bp, Homo sapiens
  SIMILAR (1903)..(4035): 991254mologous to Homo sapiens GAP-related protein,accession number M82814,Smith-Waterman Score=3657.
atgattatctcaatagatacagaaaaggcctttgatgaaattcaacagcccttcatgccaaagactctgaataaactagggattgatcaaacatatctcaaaataataagagctatttatgacaaacccacagccaatatcatactgaatgggcaaaaactggaaggattccctttgaaaactggcacaagacaaggatgccctctctcaccactcctattcaaactaatattggaagttctggccagggcaatcaggcaagagaaagaaataaaggctattcggttaggaaaagagaaagtcaaattgcctctgtttgcagatgacatggttgcattttggaactgggtagaaaattatccagatgaatttacaaaactataccagatcccacagactgatatggctgaatgtgcagaaaagctatttgacttggtggatggttttgctgaaagcaccaaacgtaaagcagcagtttggccactacaaatcattctccttatcttgtgtccagaaataatccaggatatatccaaagacgtggttgatgaaaacaacatgaataagaagcagatactgagcctcaaatctgctaagattgacctgagtgagacccttatctcctgtagaaaaagagctgaaattgtgaaaaaacaaacacaaactcttatcatgcaagtggctgacctgcaacaaaaggtgcatgtacagcctaaccaggtgtctactgttaaagtgtgggcattgattggaaaagaatgggaccctgcaacttggaaagggcatacctataaccagactaaagtcctagcaggtgtgttactctggcccatttatccagtgacccaaagaactgccagttttgagtggggtccagaacaggagaaggctctgcaacaggtccaggcagctgtgcaagctgctctgccacttgggccatatgacccaacagatccaatggtgcttgaagtccgtaaagtgggtcgtgcacagcagcattccatcatcaagtggaagtggtacatacacgatcgggctcaagcaggtcctgaaggcacaacgtcggtcttcaagttcttcagttttggaacttggactggctctccttgctcctcaccctgcagacagcctattgtgggacctcgtgatcgtaagttatttctggacagtctacgaaaagctcttgctggccatggaggaagtaggcagctgacagaaagtgctgcaattgcctgtgtcaaactgtgtaaagcaagtacttacatcaattgggaagataactctgtcattttcctacttgttcagtccatggtggttgatcttaagaacctgctttttaatccaagtaagccattctcaagaggcagtcagcctgcagatgtggatctaatgattgactgccttgtttcttgctttcgtataagccctcacaacaaccaacactttaagatctgcctggctcagaattcaccttctacatttcactatgtgctggtaaattcactccatcgaatcatcaccaattccgcattggattggtggcctaagattgatgctgtgtattgtcactcggttgaacttcgaaatatgtttggtgaaacacttcataaagcagtgcaaggttgtggagcacacccagcaatacgaatggcaccgagtcttacatttaaagaaaaagtaacaagccttaaatttaaagaaaaacctacagacctggagacaagaagctataagtatcttctcttgtccatggtgaaactaattcatgcagatccaaagctcttgctttgtaatccaagaaaacaggggcccgaaacccaaggcagtacagcagaattaattacagggctcgtccaactggtccctcagtcacacatgccagagattgctcaggaagcaatggagcaggcagatagaagttcctgtcactttctccttttttacggggtaggatgtgatattccttctagtggaaataccagtcaaatgtccatggatcatgaagaattactacgtactcctggagcctctctccggaagggaaaagggaactcctctatggatagtgcagcaggatgcagcggaacccccccgatttgccgacaagcccagaccaaactagaagtggccctgtacatgtttctgtggaaccctgacactgaagctgttctggttgccatgtcctgtttccgccacctctgtgaggaagcagatatccggtgtggggtggatgaagtgtcagtgcataacctcttgcccaactataacacattcatggagtttgcctctgtcagcaatatgatgtcaacaggaagagcagcacttcagaaaagagtgatggcactgctgaggcgcattgagcatcccactgcaggaaacactgaggcttgggaagatacacatgcaaaatgggaacaagcaacaaagctaatccttaactatccaaaagccaaaatggaagatggccaggctgctgaaagccttcacaagaccattgttaagaggcgaatgtcccatgtgagtggaggaggatccatagatttgtctgacacagactccctacaggaatggatcaacatgactggcttcctttgtgcccttgggggagtgtgcctccagcagagaagcaattctggcctggcaacctatagcccacccatgggtccagtcagtgaacgtaagggttctatgatttcagtgatgtcttcagagggaaacgcagatacacctgtcagcaaatttatggatcggctgttgtccttaatggtgtgtaaccatgagaaagtgggacttcaaatacggaccaatgttaaggatctggtgggtctagaattgagtcctgctctgtatccaatgctatttaacaaattgaagaataccatcagcaagttttttgactcccaaggacaggttttattgactgataccaatactcaatttgtagaacaaaccatagctataatgaagaacttgctagataatcatactgaaggcagctctgaacatctagggcaagctagcattgaaacaatgatgttaaatctggtcaggtatgttcgtgtgcttgggaatatggtccatgcaattcaaataaaaacgaaactgtgtcaattagttgaagtaatgatggcaaggagagatgacctctcattttgccaagagatgaaatttaggaataagatggtagaatacctgacagactgggttatgggaacatcaaaccaagcagcagatgatgatgtaaaatgtcttacaagagatttggaccaggcaagcatggaagcagtagtttcacttctagctggtctccctctgcagcctgaagaaggagatggtgtggaattgatggaagccaaatcacagttatttcttaaatacttcacattatttatgaaccttttgaatgactgcagtgaagttgaagatgaaagtgcgcaaacaggtggcaggaaacgtggcatgtctcggaggctggcatcactgaggcactgtacggtccttgcaatgtcaaacttactcaatgccaacgtagacagtggtctcatgcactccataggcttaggttaccacaaggatctccagacaagagctacatttatggaagttctgacaaaaatccttcaacaaggcacagaatttgacacacttgcagaaacagtattggctgatcggtttgagagattggtggaactggtcacaatgatgggtgatcaaggagaactccctatagcgatggctctggccaatgtggttccttgttctcagtgggatgaactagctcgagttctggttactctgtttgattctcggcatttactctaccaactgctctggaacatgttttctaaagaagtagaattggcagactccatgcagactctcttccgaggcaacagcttggccagtaaaataatgacattctgtttcaaggtatatggtgctacctatctacaaaaactcctggatcctttattacgaattgtgatcacatcctctgattggcaacatgttagctttgaagtggatcctaccagggcagcatttagtcctaatgcaaagtcccataatcactgtgctgtccgtcccccaaatgcagattttctttgcacaccacggggccactgccaggaggtgaaggaagggtggtataggttagaaccatcagagagccttgaggaaaaccagcggaacctccttcagatgactgaaaagttcttccatgccatcatcagttcctcctcagaattcccccctcaacttcgaagtgtgtgccactgtttataccaggtggttagccagcgtttccctcagaacagcatcggtgcagtaggaagtgccatgttcctcagatttatcaatcctgccattgtctcaccgtatgaagcagggattttagataaaaagccaccacctagaatcgaaaggggcttgaagttaatgtcaaagatacttcagagtattgccaatcatgttctcttcacaaaagaagaacatatgcggcctttcaatgattttgtgaaaagcaactttgatgcagcacgcaggtttttccttgatatagcatctgattgtcctacaagtgatgcagtaaatcatagtctttccttcataagtgacggcaatgtgcttgctttacatcgtctactctggaacaatcaggagaaaattgggcagtatctttccagcaacagggatcataaagctgttggaagacgaccttttgataagatggcaacacttcttgcatacctgggtcctccagagcacaaacctgtggcagatacacactggtccagccttaaccttaccagttcaaagtttgaggaatttatgactaggcatcaggtacatgaaaaagaagaattcaaggctttgaaaacgttaagtattttctaccaagctgggacttccaaagctgggaatcctattttttattatgttgcacggaggcttgacgcaggattggatactgccatagaatttgaggttgttgatgttgaagtttgtccccggaatgttaacaaacatgaagagcaggccaatcggtga

SEQ ID NO: 3644 - DNA, 1044 bp, Homo sapiens
  SIMILAR (1036)..(752): 321254mologous to Plasmid ColIb-P9 ychA,accession number AB021078,Smith-Waterman Score=93.
atgacccacaaatatgagtcagaaatagactatgggactctgggtctagagaaaggaaagagtctaggatatgagcacagcttgactttgaaaaagaaagcaaaggactctgaggatggacacagtagcaaattaagaagaccagtgatgcccaccataagagaccctcaaggggtgccactgggcacagcaagcagcccagatcttggttaccaagagaacaaccaccaccacttcaaaagactggtgactccctgcatgctatttctgagggcgttatcaagacccagtccaggtatgggcagaggtgcattctcacctgatgtggaagtagctttcttcccagattcaggggcttctgtgcactgtgctggaggcattctacaccatgactacccaggctgcgttcagattctgcccatcatcaagcacctcattctccgagggccccagaggctcctgtgccatgatcccaacttcagcctgacactgggcatagtgtggggaaaccttccaagtgactggcagcatcgggacatccaccgctgtggccttggccccatttcccgtgttgtgccccccacttgctgcagatgccctgacggcagcgtggccaaacaaggggaggagctgcaggcccttcacaagcatggaaacaggagtgactgggatgcaccgccaggtgtgaaaggcaccttgtcctctcctagaggaatccagcccaaggacttccccactgttgcctggacctacagggagctcaggccccaggtcctctgcacagctttgcccttgccgggaatggctcttggaggctcaagggagcctgagcctctgaccatctgcaagctgcctccaactctcagtcagggtttggatgccccaagctttctcgaggccttggctctggctgcctcagcctggctgtgttttgtgtccatcagagagctgcacctgggccctgactcggagctacagacaaggacgaggacagggtcagtcccggaggacgggcacctcctgaccctggaaggcacttcctga

SEQ ID NO: 3645 - DNA, 9131 bp, Homo sapiens
  SIMILAR (8748)..(295): 1001254mologous to Homo sapiens GAP-related protein,accession number M82814,Smith-Waterman Score=14560.
atttctcagttaaaagtttcctgacctcccactttctttgcagttgttctgaacacttacatataccagatacacgccaaaagtagaagaaaaaaagttaaagaaaaggcagcattaaatttaggcaaggcttcgaagagttgatcatctggcaacatggcaaaccggatgggttcattataaaacaggaagtgcagcattacaacatggggggaaagggcaaggacagggaaggggtcactagtgaagagcccatgttaagttgattttaaaaaagaaagcaagcaagcttcacacgatcttcttaatgctattacgtttgaaactgccagcgcttctttgcttctgcacttggcttgcggatccgtggcgagttcgtccactgttacagtggccagtggtaggggagagttcaacgttctccttgtcgattcctggggaatgctgggaagttgcaagtgaggtcatggaattagaaaggttaaggttggcagtgatactaagctggctctgcagtgcaggagggtaaggagatgtgggagtcaggagggattcttcactggtttcttcatcaattccaggcaggtacgtgtcaatcaaggcatcaagaaacttaacaataagctcagcatagtctggaatttgtgtttgctttgaaaacggtcctgcaaaccgccacaagccattaaaaccaaaactttgcaggtaagatgtttggtattgtggtggggattcttcatggtacaccacactctgcacaattccatggattggatttaacaaatttggatcttggcacaatgataacagggtgttgatcttagagtccaacaaattatgcacaacaggaaagactttgggaaacacaacactggcctctgctaagtattcataaagaattcgttgatcaaactcatctgtggtatattttaccagtgtagctagaacagtaagaagcagcgcctggatcttcggatcagtaagtacttcttcatccaagagaacatttgattcagacactgaaactttacgtaaatgtgggtgctgttgtgatgaggaaatcctctgagtttccatttcataatcagtttctgctactctcctcattttggggggtgttgtgatccctgattccatttcttgccttttaggagcctttgtgtctgatatcaagtgatcaaaacttttccttgttccaagcaacttcttagtgttggcctgagaaggttgccccatgtccaggctcatggatttcctggctcggggactggtctggccgacagttggataggtggctgcaaggtatccttcagaacctttgggagaggaccatggctgagtctcctttagtgtcctataggaagggtcaccatgatgaatgggatatgtatccataggaacattttccattgaaatatcagtaagaagaagtgactttctatgttttaggctgcagcgacttcgaacttcttcagacactgtaagtaaagctgctaagtaggccacgctctgtgtattcacttcaaatttgtcacaatttctgtgtttgttaaccagagttagtagtgtatgtaaaattctgactgttcttgcaacaatagcaggtgaaggatgcctgtacccttttaaaaggtgtccaaccaatgcaaagttaaagttagagttgaaattgagtccaacaaaatgatccatttgcttgcagtgccactccagaggattccggattgccataaatacttcctctggactcttgtcattgaatatacggagactatctaaagtatgcaggttttgttcaagaagtgcggtacctgctgaatacaagttgacctcatcaagctgcagcacagccacagctacccaaaagagggctttgtgcagaggcgagtccttattaagaagtggctgtaatttggttagtgctattactgtagcttctatcagaacttgactgttgtaagtgtcaggtccttttaagcaactctcaagtgccttgctaagaatacggattatctgctttatctgcccatgagacactcgtttgctaatacacccaaagacaacaagagctcttggttgcagggatggattatattggaatgcaaatctttgagctagttctgtccactggtccagccacttgcacgttggaatatctctcatgcatgcctccatgatctccaacaaagcttctgtgactgtttccaaggatgtcaaagcaaaagtctctctctcataggagccaggagagaatgacctgtcccggtaactggaacggaaggcaatgacagcagctgacttgactttgctaatgccaaacagcaagtaaaatttgggtaatgagaactctgtcagactgagtctcaaaacttgcttggtctcttcactaaaatgaagctgtgaacaagtacacagagagtgaatgatattaatgaccagtccatgtgtggaagctctaagggagagcggacctgtggctactaagaaagtaacaacgtggaagaggtagggaagatgagctgccacatcaagggaattgttgaaggacagcatcagcatgtagcgtgctaaaatagcaatatcatcccacataagatgttgttctaaagtaggagttggagataagcatgtcttgtcaattattttgcacatccttccaataaccttgcttgaaaccaatttcacatttccagaagccaaagctacagcagtatctgccatcacctcagcttttattgatcccaagccacctgttgcactggttttgatgaaactgtctagtacaacatcaagcagatctgtaatctgcccaaggcttccccatatttttgcttgaatagatgggtacatctgtttttcattgatggtcattgttatcagcttgtcaagaatagcagtaactctttgtcgtttggcatcatcattatgcttgcaaaaacgaactagatttgacagccatggagtcatgtattccaaacaaaggtgtttcaattcaatactagatttgctaaatccagaaatacactcttccaaaaattctaacgtgaggtgtggctcattggctgccagtgtcttactaatagagacaataaagagggtgttgttggcagggatacataaacctgatgtctctagtaactggccctcgatttttaaattaaaggtacaagttaaggcacacagaagattataggcagctgaccgtaaactcgggtcagaactgcctaaattaagtaatgcgatattgagcagtgtcccagggacatcttttggccgaatcttggtgtgttgggggatagagtcgggctgtgacagttcccagcgggtccggatatgaatgatagactggacaatggcttcacactcctggtgcatgaaggtgagcggcgtgccctggtttgcaatggttaaggtgaactggttctcatctactaggcagatttcttcaatttccgaagcataataaatgtcatttagaaagactgattgccctaggacttttgttcgctctgctgaagttacttggacagcagtagaaccaactttaatagaaactttggtgtctttgtgagctagcttgagagcattgtggaataccttcaggtcctcttctaaagccaaggtggcagcaggtagtttctgttgttcatgctctatgtgctcagccagtttcccaggacagtctatgaaaacaagccttttgctacctttgaggccagtcagcagccgctcatgatacttggtgtactccctgacccaggagttacagttatagatatagactgcggagacgttgtcgtaagcaaagccaggaaaaacaacaaaccacttagagagaaagtctgttttaaagcgattgctaggcccggtatgggtaaggtccactacaatttcatatggctttgcataatatggctttaaagtcagtaagacatggtatatcagcaaatcaccattgatttgaccagttttgaacctccgtgcaacataataaaaaataggattcccagctttggaagtcccagcttggtagaaaatacttaacgttttcaaagccttgaattcttctttttcatgtacctgatgcctagtcataaattcctcaaactttgaactggtaaggttaaggctggaccagtgtgtatctgccacaggtttgtgctctggaggacccaggtatgcaagaagtgttgccatcttatcaaaaggtcgtcttccaacagctttatgatccctgttgctggaaagatactgcccaattttctcctgattgttccagagtagacgatgtaaagcaagcacattgccgtcacttatgaaggaaagactatgatttactgcatcacttgtaggacaatcagatgctatatcaaggaaaaacctgcgtgctgcatcaaagttgcttttcacaaaatcattgaaaggccgcatatgttcttcttttgtgaagagaacatgattggcaatactctgaagtatctttgacattaacttcaagcccctttcgattctaggtggtggctttttatctaaaatccctgcttcatacggtgagacaatggcaggattgataaatctgaggaacatggcacttcctactgcaccgatgctgttctgagggaaacgctggctaaccacctggtataaacagtggcacacacttcgaagttgaggggggaattctgaggaggaactgatgatggcatggaagaacttttcagtcatctgaaggaggttccgctggttttcctcaaggctctctgatggttctaacctggtaggatccacttcaaagctaacatgttgccaatcagaggatgtgatcacaattcgtaataaaggatccaggagtttttgtagataggtagcaccatataccttgaaacagaatgtcattattttactggccaagctgttgcctcggaagagagtctgcatggagtctgccaattctacttctttagaaaacatgttccagagcagttggtagagtaaatgccgagaatcaaacagagtaaccagaactcgagctagttcatcccactgagaacaaggaaccacattggccagagccatcgctatagggagttctccttgatcacccatcattgtgaccagttccaccaatctctcaaaccgatcagccaatactgtttctgcaagtgtgtcaaattctgtgccttgttgaaggatttttgtcagaacttccataaatgtagctcttgtctggagatccttgtggtaacctaagcctatggagtgcatgagaccactgtctacgttggcattgagtaagtttgacattgcaaggaccgtacagtgcctcagtgatgccagcctccgagacatgccacgtttcctgccacctgtttgcgcactttcatcttcaacttcactgcagtcattcaaaaggttcataaataatgtgaagtatttaagaaataactgtgatttggcttccatcaattccacaccatctccttcttcaggctgcagagggagaccagctagaagtgaaactactgcttccatgcttgcctggtccaaatctcttgtaagacattttacatcatcatctgctgcttggtttgatgttcccataacccagtctgtcaggtattctaccatcttattcctaaatttcatctcttggcaaaatgagaggtcatctctccttgccatcattacttcaactaattgacacagtttcgtttttatttgaattgcatggaccatattcccaagcacacgaacatacctgaccagatttaacatcattgtttcaatgctagcttgccctagatgttcagagctgccttcagtatgattatctagcaagttcttcattatagctatggtttgttctacaaattgagtattggtatcagtcaataaaacctgtccttgggagtcaaaaaacttgctgatggtattcttcaatttgttaaatagcattggatacagagcaggactcaattctagacccaccagatccttaacattggtccgtatttgaagtcccactttctcatggttacacaccattaaggacaacagccgatccataaatttgctgacaggtgtatctgcgtttccctctgaagacatcactgaaatcatagaacccttacgttcactgactggacccatgggtgggctataggttgccaggccagaattgcttctctgctggaggcacactcctccaagggcacaaaggaagccagtcatgttgatccattcctgtagggagtctgtgtcagacaaatctatggatcctcctccactcacatgggacattcgcctcttaacaatggtcttgtgaaggctttcagcagcctggccatcttccattttggcttttggatagttaaggattagctttgttgcttgttcccattttgcatgtgtatcttcccaagcctcagtgtttcctgcagtgggatgctcaatgcgcctcagcagtgccatcactcttttctgaagtgctgctcttcctgttgacatcatattgctgacagaggcaaactccatgaatgtgttatagttgggcaagaggttatgcactgacacttcatccaccccacaccggatatctgcttcctcacagaggtggcggaaacaggacatggcaaccagaacagcttcagtgtcagggttccacagaaacatgtacagggccacttctagtttggtctgggcttgtcggcaaattgggggggttccgctgcatcctgctgcactatccatagaggagttcccttttcccttccggagagaggctccaggagtacgtagtaattcttcatgatccatggacatttgactggtatttccactagaaggaatatcacatcctaccccgtaaaaaaggagaaagtgacaggaacttctatctgcctgcttatttttaagaagaaatttattcctgcagatcaatatttcccgcaaccacttgagaatttctgtgctactaagcatttgatgactagttaatttcttgcagatgtaaaaaagcatttgtgagctaatctcccaaaatgtttctacaggagcatcaggattccacaaatcaatgctatctaactgatgaagaaccagcagagcctccattgcttcctgagcaatctctggcatgtgtgactgagggaccagttggacgagccctgtaattaattctgctgtactgccttgggtttcgggcccctgttttcttggattacaaagcaagagctttggatctgcatgaattagtttcaccatggacaagagaagatacttatagcttcttgtctccaggtctgtaggtttttctttaaatttaaggcttgttactttttctttaaatgtaagactcggtgccattcgtattgctgggtgtgctccacaaccttgcactgctttatgaagtgtttcaccaaacatatttcgaagttcaaccgagtgacaatacacagcatcaatcttaggccaccaatccaatgcggaattggtgatgattcgatggagtgaatttaccagcacatagtgaaatgtagaaggtgaattctgagccaggcagatcttaaagtgttggttgttgtgagggcttatacgaaagcaagaaacaaggcagtcaatcattagatccacatctgcaggctgactgcctcttgagaatggcttacttggattaaaaagcaggttcttaagatcaaccaccatggactgaacaagtaggaaaatgacagagttatcttcccaattgatgtaagtacttgctttacacagtttgacacaggcaattgcagcactttctgtcagctgcctacttcctccatggccagcaagagcttttcgtagactgtccagaaataacttcttattcatgttgttttcatcaaccacgtctttggatatatcctggattatttctggacacaagataaggagaatgatttgtagtggccaaactgctgctttacgtttggtgctttcagcaaaaccatccaccaagtcaaatagcttttctgcacattcagccatatcagtctgtgggatctggtatagttttgtaaattcatctggataattttctacccagttccaaaatgccttttccaggctatttataactgctaactgcgcaaccttctttagggctttaaatttaaatgctgtttccttcaggagtcgttttaattttgcacaatccacattgatatactgtaacaattctatatcatgaacatcaacattgtcttctgaacaaacagttaattcctgtaacctggtagaaatgcgactaaagactgcattgaagttgttgcagctgagagaaaataaaaccccagaggcagaattccgaagttcagctgcatgctggtttccttcacgacaggtgtgaagaaaatggcagatttctggcagcaactgtttgaccagcatcgtttcatctaatctcattgtgtcctttggttgcccagcaagacatttttccagtgtatccaatataatcaactgagagagatataaatttttttcagcagcttctccaaatattctcatattgttaacattctttaaaatagtagtgaggccgcttataaccaaagaaaacttgtatttggaaatattgattagacattccttgttgtgctcagtactgactttggtatgtgtgttctgctgtcctgtttttattggaagctgctcgtcgaagcggctgaccacggcctggacccattccaccggcctgtgcgcggccatgtcctccccgcggccggggggcggcggagggaagggtgggccggcgccctgggccgggaagagggcggggagcggaggctgaggtgagggaagaggcaaggagagggtctgtggagtgcaggctcccagtgttcccacgggggtggggatggggggtcagcgccgagcgggagggggagagggaaagggggcgttggcaaggaggctggggggagggggataggggaaggggacccggggaggggagggggcctcttggtcgctctccccactagcgccgtctccccacagccatcacagtccgagacgccgccatgacaccccaccggaagtgggatcctttccacggcccggggagagggagcgcgagcgagctagagatt

SEQ ID NO: 3646 - DNA, 2210 bp, Homo sapiens
  SIMILAR (275)..(475): 761254mologous to Homo sapiens dJ579N16.1 (KIAA0685),accession number AL096767,Smith-Waterman Score=247.
atggtgcctctgcactccagcctgaagttgtttctggacagtctatggaaagctcttgctggccacggaggaagtaggcagctgacacaaagttctgcaattgcctgtgccaaactgtgtaaagcaagtacttacatcaactgggaagataacgctgtcattttcctacttgttcagtccatggtggttgatcttaagatctgcctggtgcagaattcacattctacatttcactatgtgctggtaaattcactccatcaaatcatcaccaatggcgacgggttgcatgaggcatgggaacataggccacctcacgcagatcgccaacgtgctggtgcagaacctggagcagggctctgtgcagacgcacatcagcgaggtcatctgagagctccctgtggattgccatggctgctaggagagcttcgtggaggagacgctgacggagaccaactgcaggaacactgtggacttgttgaggaggcttggggctgcgccctcggcgccggcatggcaagcactcactaccttcactcctggagtgaggacattgagggtgctttccctaatgagctgtcccttcagcaggccttctctgactaccagatccagcagatgacggccaactttgtggatcagtttggcttcaatgatgaggagtttgcagaccatgacaacaacatcaagtgtttccagttgcatgagggtgctgaggcccccagtgagaaccaggggaggagcactgaggcctcagatgagcaccgggggaggagccctgaggccccagatgagcaccaggggaggagcactgaggccccagatgagcaccgggggaggagcgttgaagccccagatgagcaccagaggaggagagctgaggccccagatgagccccgggggaggagctctgaggccccagacgagcaccgggggaggagcgccgaggccccagatgagcaccgggggaggagcgccgaggccccagatgagcacgccccatttgacaggatcgcggagatcaacttcaacatcgacactgacgaggacagtaccctctggaaactgaccttggcgttttactctgcagcccagcgcggctctgaggcctgctgcagcgaccgcatccagcactttgatgagaacgaggacatctcggaggacagcgacacttgctgtgctgcccaggtgaaggccagagccagcctctgccgaggaggtgcagcccccagaacacccgtcagatgcccagacgccctgctgtttgttatgccggctcgcagagcaagcacaccggtcctgcaagcactggcgcccaacgcagcggcctggagcctgctgctgtcactgaccctcagtgttaggcatctgtcctgggccaccaggcatctgactctgcatctccccgaggtttggagccccccatgcttcagaaagctgctcaaagaatggcccggagtgcggaggccaggatgggaaggcgagcttggaagcagacggtgatgcgcctggggcagctcctccccttgtttggccacgctgccgtcagggcatctgcagcaagtggggggcacaacacgggaaatggggccaaggccacagcagtggatgtcccgatgctgccagtcactggaaagcccaggccagagcccctcggagcaagccccttagatgcccagcagaatcctctctcccctcctgtaccttgggaggtttccccacactatgcccagtgtcaggctgaagttgggatcatggcacaggatcctctggggccctcagagaatgaggtgcttgatgatgagcagaatctgaacgcagcctggacggagagaagaggcagacccatctccatcctaggaggagctcttagttcctccagacagggatgtctccctgggaccaggcagtgtgactgggatgagccattcatcatcagggaagacacaggctacctgggtagtcatggtgtagaatgcctccagcacagtgcccagaagcccctgaatctgggaagaaagctacttccacatcagggactccgggcgtcctgtcctgtccctgcacggcggctttggccccagcctgtagccctctttgcgcagctctgcgcccgcagccctgcatcttccccaggttgtgaggtgatgaggcgaaagtcatcggaaagacgccgactcggtgtgcagggttcctgcgtggaaggagctgtg

SEQ ID NO: 3647 - DNA, 2424 bp, Homo sapiens
  SIMILAR (1433)..(1612): 801254mologous to Homo sapiens putative p150,accession number U93569,Smith-Waterman Score=248.
atgctgacagtaatacacagtgaaatgcaggctgccaaggtctcagatggaaatgaggaacttattgggaagtggaacttattgggaattgaaaggccctggggacctaggagggactggagtggtttgcatgggccaggcccagggacccccactgcccgaccgcggcctttgagagactcctcgcagaatacctggcgactgcagttaaagcctcggctcaaagggggcccaggtgcacagaatgcaagaatgaatgaggcttggcagcctctgcctagatttcagaggatttatgagaaaacctgggtgccctggcagaaacatgatgcaggggcagagccctcacagagaacctctactagggcagtgccaaggggaagtatggagttggagcccccacacagagctcccagagctgtgagaagggtgccacaattctccagattccagaatggtagatccacaagcatcctgcaccctgtgcctggaaaagctgcaggcactcaactcaagcctgtgagagcagatttggtggctgcactctacaaagccacaggggcagagctgcccaaggccttaggagcccaccctttgcaccagtgtcccctagatgtcactgatgaattgttggaaaaaattgcatcaagaagtcagaatataattgaaatcaacatttctgattgtcgcagtatgtctgataatggcgtatgtgttttagcatttaaatgtcctggacttcttaggtatacagcctacaggtgtaaacagctttctgacacctctattattgcggttgcctctcactgtcctttacttcagaaagtgcatgtaggcaaccaggacaaactcactgatgaaggactcaagcaggacaatcagcctcagtgtatagaagggaattttgaaagccgcatgcatgcccagggcaggacacttgttcaggaacgacctaagaagactgtaaactttatcactgtgtgcttgctaggtccagtacaagcaggaagtaaaggccaaggcagagttgtgaatgggaaagtgcttacctcaactgccaatttacggaggatctctgtggatggtaaatcagagaagagtgtgaaagatgcagaaaaggcctttgacaaaattcaacagcccttcatgctaaaaattctcaatgaactaggtattgatggaatgtatttgaaaatagtaagagctatttatgacaaacccatagccaatatcattctgaatgagcaaaaactcccttgggtggttgatgggactgggcgctgtggagcggggggcagcgtcactggggaggctcgggccatgcaggagcccacagtggggcaaggggaggctcaggcatggcgggctgcaggtcccgatccctgccctgcagggaggcagctaaggcccggcgagaaattgagcacagcagctgctggcccagagaataaaatacctatgaatacaacttacaagggatgtgaaggacctcttcaaggagaactaaaagccattgctcaaggaaataaaagagaacacaaagaaatggaaaaacattccatgcttatggatatgaagaatcaatattgtgaaaatagccatactaccaaagtaatttatagattcagtgctatcaccatcaagctaccactgactttcttcacaaaattggaaaaaaaaactactttaaacttcatatggaaccaaaaaagagcgtgcatagccaagacaatcctgggcaagaagaacaaagatggaggcatcatgctacctgacttcaaacaatactacaagcctacagtaaccaaaagagcatggtactggtaccaaaacagatatatagaccaatggaacagaacagagacctcagaaataacaccacacatctacaaccatctgatctttgacaaacctgacaaaagcaagcaatggggaaaagattccctacttaataaatggtgttgggaaaactggccagccatatacagaaagctgagactggaccccttcctcacaccttatacaaaaatcaactcaagatggatcaaagatttaaatgtaagatgtacgaccgtaaaaatcctagaagaaaatttgtgcaataccattcaggacatagttatggacaaagatttcaggtctaaaacaccaaaagcaatggcaacaaaagccaaaattgacaaatgggatctaattaaactaaagagcttctgctcagcaaaagaaactatcatcagagtgaacaagcaacctacagaatgggagaaaattgttgcaatctatccatctgacaaaaggctaatatccagaatctacaaagaacttaaacaaatttacaagaaaaaaaaaacccgtcaaaaaatgggcaaaggatatgaacagacacttctcaaaagaagacatttatgcagccaacagacatag

SEQ ID NO: 3648 - DNA, 1537 bp, Homo sapiens
  SIMILAR (446)..(1399): 251254mologous to Candida albicans agglutinin-like adhesin,accession number AF025429,Smith-Waterman Score=109.
atggggtggggcctgtcgtcaaggaagggactcagccctggaggtttctgtgagagctcaagccacaggagccacaggataagaggagtgtggctgcagaacccaggtggcaggcctttcctcaggccccttactcctgacctggacgaggccggggcttcctcaaggagagccccttcgccttaattttacctgggaaagccaagaaggagccatcaggactcaggaagtaagactgagaaaagatgtagatgtggcagggaaacagagtcagagtccacagcagggtgtacagttagggacagggagaaaaaggaaatacaccccaagacgactaattattgtgatggcaaatgaaggaaatggttttattgtcagatccatgatttttccggtgccctggtcttctccaggagcaggtaggctccccatagaagaagttacaaacctagaaagctcctcaagcccccaatataaattcctactgcctgcaagtggaagaatgctgtcagaagggtatctcagtggacttgagtactggaatgacatccactggagttgtgcctcttataatgagcaggtggctggggaaaaggaagaggagacaaattctgttgctaccctttcctattcctctgtggatgaaacacaagtcagaagtctctacgtgagctgcaaatcatctggcaagtttatctcttcagtgcattcaagagagagccaacatagcagaagtcagagagtcacagtgctgcagacaaaccccaatcctgtgtttgaaagcccaaacttggctgcagttgaaatatgtagagatgccagcagagagacctacttggttccatcttcttgcaaaagtatttgcaagaattataatgacttacagattgcagggggccaggtgatggccattaattcagtgacaacagattttccctctgagagcagttttgaatatggccctttgctgaagtcatctgagattcctttacccatggaggattccatttctactcagcccagtgactttccccaaaaacctatccagcggtactcatcctattggagaataacaagcatcaaagagaaaagcagcttgcaaatgcagaatcctatttctaatgcagttctgaatgagtacctggagcagaaggttgtggagttatataaacagtacattatggacaccgtgtttcatgacagttctcctacccagattctggcgtctgaactcatcatgacaagtgtagaccaaatcagtcttcaagtgtctagagagaagaatctggagacctcaaaagccagagatatagtctttagccgcctattgcaattgatgtcaactgaaattactgaaattagcactcctagtctccatatttctcagtatagcaatgtaaatccatagagaggatgcttccattactgtctcgcatttacttaaacatgaagcaacactttatccatttattctgagaatgtgcaggaggggttagtgaaggggaattaagggctagagaagtaaagatcagctgga

SEQ ID NO: 3649 - DNA, 455 bp, Homo sapiens
  SIMILAR (57)..(383): 931254mologous to Homo sapiens Human SH3-containing protein 1,accession number Y24922,Smith-Waterman Score=509.
  misc_feature (1)...(455): n = a,t,c or g
gcacgaacttccgggtcgacccacgcgtccgtgaatttgaggattacactcagccaatgaagcgcactgtgtcatataacagcctttcaaattccagaggagaaggcaaaccagacctcaaatttggtggcaaatccaaaggaaagttatggccgttcatcaaaaaaaataagctttctctcaagctgggtgcaacaccggaggatttcagcaacctcccacctgaataaagaaggaaaaagctgcagcagaaagtcgatgagttaaataaagaaattcagaaggagatggatcaaagagatgccataacaaaaatgaaagatgtctacctaaagaatcctcagatgggagacccagccagtttggatcacaaattagcagaagnnnnnnnnnnnnnnnnnnnnnnnnnnnnnnnnnnnnnnnnnnnnnnnnnnnnnnnnnnnnnnnnnnnaaan

SEQ ID NO: 3650 - DNA, 146 bp, Homo sapiens
  SIMILAR (27)..(146): 921254mologous to Homo sapiens unnamed protein product,accession number AK026244,Smith-Waterman Score=199.
atggtggaaagtctaaaagaagtacagtggattcaaagtttttctttaacatcagcactgatgaccaagaaggcctttacagtctttattttcataaatgccttggaaaagaattgccaagtgacaagtttacattcagccttgat

SEQ ID NO: 3651 - DNA, 413 bp, Homo sapiens
  SIMILAR (116)..(358): 561254mologous to Homo sapiens Human secreted protein fragment encoded from gene 6,accession number Y45303,Smith-Waterman Score=234.
gtggatttcaaatattatttgatgcttatttttgttttgtgtcttcttgtttctggatttttactctgtcacggctccatctcttacatgtagcttatgtcccttttaacatccccccatcagcctccccctccccctcctgcctctgcctcaccctctgctgttcccaacggcccccagtctcccaagcagcaaaaggaacccctctcccaccgcttcaacgagttcatgacctccaaacccaaaatcccactgcttcaggagcctaaagcgtggggtaagttctgctccggaatcctgtctctctggcgtgctttggttgcatgtttggttctgcataactaattttgtttgtgaatgaatccattgtgttttcccataacatgtaaaaaagttaaaaaaaaaaaaaaaaa

SEQ ID NO: 3652 - DNA, 2040 bp, Homo sapiens
  SIMILAR (16)..(2037): 991254mologous to Homo sapiens KIAA0554 protein,accession number AB011126,Smith-Waterman Score=3550.
ctgtggagcggcggggaggaggagccgccgaggagaccccgggcgaggagctgcgagccggaggaggccgcgcggactccgggctttccgccgtcgcggggatctcggggggcaaagggatcgccggggagggggaccagagagccgcgcccgccgcgcggagcgccccttcgcgtcccctgcaccatgagctggggcaccgagctctgggatcagtttgacaacttagaaaaacacacacagtggggaattgatattcttgagaaatatatcaagtttgtgaaagaaaggacagagattgaactcagctatgcaaagcaactcaggaatctttcaaagaagtaccaacctaaaaagaactcgaaggaggaagaagaatacaagtatacgtcatgtaaagctttcatttccaacctgaacgaaatgaatgattacgcagggcagcatgaagttatctccgagaacatggcatcacagatcattgtggacttggcacgctatgttcatgaactgaaacaggagacgaaatcaaactttcacgatggccgtaaagcacagcagcacatcgagacttgctggaagcagcttgaatctagtaaaaggcgatttgaacgcgattgcaaagaggcggacagggcgcagcagtactttgagaaaatggacgctgacatcaatgtcacaaaagcggatgttgaaaaggcccgacaacaagctcaaatacgtcaccaaatggcagaggacagcaaagcagattactcatccattctccagaaattcaaccatgagcagcatgaatattaccatactcacatccccaacatcttccagaaaatacaagagatggaggaaaggaggattgtgagaatgggagagtccatgaagacatatgcagaggttgatcggcaggtgatcccaatcattgggaagtgcctggatggaatagtaaaagcagccgaatcaattgatcagaaaaatgattcacagctggtaatagaagcttataaatcagggtttgagcctcctggagacattgaatttgaggattacactcagccaatgaagcgcactgtgtcagataacagcctttcaaattccagaggagaaggcaaaccagacctcaaatttggtggcaaatccaaaggaaagttatggccgttcatcaaaaaaaataagcttatgtcccttttaacatccccccatcagcctccccctccccctcctgcctctgcctcaccctctgctgttcccaacggcccccagtctcccaagcagcaaaaggaacccctctcccaccgcttcaacgagttcatgacctccaaacccaaaatccactgcttcaggagcctaaagcgtgggctttctctcaagctgggtgcaacaccggaggatttcagcaacctcccacctgaacaaagaaggaaaaagctgcagcagaaagtcgatgagttaaataaagaaattcagaaggagatggatcaaagagatgccataacaaaaatgaaagatgtctacctaaagaatcctcagatgggagacccagccagtttggatcacaaattagcagaagtcagccaaaatatagagaaactgcgagtagagacccagaaatttgaggcctggctggctgaggttgaaggccggctcccagcacgcagcgagcaggcgcgccggcagagcggactgtacgacagccagaacccacccacagtcaacaactgcgcccaggaccgtgagagcccagatggcagttacacagaggagcagagtcaggagagtgagatgaaggtgctggccacggattttgacgacgagtttgatgatgaggagcccctccctgccatagggacgtgcaaagctctctacacatttgaaggtcagaatgaaggaacgatttccgtagttgaaggagaaacattgtatgtcatagaggaagacaaaggcgatggctggacccgcattcggagaaatgaagatgaagagggttatgtccccacttcatatgtcgaagtctgtttggacaaaaatgccaaagattcctag

SEQ ID NO: 3653 - DNA, 1081 bp, Homo sapiens
  SIMILAR (629)..(1006): 811254mologous to Homo sapiens unnamed protein product,accession number AK023681,Smith-Waterman Score=535.
gaatctttcaaagaagtaccaacctaaaaagaactcgaaggaggaagaagaatacaagtatacgtcatgtaaagctttcatttccaacctgaacgaaatgaatgattacgcagggcagcatgaagttatctccgagaacatggcatcacagatcattgtggacttggcacgctatgttcaggaactgaaacaggagaggaaatcagaaaacgaccacagggtcagcggagctagccgccgagccccgctccccgggcccttccggcggctgcgccctttcacccccgacgtgggcggagaggaagcggctgcaaaccaagcagaacatataataccccagcctcaagtggaactcaaagggaaagaccaatggtaccagaaatggaacgaagtgtggcaaggaacactcacctacactccatcagagcagacagggcactgtaatccagtcagccaatcggcccagcgtggcctgaagctaccgagctcctctccatccttctccacactgaaaactggcaccataggtacctgctttcagcagttcaagggtatttcccatgctctcaagtttttctttaacatcagcactgatgaccaagaaggcctttacagtctttattttcataaatgccttggaaaagaattgccaagtgacaagtttacattcagccttgatgattcacagctggtaatagaagcttataaatcagggtttgagcctcctggagacattgaatttgaggattacactcagccaatgaagcgcactgtgtcagataacagcctttcaaattccagaggagaaggcaaaccagacctcaaatttggtggcaaatccaaaggaaagttatggccgttcatcaaaaaaaataagtctcccaagcagcaaaaggaacccctctcccatcgcttcaacgagttcatgacctccaaacccaaaatccactgcttcaggagcctaaagcgtgggattcaaccacctgatggaaatgaaaaacaggatgatacgatggcttcttccttcactttctcactttccttggattatgaaatgccagtaattgagaaagcggaatga

SEQ ID NO: 3654 - DNA, 306 bp, Homo sapiens
  SIMILAR (1)..(123): 751254mologous to Homo sapiens gamma-glutmyl transpeptidase- related protein,accession number M64099,Smith-Waterman Score=129.
atggcccaggactacggagccatgggtgacctggtcctgctggggctggggctggggctggcgctggctgtcattgtgctggctgtggtcctctctcgacaccaggccccatttgacccccggcctttgcccacgccgctgttgctgctcactccaaggtcttctcaaatattgtacgagaaagggttaaaactcaagaagcagaaagggcttgacgaccaccgaattagagaggctttccagggagcaaacgcaaaaaggaccctgtttggggaccccaagtttgtgaataaaactaagaactga

SEQ ID NO: 3655 - DNA, 367 bp, Homo sapiens
  SIMILAR (1)..(180): 571254mologous to Homo sapiens gamma-glutmyl transpeptidase- related protein,accession number M64099,Smith-Waterman Score=130.
atggcccaggactacggagccatgggtgacctggtcctgctggggctggggctgggtgctggcgctggctgtcattgtgctggctgtgggcctctctcgacaccaggccccgtttgacccccggcctttgcccacgccgctgttgctgctgactccaaggtctgctcggatattggacagaggacatgcagagatgcgacacccacttaaactcgaagttgcaaagatgcaaatgagactggggtctcaggcaccagagaccacccatgggcacgtggcttttgggagtggggacctgctgccacagatctctgaagagtctggacctgctgggtctccccgagtgactgtctgggggtctccatag

SEQ ID NO: 3656 - DNA, 210 bp, Homo sapiens
  SIMILAR (1)..(42): 571254mologous to Homo sapiens Human secreted protein, SEQ ID NO: 7645,accession number G03564,Smith-Waterman Score=42.
atgagataccgctacatacctgttagaatggctgaagtcagaacactgatgaaaccaagtgctggtgagaatgtggagcaacaggaaccttcattcattgctggctggcaaacattcagcagcacaccctctcaagattgtttacttgcctttgctcctgttgagttacaacgcttggaagcaggagatgggctcagcagcagccaatag

SEQ ID NO: 3657 - DNA, 696 bp, Homo sapiens
  SIMILAR (225)..(611): 351254mologous to Homo sapiens GAS2-related on chromosome 22,accession number BC001782,Smith-Waterman Score=121.
atgaatgggcctttagtgctacagcaaacactttatgttcctggatttgggtatggtcttatcggggaggaagacgagcatgaccttagagggtcatccctacaaggtccacagccctgcaagccccgcggctgctttcacgtagctggcagggccacgctgcacaacgtctctaacgccgtcggagggcggcccccacctcccgacagcctggggtacaccgtgcaccctccagacagtcaggggcacacggggcccctcccagcgagggaggggacggggagtcacaggttcggcgtagaaggcggcagcgcaggtgggagcgtggtgaggcgccactcctccagctctccccaccggcgggaagacctcctcgccgcccgcatccgtgccgaccgcaacatttaccatcggcagctatttcagaggccgccaccgccagaggccccagaaacagatctcaagcagccgctgctgccgcggatcccgacaaccttcgcgtcgcgcgagggcacggagcacgcgcagctctgcggtcgacgccgggccgcccccactccgcttctccgggttttccgtgaagctccagccaacagcggccgtcaccggaaaaaacggggagcgaagtttattcagcgtatattccagcaaattgttgaaactgaaattttaaaagaacgcataaaatttaaataa

SEQ ID NO: 3658 - DNA, 432 bp, Homo sapiens
  SIMILAR (352)..(23): 361254mologous to Acanthamoeba castellanii Myosin- IA,accession number AF085185,Smith-Waterman Score=111.
ctcccgggtcgacgatttcgtatggccctgagcccctggaccccattgctgggttctggcgagaagctggggcaggcggctggcgtctccaccggcccctccctggagttatgcaccttaccctccaccctgggctcctcggtcgcggtcgaggcgctggagcagctgtttgttgtgggtaagacgcccctcgggcgctggaagggacgcctcctcagaggtggcgcttaggaggcactcagcgggaaccctgagcggggactctcctcccggaaccagggcatcactgggcagggcagagccttctccccgctccttggaggctggggagagagaggtggcgggtgggaccaagtgcccagatctcctgccctaacgcagctgaggtgacttcgctcaaccctcaggagtagataaattactgaggggacg

SEQ ID NO: 3659 - DNA, 2151 bp, Homo sapiens
  SIMILAR (193)..(1923): 201254mologous to Homo sapiens yotiao,accession number AC000066,Smith-Waterman Score=235.
atggccctgagcccctggaccccagggctgggcgctggcgagaagctggtgcaggcggctgccgtctccactggcccctccctggagttatgcaccttaccctccaccctgggctcctcggtcgcggtcgaggcgctggagcagctgtttgttgtggaatgtgtccgagacgctcgcagattaaatctttttgagataaatacaataaaaatgagaattacaaggacagagaatgaaatagagcttctgaagaagaaaataactgacctgacaaaatataatgaagctctgggggagaagcaggaagagctagcaaggaagcatgcaaggtttgtcctgtcactcaaccaaactatggagaaaaaagccaccaccactgtttacataaatgagacttataccaaaataaacttgaagagagaagacatagcattgcaaaaaaaatgtattcaagaggcagaggagctaatggaaaaagaaagggcagaatatctaataagaaaacaagagttgactgcacagattaatgaatttgaaaatacccgtgaagtaaagagaatggagacttatcaaaagaagaaagaattggataaattacaaactaaaatgtcaaaaataaaagaaacagttactgtttccgcagcggttcttagtgatcacaatttagagatagcacgactacacgaatcaataaggtattgggaacaagaggtcagtgagctaaagaaagaccttgcaattctggaggcgaaactgtgttttttcacagataacaaagaaaaactagatgatatatctaatgatgaaaaaaatgaattcctgaacaagataaaacagctggttgaaacactgcatgctgctcgtatggaatacaaagacctacgagagaaaatgaaaactcttgccagacaatataagattgttttaagtgaggaagaaaaagcttttttgcaaaaacaaaagattcatgatgaaaatcagaaacagctgacatttatttctcagaaagaatactttctgtcacaaaagagagtagacatcaaaaatatggaagaaggactcatcacactccaggaacttcaacaggttattctttccttcatgtcctctgtatacagcaagcctaacttaagtcatagcagaggcctgacttgctgttccttccctctgtatttgcaaatgatgacaccctttccttgtgttataactcagtggaaaatggcttgcttgagaaaaaagcatgcacgttggacagccaagataaaagctgaaatacaagctattacagaaaaaattcagaatgcagaagttagacgaattgaattacttaacgagaccagtttcagacaacaggagatcagtggatttgtggcacagattgaaaaacttacaacagaattaaaagaagaggagaaagcatttgttaacaaagaaaaaatgttaatgaaagagttaagcaagtatgaggaaatatttgttaaggaaacacaaattaacaaagaaaaggaagaagaactagttgagtatcttccacaacttcaggtggcagaacaagagtataaagagaaaagaagaaagttagaagagctcagtaatattattacagagataatttggggttttctgtttgagcaggaagatgtaaaacaagaattacaacaattacgagatcaagaaagcaaaaaaaacaaagatcattttgaaactctaaagaacttagaaaatggattctatataaatgaccaaaaagcagatcttctgctcctggaaaataaaaaattaaaagaatatattttatacttgaagaataacatagagaaatacagagaaggacaagaagccctcatgcacacctcaagcgacttgtctcggcaactaatagctcaggagggtcttctgcaagttgaggagcaaggaatccagtggtggatccgtcagagtcccaaagcctcacaagtagggaagccaacagtgcagccttcagtctgtggccaaaggcccaagagcccctgccaaaccactggtgtaaatccaagagtccaaaagctgaagaacttggagtccaatgttcgagggcaggaagcatctagcacaggagaaagaggaatcttggaagactcagccagtctagccacgctggcagctgattag

SEQ ID NO: 3660 - DNA, 2658 bp, Homo sapiens
  SIMILAR (1002)..(2558): 281254mologous to Rattus norvegicus pro-alpha-2(I) collagen,accession number AF121217,Smith-Waterman Score=159.
atgcaggccccataccgctgtcagcgcacgggctggcttcagcagaagaggctcaaggccgggctgtggggcctggagagctcatcttggtctcttgggcccctaggacaggctgcccagcaggagctcacctctgcccctggccagttccgcctcccgcccccaccccaagccccagagaggcccaccgctggtgggagcgcgagcctcggtccccctctgccactgggaagctctctgaagtcccagagcccagtagacccggaaggccacgaaggccccccagcacctgggccccacctgggggtccagagcgtctgcactgcccgtggtgccaggacccgtggtgccaggacccgtggtgcctcgacccgtggtgcctcagagcaggtccacatctgcccatcccagtcacatccaacgccccaggacatgctggagggtgggcgtgcaccttcacaccaaaaccatgcaagcccctgcacaggtaggggtccacagccagctggagaactgagacaagccgtgagcagttcccaaactcctggggaaggcgtgggtcttgccgcacttgttctgtcgtgctggggcacacggagccaagaccagagccggcgcatgtgcttgtcagagaggaatccagggagccctgtgggggctgcttggggaaatgaggctgtcatccccgcgccccaggtgctcaacggggaggataaaggagccctggcctgcgggaggcagccccaggggacggacggagccctggttcagagcccagagagggcattggagggccaggcctcagccaactccatttctcccctctctggcctgcgtgggcatcgggggcatggtgggtaccagatcctaccctgcctgctcaaccctatagacagcgtgggacacagagggcatggtggccatgcccattttacagatgagcagaaggagactgtgagagcaaataacgtgcccttgttcacactgagggcctggagattcctgctcccagcccaggcccagacggcaacagaagctcatggtgagttcaccccggtcctggtctggcacctcattgctggggaggtctcggcagtccagaggaggctcaccatccagcagctgtgcaccccccctaacacactgcgggctctccgcacccggaaagctgcccacaactgtcaggacagcaacaaagaggagccactgatgcacgtggcaactcggatgaatctcccaggcatgacgccgaactcaagcagcaagataggaccaaggcctgaggaaggcgaaactgccaggtgggcctcagcagcggaccctggtcagggcttggagtgccggttgaagacccaagggctgcacgagaatctcatggaactctgcaccgcccccgacgcccatgccaaggtgctgggcaaagctgcaaaggtgctggtgcccggccaccctcagtcaaggcggcaagaacccctcgctggttcgctcagctcttgctccctgccagcccccaggtgctggtgcttctgccacaggatagcaggcaccccacagcccgatggcggctcagatggagactgcggtactggatatcgtgggggtccatgtgagtcccgggccccgctgcctcctgagaccaaggagcatttccctctctggcgatgggcacgggagctcctggcaggacggcgaccgtccggtgggcccggagaggaggcagctgctgcaccctcggcgctggctctcagggatggctgggctgttaggcccgaactacacctgctgccgccgtgtggagaagaggtggccccaggagcccactgtctcggggcggtgcggacaagcctgggtctgctgtgtgcggagctgcgaggaggcagtgggggcgagcctgcgaagaagcgaagcaagctggagaggagcgtctatgcgggcctgcagactgcctccgtggagaaggcgcagtgtaagaagagcagctgtcagggcgggctggcgccctccgtggcccacagggtggcccagctgaaacccaaggtcaagagcaaagggctgcccacaggcctcagctctttccagcagaaggaggctacccccggggggcgcatccgggagaagctgtcccgagccaagagtgccaaggtgtctggggccacacggcacccacagcccaagggccacggcagccgggagacacccaggtgcccagcccagccctccgtggctgcgtcccaggaggcaggcaagttgctggctggctatgacagtgaggactgcgagggtctcctggggacagaggcaccacccagggaagcagggctgctgctgcacgccggggccagtgtggccgtgttggggccctcaccctcctctgtggtcaagatggaggccaaccaccaggccgagaagaagaaggagaggcaggggttgctatgtaaccacgagggaggacaggggttgctagagttagacatcaaagttgccgcgagcccaaaggagctacgggaatccgggaatgtggggccgcgtggaccggcggcggtggcccgccacgcccgccccgccgaagccctgtttggaatgtgggtttcccccagtggggctcgtgctgccaccacgtctgattatcccggtacggagccgccgcgctttctgtag

SEQ ID NO: 3661 - DNA, 556 bp, Homo sapiens
  SIMILAR (1)..(369): 941254mologous to Homo sapiens SLAP-2 homolog,accession number AF100750,Smith-Waterman Score=555.
  misc_feature (1)...(556): n = a,t,c or g
gagcaagacntanatgagcctcttgccanagtgtcccttttaaaagatgacttcagggtgcaccagtcagaaattgaggcaaagcaagaaatacagcatcttcgaaaggaattgatcgaagcccaggagctagctagaacaagtaaacaaaaatgctttgaacttcaagctcttttggaagaagaaagaaaagcctatcgaaatcaagttgaggaatccactaaacaaatacaggttcttcaagcccaattgcagaggttacacatcgatactgagaatctccgggaggagaaggacagtgaaatcacaagtactagagatgaattgcttagtgcccgagatgaaattttgctccttcatcaagcagcagactgtcccgccggccgtctagagcccctccgtctccgtcacctctcgccccttcactccgggcgaggactggcggtggctgcccagaggtgcccagccacaccttccttcggcccaaaaggactttcctggccgcgccgaaccgacccttcattcatgctgcagtgctgcaacgtttccgccacca

SEQ ID NO: 3662 - DNA, 1396 bp, Homo sapiens
  SIMILAR (515)..(1393): 961254mologous to Homo sapiens SLAP-2 homolog,accession number AF100750,Smith-Waterman Score=1424.
tgagaaaaaaagaattacaacataaaatagatgaaatggaagaaaaagaacaggagctccaggcaaaaatagaagctttgcaagctgataatgatttcaccaatgaaaggctaacagctttacaagaaaatcagacaagagcaaaagaatctgatttttcagatactctgagtccaagcaaggaaaaaagcagtgacgacactacagatgcccaaatggatgagcaagacctaaatgagcctcttgccaaagtgtcccttttaaaagatgacttgcagggtgcacagtcagaaattgaggcaaagcaagaaatacagcatcttcgaaaggaattgatcgaagcccaggagctagctagaacaagtaaacaaaaatgctttgaacttcaagctcttttggaagaagaaagaaaagcctatcgaaatcaagttgaggaatccactaaacaaatacaggttcttcaagccccaatggcagaggttccacatcgatactgagaatctccgggagcagaaggacaagtgaaatcgcaagtgctagagatgaattgcatagtgcccgagatgaaatgtggctcgttcatcaagcagcagcaaaggtggcctctgagcgggacactgacattgcttctttacaagaagagcttaagaaggtgagagctgagcttgagcggtggcggaaagcagcgtctgaatatgagaaagaagtcacaagtctgcaaaacagttttcagcttagatgtcaacagtgtgaggaccagcagagagaagaagcatcaaggttgcaaggtgaactagagaagttgagaaaggaatggaatgcattggaaaccgaatgccattctctaaaaagggaaaatgttttgctatcatcagaactgcaacggcaagaaaaagaattgcacaattctcagaagcagagtttagagcttaccagtgatctcagcatccttcaaatgtctaggaaagaacttgagaatcaagtgggatccttgaaagaacagcatcttcgggattcagctgatttaaaaactcttctcagtaaggcagaaaaccaagcaaaggatgtgcagaaagagtatgaaaagacacagactgtactctcagaactgaagttgaagtttgaaatgactgagcaggaaaagcagtcaatcacagatgagctcaaacagtgtaaaaacaacctgaagctgctccgagagaaaggaaataatccttccatattacaacccgtcccagcccgtattcatcggcctattcctggctttcctgatatggtgattcggtccattgtggagagaaagaaaccctggccctggatgcccatgttggctgccctggtgcaagtaacagccatcgtgctgtacgtgccaggtctggccagagcttctccatga

SEQ ID NO: 3663 - DNA, 1135 bp, Homo sapiens
  SIMILAR (197)..(1087): 681254mologous to Oryctolagus cuniculus sarcolemmal associated protein-3,accession number U21157,Smith-Waterman Score= 943.
ctggaagaaaaagaacaggagctccaggcaaaaatagaagctttgcaagctgataatgatttcaccaatgaaaggctaacagctttacaagagcacttgctttcaaagagtggcggggactgcacttttattcatcaattcatagaatgccagaagaagctgatcgtcgaagggcatctaaccaaagcggtagaagaaacaaagctttcaaaagaaaatcagacaagagcaaaagaatctgatttttcaggatgctgtgagtccaggcaaggattagggcagcgacgactctacagacgcccaaatggatgagcatgacctaaatgagcctcttgtcaaagtgtcccttttaaaagctcttttggaagattatagagggggctatcgaaatcaagttgaggaatccactaaacatatacaggttcttcaagcccaattgcataggttacacatcgatactgagaatctccgggaggagaaggacagtgaaatcacaagtactagagatgaattgcttaatgcccgagatgaaattttggctcttcatcaagcagcagcaaaggttgcctctgagcgggacactgacattgcttctttacaagaagagcttaagaaggtgagagctgagcttgagcggtggcggaaagcagcgtctgaatatgagaaagaaatcacaagtctgcaaaacagttttcagcttagatgtcaacagtgtgaggaccagcagagagaagaagcaacaaggttgcaaggggaccatactgatgaagctgcagacttaccattatcaaggcacagtgtaagtgatcctggagtcagctgtacacaagaagaaattcaagaagcaagaggactgactctattatgcttctcaaagataaaatgttctcagaagcagagtttagagcttaccagtgatctcagcatccttcaaatgtctaggaaagaacttgagaatcaagtgggatccttgaaagaacagcatcttcgggattcagctgatttaaaaactcttctcagtaaggcagaaaaccaagcaaaggatgtgcagaaagaggtaaagcgaaaagacattatgagcccaattatggttggacttaaagccaaaagcaaatcggatatccatgctagttag

SEQ ID NO: 3664 - DNA, 543 bp, Homo sapiens
  SIMILAR (88)..(540): 641254mologous to Mus musculus Pro-Pol-dUTPase polyprotein,accession number Y12713,Smith-Waterman Score=510.
atgcaacctgaactgcctatcatgaactgggtgctttctgagccatctagccataaagtgggtcatggacagcagcattccatcatcaaatggaggtggtatatatgtgattgggctgtagtaggtcgtgagagcacaaccaatggtttggctggatggtcagagacttggaagaagcatcattgggaaatgggtgaaaaacaaatttggggaagaagtatgtggatggaactttctgagtggtcaaaaactgtgaagatatttgtatcctatgtgagtgcccaccaatgtgtaacctcaacagaggaggatttcaataatcaatgggatggaatgacctgttctgtggacaccactcatcctctttccctaaccacctctgtcatcgccaagtgggcccatgaacaaagtgaccatggtggcaggtatggaggttatgcaggggctcagcaacatggacttccacttaccaaggctgacctggctatgaccactgctgagtgcccaatttgccagcagcagagaccatcactgagcccttaa

SEQ ID NO: 3665 - DNA, 280 bp, Homo sapiens
  SIMILAR (1)..(210): 811254mologous to Mus musculus Pro-Pol-dUTPase polyprotein,accession number Y12713,Smith-Waterman Score=322.
agacagatcttggcctgttactgggctttggtggaaactgaacgtttgactgtggatcatcaagtcactgtgagacctgaactgcctatcataaactgggtgctttctgacccatcttgccataaagtgggtcatgcacaacagcattccatcatcaaatggaagtggtatatatgtgattgggctggagcaggccctgaaggcacaagcaccccccgaaagtggacagctgcagcactacagcccctttctaggacatccctgaaggacagcactgaag

SEQ ID NO: 3666 - DNA, 416 bp, Homo sapiens
  SIMILAR (101)..(415): 731254mologous to Mus musculus Pro-Pol-dUTPase polyprotein,accession number Y12713,Smith-Waterman Score=436.
gggacccaaaatgtcaggcagtcctccagtcaaagtaagggcttatggaggtcaggcaattagtggagttttagctcaggttcaacttacagtgggtccactgacaaaggaagagaagactagggcctggttcgcagatagttatgcccaatatgcaggcatcacccaaaagtggacagctgtagcactacagcccctttctaggacatccatgaaggagagcagtgaagggaaatcttcccagggggcagaacttcaagcagtgcacttggttgtgcactttgcatggaaggagaaatggccagatgtgcgattatacactgattcatgggctgtagccaatggtttggctggatggtcaggggcttggaagaagcatgattggaaaattggtgacaaaggaatttggggaagag

SEQ ID NO: 3667 - DNA, 1164 bp, Homo sapiens
  SIMILAR (860)..(967): 691254mologous to Mus musculus Pro-Pol-dUTPase polyprotein,accession number Y12713,Smith-Waterman Score=111.
tcaatttactatttcattacggtttacaaactgatgatattccaactctattaacctttctgcatttattttctgaaattcttctgtaaatagtaacatttccttataacctattaggttactgtaattcatagattttttgtctttttgtacttcagactcatcttgcatttcgtatttcagattgaagttacatattgctgctgtctgctcctttttagtgaaaaatggcatatacaggacactgtatgagaacatagggatgctcattattactgggtgatcatttttcttagaccgggccttagctgccttcccgcggggcagggctcgggacctgcaggccgccatgcctgagcctcccactccttccatgggctcctgtgctgccggagcctcctcgacgagtgccaccccctgctccacggcgcccagtcggatcgaccacccaagggctgaggagtgcaagcacacggcgcgggactggcaggcagctccacctgcagccctggtgtgggatccactgggtgaagccagctgggctcctgagtctggtgtgcagccattgacttggcaaatgcctttttctccattcctgtccacaaggcctgccagaagcaatttgccttcagcgggcaaggccagcaatatacctttactgtcatacctcagagatatatcagctttccggctttgtgtcataatcttatcagagggacattgattgcttttcgctgctggttgtgcactttgcctggaaggagaaatggtcagatgtgcgattaggtactgattcatgggctgcagccagtggtttggctggatggtcagggacttggaagaagcatgactggaaaacatcacctctagtgatccacgagcaaaagttttgcttcctgttcccatgacattatgttctgctggcctagaggtcttagttccagagggaggaatgtgtgaattaccttcctgccttgtggaaatgtggaggtcagagccaacagcaatagcaatggtgacaagtaaggcacagaagagaatagagatgggccagtaacagcaaggctggacatttggaatgagtgtcagctccagacttccagcttctgcagcagaagctaaagtatcagtagggggctcatcccagagtatcaagtcttgggg

SEQ ID NO: 3668 - DNA, 2976 bp, Homo sapiens; identical to SEQ ID NO: 2496
  SIMILAR (754)..(2319): 881254mologous to Homo sapiens putative p150,accession number U93568,Smith-Waterman Score=2308.

SEQ ID NO: 3669 - DNA, 1070 bp, Homo sapiens
  SIMILAR (1029)..(1064): 661254mologous to Mus musculus Pro-Pol-dUTPase polyprotein,accession number Y12713,Smith-Waterman Score=40.
atggggccagtgcctggtgaggaggaagagagggttagagatgaatttggagatgaagattgtgcagcctttggttttattctacttgtgataagagcccctggaaacttttcagcaggtatcacccgaaagtggacagctgcagcactacagcccctttctaggacctccctgaaggacagcagtgaagggaagtcttcccagtgggcagaacttcaagcaggccacctggttatgcactttgcatggaaggagaaatggccagatgcgcgattatgtactgattcatgggctgtagccagtggtttggctggatgccaccccgtcatcgcccatgaacaaagtggccatggtggcagggatggaggttatgcatgggctcagcaacatggacttccactcaccaaggctgatctggctatggccactgctgagcgtccaatttgccagcaacagagaccaacaccgagccctcgatatggcaccattactctgggtaatcagcccgctacctggtggcaggttgattatattggaactcttccatcatggaaagggcagaggtttgtcctcactggaatagacacttactccagatataggtttgcctatcctgcatgcagtgcttctgccaaaactaccatccatggactcatggaatgccttatcctccatcatggtattccatacagcattgcctctgaccaaggcactcactttacagctaaagaagtgtggcagtgcgctcatgttcatggaattcactggtcttaccatgttccccatcgtcctgaggcagctggattgatagaacagtggaatggccttttgatgtcacaattacaacaccaactaggtgacaatactttgcagggctggggcaaagttctccagaaggttgtgtatgctctgaatcagtgttcaatatatggtactgtttctcccatagccaggattcatgggtccaggaatcaaggggtagaagtggaagtggcactacttaccgtaacgcccaatgatccactagcaaatattagcttcctgttcctgtgacattacattctgatagg

SEQ ID NO: 3670 - DNA, 1424 bp, Homo sapiens
  SIMILAR (175)..(849): 711254mologous to Mus musculus Pro-Pol-dUTPase polyprotein,accession number Y12713,Smith-Waterman Score=829.
atgggccgggcgaggcggctcacgcctgtaatcccggcactttgggagaccgaggcggacggatcacgagctctaacagtggaaaccacagtcactcaactacaacatttaaatacagtgggaataattggattccgaggtggcaggggccaagtggcagcagtcaactgtcaaaagcgagatatccagccttttaccagggtaactgtgcattggggaaagagaaatgatcagacatttcaagcactagtggacactggccttgagctgacattgattcccggggacccaaaacatcattgtgatcctccagttaaagtaggggcttatggacatcaggtaattaatggagttttagctcagattcaaattacagtaggtccagtgggtccctggactcaccctgtggtcattttcacagtgcctaaatgcataattgacatagacatacttaggtggcagaactcccacactggctccctgactggtaggatgaaggctattatggtgggaagggccaaatggaagccgttagagctgcctctgcctagaaaaacagtaaaccagaaaccatatcacacccctgtagggactgcagaaattagtgccaccatgaaggacttgaaagatgcaggggtggtgattccaaccacaaccctgttcaactctcctatttggtctgtgcagaagacaggtggatcttggagaatgacagtggattattgtatgcttaaccaagttgtgtctgcagttgaagctattgtactagatgtggtttcattgcttgagcaaattaacacatctcctgccatagagtgggtcatgcacagcagcattccatcatcaaatggaagtggtacatacatgatcgggctcaagcaggtcctaaaggcacaacctgcaccaatggcctcatggggagtttcctatgatcagtggacagaggaagagaagactacggcctggttcacagacggttcttcacgatatgctagcaccacccgaaactggacagctgcagcactacagtccctttctaggatatccctgaaggacagctgtgaagggaaatcttcccaccacccgtgtcatggaggcaaggatggaggttatgcatgggctcagcaacatggactttcactcaccaaggttgacctgcctggctatggccactgctgagtgtccaatttgccagcagcagagaccaacactgagccctcgatatggcaccattcctcagggtgatcagccagctacctggtggcaggttgattatatgggacctcttccatcatggaaagggcagagattatatgtgatctcaggagatgtgtatgggttcaagttgacaagggatggacttatgatggttaatacggagtgtcaacttgattggattgaaggatgcaaagtattgatcctag

SEQ ID NO: 3671 - DNA, 397 bp, Homo sapiens
  SIMILAR (171)..(37): 371254mologous to Hepatitis C virus core protein,accession number AF233722,Smith-Waterman Score=51.
cggattgcttaagagtactctggtgtcctccagtgtagttccacgttctccgtcgctccagcaacccctcaacccgggtttgagccccttgttggacgccacttgatgagaccagctcggtcgtggagaccccaacccagtagtgcctcggctgggttgccgtcttctcctttcagagatggatgccacaggttccgggcttcttgggctctgggaggacgcgcagcggaaggcgaggtcgctatatgaggccgctccaaagtcgcctcgcgctgttgttgcgtcactgcctccagcctccagcatccaggtagagtgcaggcatttctttcccggcacgtcgttcaccgagaggctgagactcttgcctgtccttcctctgccgcgtacgcgtggt

SEQ ID NO: 3672 - DNA, 2176 bp, Homo sapiens
  SIMILAR (1445)..(2170): 561254mologous to Homo sapiens Gag-Pro-Pol protein,accession number AF164614,Smith-Waterman Score=697.
atggatttcattaaggaccccaatctgaatgtggaccgcacacaagaatcagaaccaaaacctggacacagccaagactgcaggtttctcttcccttgctccaaatccactttcagaagaattagagaagaattgactaaagaatcctccccagactcaccctcggcggggccaccttcttctcatttcagtctggggccacattctccgggcctgcggggcatggcaggaggcaaagccaaaggcgaagtggccacaaattccggaggagaaagaagagggccaggcaccacgtgcctgcactctccctggatgctggaggctgctccgccgtgggcaggaggagaaggaagagaactgggtgccgcctgcctgcactctctccggatgctggaggctggaggcagtgaggcagcaacagcgcgagggcgacggcgactttggagctgcctcatgcagcgacctcgccttccgctgcgcctcctcccagaacccaagaagcctggaacctgtggcgtccagccctgaaaggaggagacggcaacccagccgcgctccgctggggtgggcgctgaaggagcccgggtcggagaggagccctccccttctctcctgcgtggaagccctgcagcctccgtttcttttgggactggggtccggggccttctgcctgacccggggtgagaaagggagccctgatcaggacccgttttgcctgcactctccctggatgctggaggctggaggcagtgacgcagcaacagcgcgaggcgactttggagcggcctcatatagcgacctcgccttccgctgcgcgtcctcccagagcccaagaagcccggaacctgtggcatccatctctgaaaggagaagacggcaacccagccgaggcttccagatcctgaggagctctggggccttccttctggacagggaacatgtctgcctggcttcctcagccagcactactgggttggggtctccacgaccgagctggtctcatcaagtggcgtccaacaaggggctcaaacccgggttgaggggttgctggagcgacggagaacgtggaactacactggaggacaccagagtactcttaagcaatcccttgctcctcagaaaagggggaaggaaggttagtactagccgacttatgcagctttgtagtgtggtagagaaatattgcccctggtttctggaccaaggaactatgaatatagagatctgggaaaaggtagccagagcactgaaaaaggcatatagggatggtgctgaggatattcctataaatatctggtcagtgtgggctctggttcatcccaccttggagcctttccacacagatcatgatgaggaggaatcagaggaagaaggagagtataatgaagtaacaaaagaggtgacagagcagttttgcttgccagctaaagcagcaaaggagggaggaaatcctagtctcactagccctcagcaattaacaacagagactgaggcagagatacagctgattgagaagcaagtgcataaggctcaaataaatagaatagatccagaaaagactttagacttattgatttttccaactcagcattcacctactggtggtgttgtccaagagcaggacttggtagaatggctttttcttccacatagtaattcatggactctaactccttatttagatcaaattgctactctgataggaaatgggagaactcaaattgttaaattgcatggatatgaccctggaaaaattattgtccctcttacaaaggcacaaatacaacaggcctttataaatactcttaattggcaaacccatttagctgatttcatgggtgttcttcataatcactttccgaaaacaaagttatttcaatttttgaaattaactaattggattctccctagaataactaaatttaaaccaattgaatgttctgaaaatgtttttacaggtaggtctagtaatggtaaagcttcttattccagatcaaaaaataaagttttccagacatcctatacttcagctcaaaaagcggagcttgtagctgtaattgaggtgctgactgcttttgagatgcctgtcaatgtaatttctgattctgcatacatggctcattccacacaattaattgaaatgctcagttatgatttcatacagatgaacaactga

SEQ ID NO: 3673 - DNA, 784 bp, Homo sapiens
  SIMILAR (40)..(693): 861254mologous to Homo sapiens FLJ00044 protein,accession number AK024452,Smith-Waterman Score=939.
atggggctaggctggctggcaggtcaagaagaggaatatccctccctcctagagacttgggcagagctgctccagaagggctccacctgcatcaccaacaccgaaggatgggtggggcaccccctggaccccattggctgcctctgcagggcgctcctggaggcctgtcgtctggaggaggagacacttaccctttacccagactcaggccccgagaagcggaaggtggcctaccagcacgtgcctgtgcccgggagccctggggagtcctacttggtgctggcgctggaggtggcactgctggggctggggcagcagcgggccctgccggaggggctgtacgcccaggacaaggtggtgcgcaacgaggagcagctgctggccctgctggaggaggtggagttggatgagcggttggtgcaggtgctgcgcaagcaggcggggctgctgctggaagggggtcccttcagtggctttggggaggtgctgttccgggagagcgtgcccatgcacacctgtgcccgctacctgttcaccgcactgctgcctcatgacccggacctggcctatcgcctcgcgctgcgagctatgagctcccctgatgaggaaacaggatctccctgccggctcctccgtcaaccagaaaaggagccagctccccttcctccttcccagaactcattcgggaggtttgttccccagtttgcaaaatccaggaagacagtgacaagaaaagaagagatgaaggatgaggaccgtgggagtggggcctttagcctggtaa

SEQ ID NO: 3674 - DNA, 447 bp, Homo sapiens
  SIMILAR (111)..(281): 361254mologous to Caenorhabditis elegans Similar to cuticular collagen; C18H7.3,accession number AF067607,Smith-Waterman Score= 96.
tcacagcccgtgcaaaggccctggggctggactgtgcctgtatgtttgaataacggtggcagctgcatcgaggaagcgggtcgtgagctgtccagcgccgctctggggtcggcccagcgtgtctctcctgcggctcggcgaacccgggccccccgcccggcacatctcccggagccggggccgctccgggaggggggcggtgggcgcgcgcaaaatccggcccggagtcgccgcccgggactggccgccgcaacccgcttgagcgccccaggagccggcccgaaaacccgtgctggagtttccttcctttcgcctcctctcgcctcctccccggggcacgcaaatttcgggccggattctttcttgggagacggagtaatgcgtcaggcctaacgcagtgaaaacaagcaagacccagcccggaactcccgggacctgggttcgcat

SEQ ID NO: 3675 - DNA, 1435 bp, Homo sapiens
  SIMILAR (608)..(1165): 281254mologous to Strongylocentrotus purpuratus alpha-1 collagen,accession number M92040,Smith-Waterman Score=83.
tcaggggaccttcaggtccacggactgtgtccccgagtccagcaggagcttcttcagtagggggtcctccagtacaggcatggccatgctccctatgtgtcgggtcactggaaccacggggatcgattgggggaccaccaaaggggctgcagctgtggggtccaagggcttcttggttcctgggggactatgcctgtccccttctggcctcagcacctgtcttagcggcttgcaaaactctgtgccaaacacctgcggttcctgcttccctcgaggtgacggccactggtcgctgtgaaaacacatgtggctgctcagccctttctccgtataaaacatctggctgcagttcttgcagacaaaagtgctcctgggcttcgtccagtctgtgggactgccgttttgctggttacctctgcctgccacattctcttccttcaccggatgggggagcctgtagatgtttccaccctggattctgctgaatattgtcagcttggacttggagggatctgccgggggcccggccgatgagaaggaggccatggctacctggctcggagaagccgcacagcacatatccatcttcgccttctctttccggaagccggagaatcgcggggccctggggttgcccaagagccggtagcctccaccccgggagcaggctgggcccttttcaccttttgtgatccttgaagccgcgccattctcggctggggcctgcttccctggcagcgaggctcctggtggctcctccccacctaactgggtctgccgttggcctgtggaggggaagatgtcctccaggtccaaggtccctttagaggatcgcagctgcttggccagagaagagatgtctggattcctggaagggtccagagacggtgctgcaaggggcgttggaaccgcggccactttcagtcccccctttgcgtctcgtctcgtgctgccgggggaggcctctctgggaaccccgggtgtggtttttctcctgcgggctggggagccctctgcctcggggtttccagggccggcgtggagagagtccacagcaggagccagtggtgggggctgctgcggccacggcccctgcagcggcctcagggcggctggtttgccctcgggcgcagggagctgggaggagactgctgccacctgggcatgggagaagatccgctgggacttggtgatcatctggaacacctgcatctgctcgtggctcacaagaggttcctgcgacttgaggaagagctggcggaagagcggcgaggcatccgcagggagcccgcctgccttctgggcctcctggaggccgggctccccggggttctggcacaggaaggagtcgcagtcgaccttgaccttcttgggggcgcaggggtcatcttccccgctggccgacctggggtcgctcggggcctccgcggggacc

SEQ ID NO: 3676 - DNA, 759 bp, Homo sapiens
  SIMILAR (76)..(750): 471254mologous to Human endogenous retrovirus env,accession number X82272,Smith-Waterman Score=507.
atgaatgatgctggaaaccatcattctcatcaaactaacacaagaacaggaaaccaaacaccgcatgctctcattcataagaggaagttgatcaatgagaacacatggacacaggaaggggaacatcacacactggagccttttggtggaacaacagacagaatagtttccccttcccatactcgcagtccagacatggcaatagccaatttccaaagttctgggtgttctgttgtccccgataccatccctcgccctcagtatcagtgtagatccagacattctgttttacttacctccaacctgactgttcccatgcagagttgtgttaagcctccttatatgctgttagtgggaaatatcaaaatttggatgaacaatcaaactgtccgatgcattaattgtcatgtatacacttgtattacctcccattttgactccaggaaaagtgtaatgttggttctagctcgagaaggaatctggattctggtaactttgcccagaccttgggaatcctccctgtcaatacgtttaattaatgaagtgttacagcgaattctaaaaagatctaagagatttgttttcactttaatcgctgtgatcatgggcctaattacagtcactgcactggccaccactgccggaatggcgttacatcaatctgttcaaacggctcattttgctaatgattggcaagccaattccaaccagatgtggaattctcaacaaggcattgatcaaatattggctgctatttga

SEQ ID NO: 3677 - DNA, 357 bp, Homo sapiens
ttttccagaaacaaatggcttgcgcactgcagatggcacaccacagacagtcccatgtgccacccactaaagctaaaaagtcacctggtaatggagttcaggccgtttcctctaatgacagaagtctatgatttttttaaaataactggttaattcaaggcaagagtttgttcttttcccgacacaaaaagaaattaagagttattatatgagagccttaaacttaggcacttaaacctcaaatcccatcatttgttgtattggtgctaagaactaaaactcatcttcaaacgtcatcttccaacacataaacagcagattcaatctagtttacctgtagctatatctcttttcgcc

SEQ ID NO: 3678 - DNA, 723 bp, Homo sapiens
  SIMILAR (14)..(376): 301254mologous to Arabidopsis thaliana protodermal factor 1,accession number AF141375,Smith-Waterman Score=107.
atgcggaaggaaaagcagggggacggcattgccgacgggaagttcaccgcaatccggaccggcagctcccggacattcagcagcgagcgcacttcatcccactccgcaccccctccacacccacttctcaccggcagcgacgggggacatcgacggcaatcgctacccagcaacccccatgacgaagtacccaagcgcatcggcacgaagacccgtccacagaccaacctgcagcggtgggggcagtcacaccaaccacgcagagtcattgcctccactcactcctttggaggaggcagacacgcacccacccggcggcagtcaataaacgagacccccgcactgcatacgaacaggcagttgtctccccccaccacgagaggcgccatacacgagaagagagcggcgtcggcaccccccgtgagcacacacaaggatacgcgaggcgagctctgttgtcctcacacgactgtgggtgttgataacacccaactaaaactcatcttcaaacgtcatcttccaacacataaacagcagattcaatctagtttacctgtagctatatctcttttcgccttcattatcaacaatttggggaaggagataagcttcgtttgctctcctaaacaaccaatgagaaggccgcacgctgacagctgggaaaccagagatttagtccctaaagaaatcgaaagcagttatgttccagacaagagaagatga

SEQ ID NO: 3679 - DNA, 418 bp, Homo sapiens
  SIMILAR (4)..(417): 971254mologous to Homo sapiens KIAA1336 protein,accession number AB037757,Smith-Waterman Score=683.
ccagcctcgaaagaagcattttatacctggcaatatcgtgtggcaaagaagctcacagcattggaaattaatcagatcacacggtctcgaaaagaagggagagaaagaatttatcatgttgatgataccccttctggatcaatggatggtgtgcttgattatagtaaaaccattcaaggcacaagggatccaatttgtgccataactgcatcagataagatattgattgtgggtcgtgaatctggcaccattcagagatacagtctacctaatgttggtttgattcaaaaatattcccttaattgtcgagcctaccagttctccttgcattgcaactttagccgtcttgctatcatagacacctcaggagttctgactttctttgacttggatgctcgagtaacggacagtacgggac

SEQ ID NO: 3680 - DNA, 1371 bp, Homo sapiens
  SIMILAR (487)..(1350): 771254mologous to Homo sapiens KIAA1336 protein,accession number AB037757,Smith-Waterman Score=1095.
tggggttattgctcaaacactgtagtttatgcatataccagacctgatcgtccagaatattgtgttgtcttctgggatacgaaaaacaatgaaaaatatgttaaatatgtgaagggtctcatttctattactacctgtggagatttctgcattttggctacaaaagctgatgaaaatcatcctcagaacactggcagccaagcattgagctttgaggtgggagtttggaaatcttctcaggagaattcgacctgttcaagagaaaagccttctaaagatactgagattgagagtccccagggaaatagccctgcccatcaccttacagtaaagacgccagtcataccattgtttgttgcaatgaccaaaacccatgtgatagcagcctcgaaagaagcattttatacctggcaatatcgtgtggcaaagaagctcacagcattggaaattaatcagatcacacggtctcgaaaagaagggagagaaagccgtcttgctatcatagacatctcaggagttctgactttctttgacttggatgctcgagtaacggacagtacgggacagcaagtagttggagagttgttaaaattggaacgaagagatgtctgggatatgaagtgggccaaagataatcctgatttgtttgcaatgatggagaagacaagaatgtatgttttcagaaacttggatcctgaggaacccattcagacctctggatatatttgtaattttgaggatttagaaattaaatctgttcttttggatgagatattaaaggatccagaacatccaaacaaggattacctaattaactttgagattcggtctctgcgagatagccgagcactgattgagaaggttggaattaaagatgcatctcagttcatagaggacaatccacacccccgactttggcgcctactggctgaagcagctcttcagaaactggatctatacactgcagagcaagcatttgtgcgctgcaaagattaccaaggcattaagtttgtgaagcgcttgggcaaactactgagtgagtcaatgaaacaggctgaagttgttggctacttcggcaggtttgaagaggctgaaagaacgtatctcgagatggacagaaggaatacacttgaacttgactgtggattgggcagaactggcagtgtgaactttcacacattcctgacccttgctaaactgttcatggctctccagcaaaggcatggtataggcagcctgtctctggctaaggaaagtctgctgaatgtgaaggatcttctaagtatagaaccttggcattcagaggtatacatggtggacccagaggaaggggtccctgagttggcaattgataaggcagctgtggcatga

SEQ ID NO: 3681 - DNA, 469 bp, Homo sapiens
  SIMILAR (340)..(2): 321254mologous to Streptomyces coelicolor A3(2) putative integral membrane protein,accession number AL133278,Smith-Waterman Score=130.
ccagggacatgtagaggctccacagggcagccatgagaagcatgttggcgcagcccgtgatcagtacgaaacacgagatgcccagtccgagaagagccagcaagtccaggttggagttcatgtctgaccagtccatcagccagaggatggtgggcatgtagctgaagacttcccagctcgtcctgtcctggaagtactgctggaagttcttcaggaacactctgcagggaagcagccccctgtcaccgatgagctgcttgttctgatggaaagccaccaggaatgccacgaagtacacgaaggctagggccttcaggagcacgatccgggtcagccagaaggtgcccgtgtggagatgggccggagagcctgcggggccacgccccggcgcgggcggcgactcaggctccggatccgagtacccagtcttccgcctcctcagcgactccgcgggcgccgccattgttgg

SEQ ID NO: 3682 - DNA, 984 bp, Homo sapiens
  SIMILAR (834)..(580): 331254mologous to Homo sapiens Human prostate cancer- associated protein 33,accession number Y48247,Smith-Waterman Score= 94.
tcagccctgggtggggtcaggagtccacgagtgatgagggctaagtctgaaggccagaagggtgtcggcagccacggagagaacaagtacagttaacctgcagggttgaccagtgagggcctcaatcttccgcagggaacgccgggccacaacgtcgacgcacgaccctgggggttccaagaacatggcacccaggtcccgctgcttaggccggaaactcctgtcacataagcttttactcgtccagatttcagccattcctgggagtgacatctgtgctgaggggaagctcagtgtcagtgtcaggcatccccgaccacctcgggcagcctcggtcctcccaggagccgtcacggcccgagaacgccgctgcccagatgtgaaccgggtgtccaggatacgcaggctgcacagtggcgtgaatgaagggcagggctgaactccagggcctacggacaatcgctgcacagccgggccagtggctgaccctgcttcctcgctgtccaagtacacgaaggctagggccttcaggagcacgatccgggtcagccagaaggtgcccgtgtggagatgggccggagagcctgcggggccacgccccggcgcgggcggcgactcaggctccggatccgagtacccagtcttccgcctcctcagcgactccgcgggcgccgccattgttgggtctctgcggaggagggtgctagggcgatcgtcgcagccagcaagggacagagtaggcagggctgtgcctggaatgctcgggggaccctcccctttctcccagcctgagcacccttccgcctttgcacaacccagctcctgcctgcccttgggactggacttcaagctcttaataccatcacagtgaccatcagcttcagcataggaattctggggacacattgtgaccacagcagctaccttctggctacagtgagtaatgctgctgtgaacatgggcgtacatcccacaatcccacat

SEQ ID NO: 3683 - DNA, 1028 bp, Homo sapiens
  SIMILAR (133)..(810): 291254mologous to Homo sapiens mucin,accession number M74027,Smith-Waterman Score=127.
tttcgtactccgatgtgatgggccagtgggacccgcttttcaactgcaactcgggcgactgcatcttctgctgagggacttgtggcttacgggtctgctgcccgtttaagaagcggcgaatgaaccaaagcacctgcaccaactacgacacgccggtctgggtcaacaccggcaagccccccgcccgcaaggacgaccctttgcacgaccccaccaaggacaagaccaaactgaccgtctacatcatctgcagggaggtggccgtcatggagctcgagggcatcttcaccaagctggggctggacaaagcgcaccggccccaaagggagcacatgtccagggcccttgcggatgtcatgagagcacagggcctgtggaacactgatcacatggagagagacctaaacatcgttgtccacgtccagcattatgagaacatggacacgagaacccccataaataatcttccccccatgaccagagataacaaacagctgacccagaaggagacaattgatcacaatgctgcccaacagccaattagattcccctcaggaagctgtggctcagaggttaagacctttgtgggagatcacatggacagcaatgaccccaccagggctggatttagacgcccaactcctaaccccggcctcttcctccactctgtgtccgactccacttcagcagcccttgcaccaattacgacacgccgctttggctcaacaccggcaaagccccccggccgcaaggacgaccccttgcacgaccccaccaaggacaagaccaacctgatcgtctacatcatctgcggggtggtggccgtcatggtgctcgtgggcatcttcaccaagctggggctggagaaagcgcaccggccccaaagggagcacatgtccagcttgtcagcaaacagcttggtggtgtggctgcagaagcccacgtggacagttctggcctttgggtatcaccaggtcccaggcataattagtataaatcaaaatcctctagactatgacaggaaaatg

SEQ ID NO: 3684 - DNA, 1095 bp, Homo sapiens
  SIMILAR (28)..(555): 221254mologous to synthetic construct synthetic antigen of P.falciparum,accession number A12563,Smith-Waterman Score=98.
gtttagtagaaccgggcaggttgcttgaagcgcaggggtttgacaaaaacaaacggtgacggcgccgcggaagggtctgtggccgaggcggggaagccccagcgccgggccaaggccaaggccagccggactaaaacaaaggaaaagaagaagtatgaaactcctcagagggaagagtccagtgaagtctcccttccaaaaacctccagagagcaggaaatcccttctctagcctgtgaattcaaaggagaccatctgaaggtggtaactgattcccagctccaggatgatgccagtggacaaaatgagagtgaaatgtttgatgtaccactcacctccttaactataagcaatgaagagtccctgacgtgtaacacagagcccccaaaggaagggggagaggccagaccctgtgtgggggacagtgcaagcactccaaaggtccaccctggagacaatgttggaactaaagtagaaacccccaagaacttcacagaggtagaggaaaatatgtcggtacaaggtggactttcagaaagtgcaccccaatctaatttttcttatactcagccagcaatggaaaatatacaagtcagagaaactcagaatagtaaagaagacaaacaaggcctggtttgttcttcagaggtgccacagaatgttggcttgcagagttcttgcccagccaaacatggttttcagacacctagagtgaagaaactgtatccccagttgccagctgaaattgctggagaagcaccagctttggtggcagtgaaacccttgcttcgcagtgagcgactctacccagaactcccgtctcaactggaactagtaccatttactaaagaacagctaaaaatcttggagcctggttcatggctggaaaatgttgagtcatatttagaagaatttgacagcatggctcatcaagacaggcatgaattttatgagttgcttttgaactactcacgatgtaggaagcaactgctgctggctgaagctgagctgcttactctgacatctgattgccaaaatgctaaaagtcggctgtggcagtttaaggaggaacaaatgtctgtacaggtattttga

SEQ ID NO: 3685 - DNA, 931 bp, Homo sapiens
  SIMILAR (513)..(749): 331254mologous to Homo sapiens double homeobox protein,accession number AF117653,Smith-Waterman Score=71.
  misc_feature (1)...(931): n = a,t,c or g
atgggccagaccgcctccacctcccccgcccgcctggcctgtcctgagtgcatttccctgcactgtgtcgtcactgcacagccagtcaccgcggtctcagtcatcggcgcggatggctatgctggggtcccagggtggccgcagcagtcagggtcactgtgggagccctggggtggagtgacaaaccgcattgtcctgtgcccgccatggcagaagcgcagcctttgtatggaggcccaaccgcgctcccgtctggagaagcggcttccggggtgtggctgccgggtcggctctggtccacagcacggccctccccagccgacgacagccaccggagaggagatcggaacacgattgtctcagatgcagggcgctgtgcgggacgaagccgcaaggactctcgtatcgggcccttgggactcgggaaggttccagaggcggcggctgctctggacctcggtgttcactgacctttgtttcacttgcctctgctcgactccgagagcaggaaacccggccgtggcctggcagctccgcctcccatgcccgcacgctggggtctgtcttgtctggagcaagtggggcacacccggaaggaaggcgggggtcagggctgtcggccttggcccccctgctggtcgcctgtttcggggactcggggcggcccagtnaccacccgcctgaggcggggctcagcagcgttgcatgtacgggcctcgtactgcctcatggaaaatcctccggagccgccctccattgtgggttcctgagagtaggacacatttgccatggttttgtgggaatcacgcgcccctgatggaacttttctgctgttgtgaagtacttttatccatttggcttctctgctgaccttgccaagttgttcgaggtggaattaaacacctcccagaccaaaaaaaaaaaaaaaaaa

SEQ ID NO: 3686 - DNA, 1788 bp, Homo sapiens
  SIMILAR (1576)..(1532): 731254mologous to Homo sapiens PRO2550,accession number AF130089,Smith-Waterman Score=48.
  misc_feature (1)...(1788): n = a,t,c or g
gcggccgcgcactccccgcttccccgcccggctccggccacaggcctgggacgccgagccaccgccggcgtttcagacgcaaaccccaccgcgaccctgcagcagcctgccccgcctggccgccagaggcaccttccaactccgaaacacatttttcaacatataatagaatcattatcagaggtggacacatttagaagttgttcttaatcagagggcagcttgtgcttaggaaagccaacctcagtcctcagcacccagcacccagtgctgcaggtttctcctgggtgaagatggaccagcccaccttggccctcccgcaagctagaacaatatgtacacgtctctcaaactatgaagagaagatttgggaggagtatgagaaaatcctcaataccaaactagcagagcaatacgagtcgtttgtgaaattcacacatgagcagattatgcgaccatgtgggacaagcccaacaaactatgtgtcttgaagctttttgttgcagatctcggtaccaggtttgacctcaaggcatggttgctatacatttttttgcaactggtttgatgtcagcatttcagctccaactttgcatcctgagaacacttaaacgtttctgcaggtccattttatacaacttgaaagaccgtaaaactttctggttgccacaagcatatctttcttttctgctcatccaataaacagctgtgccctactgtgatagatttttccaacaaaaattacctggagcagcagtttagcaaaatatgccttcagtggcattcaacaaatggagtttccccaagcacagttctgtaagaagtgcgtgtgagagtgtgtgtatatgtgtgtatgtgtattttaagttattatttgtattgtgcaaaaatttttttttgatcttggggattctggctgtgaatttggtgcacgacaattatggtaaaaaaacatttgcttggtctaaagaagatcattaatgttttgtgaccatacaagttgtaacagtgggattgtttttatgtgtaggtattgttaaatacagggactgtttccagggcacagaatatggaatcgtaagttagggatgggacattaggatgtggattatggatggataaaagccgaaggtcttgcgggtccctgttatcctacagacacgtgggtgagaaattaggaccaacctnggagacgggcccattgacacatgggcncctgcctggggcatgttaggttaattctttgactccaagccttaaaatactcacatggagtcagcgctcacctcattcacacaattatcatagagctccctggacactgaacctctaaagggaaaaggtctaccctggagcccagggagccatcagggttggcttgggagcatgagaggtgagcccagggcttaggcctgggccaggccccggcaagcactgctactttggggaggagccactttcacctttgtattagttattaaaaaatataatttgggctgggcgcagtggctcacgcctgtaaatcccagcaactttgggagtccgaggcatgcggatcacttgaggtcaggagtttcgagaccaccctgggccaatatggtgaaaccccatctctactaaaaatacaacaaagttagccgggcgtggtggcaggcgtctgtaatcccagctgcttgggaggctgaggcaggagaatcacttgaaccctggaggtggcggttgcagtgagcacagatcatgccactgcactccagcctgggcaacaataatcggacttcgtctcaaaaa

SEQ ID NO: 3687 - DNA, 197 bp, Homo sapiens
  SIMILAR (67)..(111): 601254mologous to Gallus gallus <no link,accession number M63230,Smith-Waterman Score=51.
  misc_feature (1)...(197): n = a,t,c or g
agcttactgttggaaatgctatcagttgtaaagatagggaaaatctctcttncactacggtggtaggaaatgaatacatatcatttcccagcttccaggatgtcctggcaccttaactgtgcgtccccaaggacctacagatcacagggcaacaggggccgtgaaagagtagcccagggcncccaaggtgcaggagg

SEQ ID NO: 3688 - DNA, 392 bp, Homo sapiens
  SIMILAR (39)..(161): 311254mologous to Oncorhynchus tshawytscha MHC class I alpha- 3,accession number U80309,Smith-Waterman Score=64.
  misc_feature (1)...(392): n = a,t,c or g
ttgggatccgtctcctctttcgcctcctgcaccttgggagccccgggctactctcccacagcccctgttgccctgtgatctgtaggtccttggggacgcatagtcaaggtgccaggacatcctggaagctgggaaatgcatttcatcatatcaatgtgaagatttcttccagaccatggctggagaaggaaagaagattgttgcagtggcaggaccaaggtcaaatgagttatagccaagtctacagtaagatgtggcagtattctgttttgaagccgggaccatgattggcaagcttgccacttggtcaagtgctcaccctctgaaaatgtcttccttggtctttgcctccagctgggtgccacaaactctgaactggattccaaggcttn

SEQ ID NO: 3689 - DNA, 496 bp, Homo sapiens
  SIMILAR (399)..(283): 351254mologous to Plasmodium berghei novel protective epitope homolog,accession number AF181823,Smith-Waterman Score=64.
cccagttcagagtttgtggcacccagctggaggcaaagaccaaggaagacattttcagagggtgagcacttgaccaagtggcaagcttgcccaatcatggtcccggcttcaaaacagaatactgcccacatcttactgtagacttggctataactcatttgaccttggtcctgccactgcaacaatctgtgaaaaacacaagagaattcatactcacctgagacttaggtgacaggcctgcagaacttggttctctctatagtcactgagtcaggcaaaacacaccttctttccttctccagccatggtctggaagaaatcatttcccagcttccaggatgttctggcaccttaactgtgcgtccccaaggacctacagatcgcagggcaacaggggctgtgacagagtagcccagggctctcaaggtgcaggaggcgaaagaggagacagatcccaagctcctgtgccagcaccagcgagagactccctcgtgcc

SEQ ID NO: 3690 - DNA, 769 bp, Homo sapiens
  SIMILAR (240)..(698): 311254mologous to Mytilus edulis precollagen P,accession number AF015539,Smith-Waterman Score=123.
ctggaaccaattcttgaatttgggtagctttctcatgcctcttataaaagcctttcctttatgcccctctggtggaccagaaatactggctgggtgctttccatttcaccaatcactgtttgttccagataaactggttaacgttttaacataggactcccgttaatttttaacaagagagactggggaccccacgggccgcagctcctcccacggcaaacacccagtggcagtttttccctgatgacccaccaggcctccctgaacaatctgggaaataactcatggctgtgggcgcagagcagggcgctgcccaggtacaggaccggatgggccgtacgggacgtgggggccctcgttgctggcccagcggccatcttgcagccacagggggcttagggccaagctgcgggagactcggagctaaccgtggggaggccggtcctgccggtttcacagtctgttctcccctctcgggatggcgaacgccgtatactcaccatttcccagcttccaggatgtcctggcaccttgactatgcgtccccaaggacctacagatcacagggcaacaggggctgtgagagagtagcccagggctcccaaggtgcaggaggcgaaagaggagccggatcccaagttcctgtgccagcgccagcgagaaacaaagaccccgccaaacgccagaagccacgccctcctctcctgtcctctccaactgcgcgcctgattgggctgttccctcgtgccgactcgtgccgctcgtgccg

SEQ ID NO: 3691 - DNA, 545 bp, Homo sapiens
  SIMILAR (357)..(545): 361254mologous to Trichechus manatus prepronociceptin,accession number AY011815,Smith-Waterman Score=69.
  misc_feature (1)...(545): n = a,t,c or g
agaacttgtgaatctgaaaatcacctgcttgacattcatttgagaaagtgaaacataaaggagagtaacataagcaagacgacagaatgtgaggttctgcatccacatcccccacgacataatgcagctgccacagcaaacataagtgcattcatgaaagccttggaatccagttcagagtttgtggcactcagctggaggcaaagaccaaggaagtcattttcagagggtgagctcttgaccaagtggcaagcttgccaatcatggtcccggcttcaaaacagaatactgccacatcttgctgtagacttggctataactcatttgacctaggtcctgccgctgcaacaatcttctttccttctccagccatggtcatttcccagcttccaggatgtcctggcaccttaactatgcgtccccaaggacctacagatcgcagggcaacagcggctgtgagagagtagcccagggctcccaaggtgcaggagacgaaagcggagacggatcccaagttcctgtgccagcgccagcgagagacncag

SEQ ID NO: 3692 - DNA, 3695 bp, Homo sapiens
  SIMILAR (364)..(1020): 951254mologous to Homo sapiens ryanodine receptor 3,accession number AJ001515,Smith-Waterman Score=1048.
atggggaaaagatcatttgaacgggtcttggtggacaagtgtgactctggtaggtcctgtctgaggaaacaacatgaaaatgagtgtgcctttatacagatactggacactcagagtcttatgattcctggccagagaggaagcttcaggcttgcagattctcagcacacagacagggtcctgtgcacactgatggcagagaagtgggacagaaaggctttgtcctacacgcggaattccttccgggcacagatacggttgaggaagacgaggttccaagggaaaggatgtatgatatgcaagaagagcagagtgcttccatatcaagcagcttatgtctcgcagcatggcagtgcctgccaaccttcctcacacctcccctctgttggttctctcagcagcacgggggacgatgaagaggaagaagaaatcgtgcatatgggcaatgcaattatgtcattttattcggcccttatagatctactgggccgctgtgctcctgaaatgcacctcatccagacaggaaagggggaagccatccgcatcaggtccatcctgcgctccctggtccccacagaagacctggttgggatcatcagcatccccttgaaactgccctccctcaacaaagatgggtcggtcagtgagccagatatggcggccaatttctgccctgaccacaaggcacctatggtgctgttcttggaccgcgtttatggcattaaggatcaaacttttctgctccacttgctggaggttggatttttacctgacctaagagcttctgcctctctagatacagtttccctaagcaccacagaggctgcgcttgcactaaataggtatatatgttctgctgtgctcccgctcctcacaagatgtgcccctctctttgccggaacagaacactgcacctctctgattgattccacactgcagacaatatacaggctatccaagggacgttccctcaccaaagcacaaagggacactatagaagaatgtttgcttgccatttgcaaatgtgaaactgctgtaaagtcactggggtgtgagagaggggagagggagcgggcacggggagtgggggcaaggaaacaacgggtagtaattgacgagagaaaatcttcagacccacgacttgcagcccaccatcctctccccatatcagcatcccccaaagatcttccagaattacaagcaaagcttctgacgaatcactatgaacagtgttggaagtattactgcctgccttcaggatgggggagctacgggctagctgtggaagaagagctgcacctaacggagaagcttttctgggggatttttgactcgctctcccataagaaatatgacccagatcttttccgaatggccctgccttgtctcagtgctatagctggggccttgccaccagattatttagataccagaatcacagccacgttggagaaacagatctcagtggatgcggatggcaactttgacccaaaacctattaacaccatgaatttttccttgcctgaaaaattggaatacatcgtcaccaagtatgctgagcattcacatgataaatgggcctgtgacaagaacttcaagagagaagagcaaaattttgtgattcagaatgaaattaataatttggcatttttaactggagacagcaaaagcaagatgtcaaaatctggaggacaagaccaggagcggaagaagacaaagcggcggggagacttgtattccatccagacctccctcatcgtggctgcactcaagaaaatgctgcccattggtttgaatatgtgtactccaggcgaccaggagctgatctccctcgcaaaatcgcgatacagccatagggacacagatgaagaggtcagagaacatctgcggaacaacttgcacttgcaggaaaagtctgatgacccagctgtaaaatggcaactgaacctctacaaggatgttctgaagagtgaagaacctttcaatccggaaaagacagtggagcgtgtgcagagaatttcagcagctgtcttccacctggaacagttgagaagccaaaattcttccagaatgaagaagtctgggctacaggtgactagcttctgccaccagaagatcagcctaatgtgcaccaaccgatgtgatctcttctcaggtggaacagcctttgaggtccaagaaggccgtctggcacaaactgttatcaaagcaacggaaacgggcagtggtggcctgtttcaggatggcccctctctacaacctgcccaggcaagtattttgtcttttttcctggcatgtaagccagcgatgggaatggaggtatcctcccacagctgtgctctctcactcttaatccaaggaatagaaattggaatccttggcctatggagctattgcagtctgcatagtataagggcctggctaagacaatcaaggcaccgctctattaacctcttcctccatggctatcagagattttggatagaaacagaggagtattcctttgaagagaaactagtacaggatttggctaaatctccaaaggtggaagaggaggaggaggaagagacagaaaaacaacctgacccactacatcagatcattctctattttagccgcaacgctctcacggagaggagagttgtgtttattagatttccctttaatttgattgtctgtcttctcccttccctgctccatgaaatccagagttgtcaaagtggtgaggatgaagaagaagatgaagacaaggaaaaaacattcgaagagaaagagatggagaagcaaaaaaccctctatcagcaagctcggctgcatgagcgtggtgctgcagagatggtccttcagatgataagcgctagcaaaggtgagatgagccccatggtggttgagacgctgaagctggggatcgccattctgaacggaggcaatgctggtgtgcaacagaaaatgctagattacctaaaggagaaaaaggatgctggattctttcaaagcctttctggtcttatgcagtcttgcagtgtccttgatttgaatgcatttgagaggcagaataaagctgaaggcctggggatggtgactgaagaaggaacacggacaagctctgacccagcactggtgctctcagactttcagaacttcctgcggactcagatgggcaacaccaccaccgtgaatgtcatcatcagcactgtggactaccttctgcgtctgcagcccatggatcaaggagtaattttgacttgcaagtcttattttttaagaaatgcatttcgtaaggctacagctgctacagatagtgattcctctgatggatctgggcacgtcagtagccatcaacatcaaggcaagacctttcaccagcaaaaagatggtggaacttacaacttgctgagagctcaggaatcaatcagtgatttctactggtattattcagggaaggacatcattgatgaatctggacagcacaatttttccaaagctctggcagtcaccaagcagattttcaattctcttacagaatacatccagagcaggctcttctcgctcactgccctgtactttactgaaggatcagatagctcaagggtatctcctgtttctggtctaggattccagtcaaatcgagctgctgaaggactcttggatcttcttcaagacatgggggggatgcttctgtccctcctgggaag

SEQ ID NO: 3693 - DNA, 2523 bp, Homo sapiens
  SIMILAR (1195)..(2478): 781254mologous to Homo sapiens putative p150,accession number U93574,Smith-Waterman Score=1720.
atgaagcagtttctgctgtacttggatgagtccaatgccctggggaagaagttcatcattcaagacattgatgacactcacgtctttgtaatagcagaattggttaatgtcctccaggagcgatgtcacactaggcttggttacactgagtttctggtggcctggagggtaacttttggcctttgtgtggaagctgtcactttgcaccttaaatatcagatcttaattcggggacttcttgagatgatgtccttcagtgatgcagatattctgaaacaactccctgtaacagtcccaggcctcttccctgcctccctgtcaccaagcagcctgctgggcaactcccctccttcttggctgcgacataactcagagtccaaagtttctgctgtctcaagcccttcagccaccaagacactcagcacagggatagggaaactggatcctggacataaggagatggcagaggagtcagagcttttgaagaataagatgcaagcccctcccctttcgaggtgtcctgagagccaaaaatgccagcaccagctgaggcttcatcactggaaacccagcgtccggcaccaggtgaaacgccgtagccccgctgtgctccgctcagccatgccacctgcagactgtcctgcagttctggaggccaccacagccacacatccagagaaaggcacagctcttagtaaacatttgccatcatcagatagtatgtctctaaaagtagatgttgaggctcttgaaaattctcctggtgctacgtacatttggaagggtggaaaagttactagagatagtcaaccaaaggaacaaggaaagggagatttgaaaaagaaaaagaagggaaaattgcctaagaattatgacccaaaacttaccccagatccagaaagatggctgccaatgcaagaatgttctttctaccagggaagaaagaagggtaaaaagaaggatcagatgggaaaagggacccagggagcaactgcaggagcttcatctgaactggatgccagaaaaactgtgagtagcccacccacctccccaagacctggcagtgcagcgacactatctgcctctacaagtaacatcatacccccaagacaccagagacctgcaggggctccagcaacaaaaaagaaacagcaacagaaaaagaagaaaggtggaaaaggttttccagtactacgtgaaataacggtggtaaaagtggacacacttgttgtgttccagatcttagaggaaaggctttcagttttccacattcagtatgatactagctatccttttagtacagttgatatagaagatcatgagtgtgctgtgtggctgctcctacggaagagcaagtcagatgacaaaaccacgcgactcgaggctgtgcgggaaatgtcggagacccatcactggcatgatgcagaaaaggcctttgacaaaattcaacaacccttcatgctaaaaactctcaataaattcggtgttgatgggacatatctcaaaataataagagctatctatgacaaacccacagccaatatcatactgaatgggcaaaaactggaagcattccctttgaaaacgggcacaagacagggatgccctctctcaccactcctattcaacacagtgttggaagttctggccagggcaatcaggcaggagaaggaaataaagggtattcaattaggaaaagaggaagtcaaattgtccctgtttgcaggtgacataattgtatatatagaaaactccattgtctcagccccaaaactcctcaagctgataagcaacttcagcaaagtctcagaatacaaaatcaatgtgcaaaaatcacaagcattcttatacaccaataatagacacacagagagtcaaatcatgagcaaactcccattcacaattgctacaaagagaataaaatacctaggaatccaacttacaagggatgtgaaggacctcttcaaggagaactacaaaccactgctcaatgaaataaaagaggatacaaatgaatggaagaacattccatgctcatgggtaggaagaatcaatatcatgaaaatggccatactgcccaaggtaatttatagattcaatgccatctccatcaagctaccaatgactttcttcacagaattggaaaaaactgctttaaagttccaatggaaccaaaaaagagcccgtgtcgccaagtcaatcctaagccaaaagaacaaagctggaagcatcatgctacctgacttcaaactatactacaaggctacagtaaccaaaacagcatggtactggtaccaaaacagagatatagatcaatggaacagaacagagccctcagaaataatgctacatatctacaactatctgatctttgacaaacctgagaaaaacaagcaatggggaaaggattccctatttaataaatggtgctgggaaaactggctagccacatgtagcaagctgaaactggatcccttccaagctgaaactggatcccttccttacaccttatacaaaaattaa

SEQ ID NO: 3694 - DNA, 6209 bp, Homo sapiens
  SIMILAR (1754)..(3685): 201254mologous to Streptococcus gordonii streptococcal hemagglutinin,accession number AB029393,Smith-Waterman Score=238.
atgatcctggaccaagcctttaaatatataacagaattgaaaaggcaaaatgatgaactcctgcttaatggaggaaacaatgaacaagctgaagaaataaaaaagctacggaaacaactggaagaaatccaaaaagaaaatggccgatatattgaattactgaaagctaatgacatatgcttatatgatgacccgacaattcactggaaaggaaatcttaaaaactcaaaggtctctgttgttattcctagtgaccaggttcaaaaaaaaattattgtttattccaacgggaatcagcctggtggaaacagccagggaacagctgttcaggggataacttttaatgttagtcataatttacaaaagcagaccgccaatgtggtgccagtacagaggacttgcaatcttgtgactcctgtatctatttctggagtttacccttctgaaaacaagccatggcatcagaccacagttcctgcattggctaccaaccagcctgttcctctttgtcttcctgctgccatttctgctcagagtattctcgagcttcccacctctgaaagcgaatcaaatgtgcttggtgccactagtggctcactgattgctgtttcaattgaatctgagcctcaccaacatcattctttgcacacatgcctaaatgatcaaaattcttctgaaaataagaatggacaagagaaccccaaagtattgaagaaaatgaccccttgtgttacaaacatcccccacagctcctcagcaactgccactaaagtgcaccatggaaacaagtcctgcctgagcatacaggacttcagaggtgattttcaaaacacttttgttgtttcagttaccaccacagtctgctcgcagcctcccagaactgcaggtgattcttctccaatgagcattagtaagagtgcagacttgacaagtacagctacagtggtggcatcatctgcccctggagtagggaaggccaccattcctataagcactctttcgggaaaccctttggacaatggttggactctttcttgttctttgccttcttcaagtgttagtacttcagatttgaaaaacattaatagccttacacgaatctcttcagctggaaacacacagacaacgtggactactttgcaactggcaggaaacactattcagcccttaagccagacaccatcttctgctgtgactccagtattaaatgagtctggtactagccccaccacaagcaaccacagtagatatgtggctacagacatcaacttgaataattcctttccagcagatgggcagccagttgagcaagtagttgtaacattgccttcttgtccatctttacctatgcagccactaattgcccagccacaagttaaatctcagcctcccaaaaatatccttccactgaattcagcaatgcaagtgattcagatggctcagccagttgggtcagctgttaattcagctccaactaatcaaaatgttataattcttcagccacctagcaccaccccatgcccaacagtgatgagggcagaagtttccaaccaaacagtaggtgcaacagatagtaatcatacaggctgctaatcagaatcctttgccactcctccctgctccacctcctggttctgttcgactccccatcaatggagccaatactgtaatagggtctaataattcagtgcaaaatgttccaacaccacagacttttggaggaaagcatcttgtccacatattaccaagaccttcatctttatcagcgtctaactcaacacaaactttttctgttaccatgtcaaaccaacagcctcaaaccatttctttaaatggacagctctttgctttgcagcctgtgatgtcttcatcaggaactacaaatcaaacccctatgcaaattattcaacccaccaccagcgaagatccaaataccaatgttgccctgaatacatttggtgctttggccagcctcaatcaaagcatatcacagatggctgggcaaagctgtgtacaattgtctattagccagcctgccaattctcaaactgctgcaaatagtcaaaccactacagctaactgtgtttcattaacaacaactgcagcacctcctgtgacaacagatagttcagccacactagctagtacttataatctagtgagtacttcctcaatgaacactgttgcttgtttgcctaacatgaaatctaaaaggttgaataagaagccaggtggcaggaaacacttagcagcaaacaagtcagcgtgtcccctgaattcagtcagagatgtgagcaagttagactgccccaacactgaaggctcagcagagccaccctgtaatgatggactgctagaaagcttccctgctgtgttaccatctgtctctgtgtctcaggcaaatagtgtgagtgtttctgcttcacattctttgggtgttctaagctctgaatcattaatacctgagtctgtatcgaaatctaagtcagcagaaaagtccagcccaccctcccaagaatctgtaacaagtgaacattttgcaatggccgcagcaaaatccaaagattctacccctaatctacaacaagagacatctcaggataaaccaccaagtagtttagcattatcagatgctgccaaaccctgcgcttcagccaatgtattgattccatctccaagtgatcctcacattttggtttctcaggttcctggtttgtcatctacaacaagcactacaagtactgactgtgtttctgaggtagaaatcattgctgaaccttgcagagttgagcaagattcatcagatacaatgcaaaccacaggtctcttaaaggggcaaggtttaactacattgctatctgatcttgctaaaaaaaaaaaccctcagaaatcatctctttctgatcagatggatcatcctgacttttcttcagaaaatcctaaaatagttgattcaagtgtgaatttacatcccaaacaggaactattactgatgaacaatgatgatagagatcctccacagcatcattcctgcctccctgatcaagaggttattaatggttctttgatcaacggtagacaggccgactctcccatgtcaaccagctctggcagtagtcgtagtttctcagttgcatccatgcttcctgaaacaacaagagaagatgtgaccagcaatgcaacaactaatacatgtgacagctgtacctttgtagagcaaactgatatagtagctcttgcagcaagagctatttttgaccaggagaaccttgagaaggggagagttggcctccaggctgatataagggaagttgcttcaaagccttctgaagcatcattgttagagggagacccacccttcaaatcacagatacctaaagagagtggcacaggacaggcagaagcaacaccaaatgaatttaattctcagggttcaattgaagcaactatggagaggccccttgagaaaccaagttgttctctaggaattaaaacatcaaatgcatctttacaggattcaacttctcagccaccaagcatcaccagtttaagtgtgaataatcttatccatcagagcagcatcagccatcctctggccagctgtgcgggtttatccccaacttcagagcaaacaactgtgcctgcaacggttaatctgaccgtttcatctagctcctatggcagtcaacctcctgggaccatctctgatgactgaatattcccaagaacagctaaatactatgactagtaccataccaaattcacagattcaagagccactcttaaagccaagccatgaaagccgtaaggattctgctaagcgtgctgtccaagatgaccttttactgtcttcagctaaacgtcaaaagcactgtcagccagcccccctcaggcttgaaagtatgtccctgatgagcagaactccagacaccatttctgaccaaactcaaatgatggtcagtcagatccctcctaattcttcaaactcagttgtgcctgttagcaacccagctcatggagatggccttacacgattatttccacctagtaacaactttgtgactcctgcattgaggcaaactgaagttcagtgtggttctcagccttcagttgctgaacagcagcaaacccaggcaagtcagcatctacaggccctgcagcagcatgttccagctcaaggtgtatctcaccttcatagtaaccatctctacataaagcagcagcagcagcagcagcagcagcagcagcagcaacagcaacaacaacaagcagggcagttaagagagaggcatcacttatatcaaatgcagcatcatgtacctcatgcagagagctctgtccactctcagccccataatgtccaccaacagaggactctgcaacaggaagttcagatgcagaaaaagaggaatcttgttcagggcacccagacctctcagctttccttacaaccaaagcaccatggaactgaccaatcccgatccaagactggccagccacatccccaccatcagcagatgcagcaacaaatgcagcaacactttggaagctcccagacagagaagagctgtgaaaacccttcaactagtcggaaccatcataaccatccccagaaccatctcaatcaagatattatgcaccaacagcaggatgttggaagcagacagcaaggttcaggggtttcatctgaacatgtatctggccataatccaatgcagaggcttttgacatcaagaggcttagagcagcaaatggtgtcccaaccaagtattgtgactagatcttcagacatgacctgtactccacacaggccagagagaaatagagtttcaagttattctgctgaggcactcattggaaagacatcttctaattcagagcagagaatggggatatcaattcagggttccagagtttcagatcagcttgaaatgagaagctatcttgatgttcccagaaataagagtttggctattcataatatgcagggtcgtgtggaccatactgtggcctcagatatccgcctttctgattgtcagacgtttaaaccaagtggagctagtcaacagccccagagtaattttgaagtacaatcttcaagaaacaatgaaataggtaaccctgtatcatcattgcggagtatgcagtcccaggcttttcgaattagtcaaaacactggccccccaccaattgaccgtcaaaagagattatcttacccaccagttcagagcatcccaacaggaaatggtattccatcaagggacagtgaaaatacttgtcaccaaagtttcatgcagagcttacttgcccctcacctcagtgatcaggtcattgggagccagaggtcactctcagaacatcagaggaatacacagtgtggtccatcctctgcaattgaatataattgtcccccaactcatgaaaatgtccatattagaagagagagtgagagtcagaatagggaaagttgtgacatgtcgttaggtgcaattaacaccaggaacagcaccttgaatattcctttttcaagttcctcttcctcaggagatattcaaggtcgaaacacaagccccaatgtttctgtacagaaatccaatcccatgaggattactgagagtcatgccaccaagggccacatgaaccctccagtcacaaccaacatgcatggggttgcaaggccagcgttgccacatccatctgtgtctcatggaaatggcgatcaaggccctgctgtacgtcaagctaattcttcagttccccagagatcaaggcatcccctgcaagacagcagtggttccaaaattcgtcagcctgaaaggaatcgttctggaaaccaaaggcaaagtactgtctttgatccaagtcttccccatcttcctctctctactggtggcagtatgattcttggacgtcaacaacctgccacagagaagagaggaagtattgttcgtttcatgcctgatagcccacaagtacctaatgataattcagatatgccaccaatgcacatgaccaactctcacttatccaattttaatatgacatctttgtttccagaaatagccacagtgcttcctgatggctcagcaatgtcacctttgcttacaatagcaaattcctctgcctctgactcttccaagcagtcctcaaacagacctgcccataacataagccatattctaggtcatgattgcagttcagctgtttaa

SEQ ID NO: 3695 - DNA, 415 bp, Homo sapiens
  SIMILAR (112)..(2): 541254mologous to Mus musculus Gag polyprotein,accession number Y12713,Smith-Waterman Score=115.
cttgcctttgatgattgagtactgccacttggcccctgccacctcgggatccaattattcccattgtatttaaattttgtagttgagtgactgtggttcccactgttagatctctaggggcctgccaggactttagtctagttataggtctagaagcaaataggagtattgggggtggcttctgaggagaatcaacattatcttgactggcaactgcctcaggggaggccatcactattgcctcaggcagaagagagtttatctcctcaaacaaaggtggaaaggctgaaggcagcatggattgaggaggggattttgccactactggggatgaggaagctgtttcttctagcaagaaaggttcatcagagtttacaagctcagtgtccccagcttcatcagggtcctcccacat

SEQ ID NO: 3696 - DNA, 886 bp, Homo sapiens
  SIMILAR (566)..(856): 751254mologous to Mus musculus Pro-Pol-dUTPase polyprotein,accession number Y12713,Smith-Waterman Score=377.
atgctggatctcccttggtttaatgtagaggaggggatccaaaggctaagggaaattgggatgctagagtggcttagtcactttagacctacccgtctcagcagggaggatccagaagacataccgttcaccaataccttgccaaataaatttgtgaggggagtacctgcatccttgaagagctctttcattggtcttctctgtatgccagatcttaccaagacagttggatcttggagaatgacagtggattatcataagcttaaccaaacggtgactccaattgcagctgctgtaccagatgtggtttcattgcttgagcaaattaacacatctcctggtacctggtatgcagccattgatttggcaaatgccattttctccattcctgtccataaggtgaaggataagttgctgcatttggcccctcctacaaccaaaaaagaggcacaatgcctagtggggctatttggattttggaggcaacactttcttcatttgggtgtgtcactctgggtcatttatcgagtgaccctaaaggctgccagttttgagtggggatccagaacaggagaaggctctgcaacaggcaggtctaggctgctgtgcaagctgctctgccacttgggcccctaaagacccagcagatccaatggtgcttgaggtgtcagtggcagatagggatgctgtttggagcctctggcaggctcccataggtgaatcacagcagaggcctctaggattttggagtaaggccctgccatcttatgcagataactactctccttttgagagacagttcttggcctattactgggctttagtagaaactgaacgtttgactatgggtcacaagtcaccacatgacctgaactgcgtatcatga

SEQ ID NO: 3697 - DNA, 1818 bp, Homo sapiens
  SIMILAR (394)..(906): 671254mologous to Mus musculus Pro-Pol-dUTPase polyprotein,accession number Y12713,Smith-Waterman Score=553.
atgcatgcacagcctcaccaggtgtctactgttaaagtgagggcattgattggaaaagaatgggaccctgcaacttggaatgcagacgtgtggggggaccctgatgaagctggggacactgagtttgtaaactctgatgaatcttttttgccagaagaaaaagcttccccatccccagtagtgacaacatccactccccaacccatgctgccatcagcctttccacctttgtctgaggagataaaccctgcactgcctgaggcaacagtgatggcctcccctgaggcagttgccaggcaagataatgttgattctcctcaggagccacccccaacacccctgtttgcttctagacctacaactagactaaagtcctggcaggcccctagagggccagaatgcataattggcatagacatacttagcagcggacagaacccccacattggctccctgactggtagggtgagggctattatggtgggaaaggccaaacggaagccattagagctgcctctacctagaaaaatattaaatcaaaaacaatatcgcatagctggagggattgaggagattagtgccaccatcaaggacctgaaagacgcaggggtggtgattcctaccacatccctgttcgactctcccatttggcctgtgcagaagacagatggatcttggagaatgacagtggattatcgtcagattaatcaagtggcaactccaattgcagctgctataccagatgtggcttcattgcttaagcaaattaacacatctcctgacacctggccatacgaccccccatatccaatggtgattgaggtgtcagtggcagataggcatgctgtttggagcctttggcaggcccccataggtgaatcacatcagaggcctctaggattttggaacaaggccctgccatcttctgcagataactactctccttttgagagacagctcttggcctgttactgggctttggtggaaattgaacgtttgattatacccaatggtttggctggatggtcagggacttggaagaagcatgactggaaaattggtgacaaagaaatttggggaagaggtgtatggatgaaactctctgagtggtcaacaactgtgaagatatttgtattccatgtgagtgctcaccaatgggtgacctcagcagaggaggattttaataatcaagtggataggatgacctgttctgtggacaccattcagcctctttccccagccacccctgtcatcgcccagtgggcccacgaacaaaggggccatagtggcacagatggaggttatggatgggctcagcaacatggacttccactcaccaaggctgacctggctatggccactgctaagtgcccaatttgccagcacttatgggggaatggccttttgaagtcacaattacaacgtaaacaaggtaacaatagtttgcagggctggggcaaagttctccagacggccgtgaatgctctgaatcagcatgcaatatatggtactctttctcccatagccagaattcatgggtccaggcatcaagggttggatgtagaagtggctccactcaccatcatccctagtgatccactagcaaaatttttgcttcctgttcctgcaacattacgttctgttgacctagaggtcttagttccagagacaggaatgctgccaccaggagacacaacaatgattccattaaactggaagttaaggttgctacctggacactttgggctccttctacctttaactcaacaggctaagaagggagttacagtgttggctggggtgattgacccagactaa

SEQ ID NO: 3698 - DNA, 1260 bp, Homo sapiens
  SIMILAR (895)..(1014): 751254mologous to Mus musculus Pro-Pol-dUTPase polyprotein,accession number Y12713,Smith-Waterman Score=170.
atgcctgcagaattcttccagcgttgttcagtgattatggttcagctgccatggaaagaagcccatgtggagagaccacatggggagagagactacactccagacttgcagccagacatgtgggagaagtttcccgggctgagacgcgcgcttcgccccgtggtgaagacgctgctggtgcagctagaatataggcaggcagaaaagtgtgaaaagagagactggcctagcctcccagactacatctttctcctgtgctggatgcttcctgctcttgaatatcggactccaagttcttcagttttggaactcagactggctctccgtgctcctcagcctgccgacagcctattgtgggaccttgtgattgtacctataactagtctaaagtcctggcagacccctagaggtgaagttgagggtgtgacccatgaggagatttgtgcatctttgaagagccttgcagttgctcttctctctatgtcagatctaacagtgggaaccccagtcactcaaccacaaactttaaatacaatgggaataattggatcccgaggtggcaggggtcaagtggcagcactcaaccgtcaaaggcaagtgccagaattaataattggcatagacatacttagcagctggcagaacccccacattggctccctgaatggtaggggatatatcaactctctggctttgtgtcataatcttattcggcgagatcttgatcgctttttgcttccacaagatatcacactagtccattacattgatcacattatgcgattggattcagtgaaggataagtggctgcatttggcccctcctacaaccaagaaagaggcacaatgcctagtgggcctattggattttggaggcaacacatttctcatttggagacagcccttggcctgttactgggctttggtggaaactgaacatttgactatgggccatcaagtcaccatgcaacctgaattgcctatcatgaactggctgctttctgacccatctacgccgttaaggtttgtgactgggggcctgcaaactaaacagacaaaagacagattggcaaagaaaggacagatttttattgatgtagtacacaggagttcacagaaaaatatgcttcaaggaggaagttttgactctatagagccaatggatgtggaccctggacttagaaagagatttgtaaacaaaccagagaacaccgaagagctgctccttcgcactgaaatggtttgctggctttctgcctag

SEQ ID NO: 3699 - DNA, 318 bp, Homo sapiens
  SIMILAR (108)..(248): 511254mologous to Homo sapiens SR-related protein LD2,accession number AF247662,Smith-Waterman Score=99.
atgtatggtcctctgcaaaagctagaggactgcctggatgcagtattcccctctgcattcagcttatggaagggtccccacagttacttccagtcactagttacttccgctccgctcccacccgcgggactcgcgacctgccccctgcccccggctggcccagctcggaataggcagagcagcgcctcagaaatcgcagcccaaggcgaagaaatccagaagcctcccgcggacgtcccccgggacggggtgtggcgagccccgctccgagcccgccgactcctcgtgagacgagaaccgcagcgacgcggagaccct

SEQ ID NO: 3700 - DNA, 852 bp, Homo sapiens
  SIMILAR (198)..(251): 661254mologous to Leishmania major probable cysteine-rich protein,accession number AL160493,Smith-Waterman Score=97.
tcaagtggtgggcgactttgcacgcatcaacctttccgagcttgtctcctcatttgcaaaatggggacaaacatggcatttatcttctaaggccactgtgagggttctgagagagaattcatggaagatgcttagcccagggctggggacccagtaagcactccgggaatattcgtcattactattattactattattgctgctgctgttgctgctactactactactgctgctgctgctgccccccttgtcataacctgatgagggctttgctcggtgccacacttcaggctttccaaagaggattctcaaacttttctctccacagaaatggctcatgggcaatgacaccaggagcagaggaggcccctttttctgtgctggggtctcagcaccaaccagaccagtgttgtggccaccctgaatatggagtgtcccattcgccccctggcggcgccggggacacgccgggagccgttgtagccgccgcagccgcagccgccgccgcggcggaatgagctgtccacagcagcactgggtgccgcccgaggtcacgcaagaatctggcgggaggctgggaactggccttaaagcacattcagccctttgggagaacttcaaccctgtgttgggctcctgtttcctactttctggcttctgcgacacctggtctgacagccacacaactttagttctgacccttttggctttcacactggcaataacacaacggatactgctgtcccagcattgccgtgtagttccgacctggctgtctgggatgctcctcctgtagcccttcagtaggacctcacctcggggcctcttgctgtccaactgaccattgggcat

SEQ ID NO: 3701 - DNA, 1623 bp, Homo sapiens
  SIMILAR (1188)..(1616): 331254mologous to Caenorhabditis elegans weak similarity to collagens; glycine- and proline-rich,accession number AF000298,Smith-Waterman Score=103.
atgactccccaatcggaagagtcataccatacttgtgaatgtacagtgagcagagccttcattcatcatgtatggtcctctgcaaaagctagaggactgcctggatgcagtattcccctctgcattcagcttatggaagggtccccacagtatcatagaaccacacaagttttaggaaaagataggattgaaggggccctctctgaaggcctgcctactccaaaccatcctaccacccatctactgctgcctgaaaaactcactattagtgagtcatatctttgggtaaaggctgtattgccccagccactagctctacccctacctagggacagcctttatgtagagtcactgtgggtccagcagcaccattcaggccatggatgtctttctctggctgagaatgggaaggttctctgtctctgcagtggggaagtcacccaaacctattgcctccgtattagactctgcctgaaggaagccgctttctggatcctaccccagacgctggaggctgggctgctgcggcatcgtctattaggtccaccagtaatcccagctaacaaaagcgaccatggctactctgacgtgtgggacgacgatgctagccaggccgtgccaggggctgctggtgctgttactgatgcaaattctgagccgtggccacgcacactttggctggcctccaggggacggtcagctaggtccgctggggaaccttcctccctgcctggtcccactaatgatgacaccaggtccttgggcctgatgcaagaagatcagatgtcctgcaagggagagtcaccatctcctacctcatccccggcaccccacccccaccttaccagaatgcaaggtgtcctggctagcctgcaaggtggggccacccctctgccccaccaagttgccccagaagctggagaggaaaaaactctgggtctccagacaacggtctggagaatccttgaggatctggaagtccccgctgctgcctggcctggtttatcaccaactctggcagttttgagaaagactcacttgggttctaaggaacagaatttttctgtgaaaactgcatctcatcaagctgaaagatctccagcagtgccaaggccagggagcaggtctctgtcctcagctgccagcttgttggctgcagccccaaaagacctactgatatttggtcctcatcaagagctgacccagagagtccatcctcacccagagcccgaggacgcagagaacggcctgcgcaccgcccgcggctgcttcggaggggtgagggggtacagcgagaaacagagctgcgtctccctcgtcccctccttaaattccggcgtcctccagtcacagtgtcccagcacctacggccccccacccctaggcctgggcgcacagagccaccgagagggcttgagggtggggctggaagtctctgcccggctggtctgcggcggcggagggaagttgcttcttccctggccgggcctctccggagcgcagtgccggcgcgcccggagtccgaggagccggcgggcaccccattcgccccctggcggcgccggggacacgccgggagccgttgtagccgccgcagccgcagccgccgccgcggcggaatga

SEQ ID NO: 3702 - DNA, 1221 bp, Homo sapiens; identical to SEQ ID NO: 3630
  SIMILAR (369)..(223): 971254mologous to Homo sapiens GKAP42,accession number AF319476,Smith-Waterman Score=264.

SEQ ID NO: 3703 - DNA, 2021 bp, Homo sapiens
  SIMILAR (1162)..(1977): 751254mologous to Mus musculus Pro-Pol-dUTPase polyprotein,accession number Y12713,Smith-Waterman Score=1129.
atgactgtgctgactcagacctcaagccagcacagcactgggtgtcacgcaaagcctgctataaccactccctggctactggctgtgttctttcaaggccctggggttctacagtcagtgggtggcaaagccagccaggcagacataattctgggtttgagtccagtctctgccatcttccagctttatgatgtttcctttcctccagggaagcagggtcgcccaggccttggctcagcaggcagaattgaagtagcccgtgattgtggaatgctgtggaagcaacgtggatatctgatctcatcaagtcaacccatcaaaaatggtcaacaagtctccgacctctttgaagcaatccctgaacccaaatcattggccatcatcaaaatctctggttattcgacattagaaactccagagagtaagcacaaccatttcactaacactttagcagccattgacttggtgaatgcctttttctccattgctgtgcataaggtgctaccagaagcaatttgccttcatctggcaaggccagcaatatacctttactgtattagctcaggggtatatcaactctctccggctttgtgtcataatcttactcagagagaccttgattgcttttggcttctgcaagataacacactagtccattacattgatgacattatgctgattcgatccagtgaacaagaagcagcaaacacactggacttattggtgagacatttttgtgccacaggatgggaaataaatccaactaaaactcagggaccttctacctcagtaaaatttctagggttccagtggtgtggggcctgtcaagatattccttcaaaggtgaaggataagttactgcatttggcgcctcttgcatctaagaaagagacacaacgcctagtgggcctatttgaattttggagacaacacagtcctcatttgcgtatgttactccagctcatttatcaagtgacccgaaaggctgccagatttgagtgggcctgcactgatggcctcatgcgaagtccctatgatcagttgacaaaggaagagaagactagggcccggttcacagatggatctacacaatgtgaaggcaccacccaaaagtggatagctgcagcattacagcccctttctaggacctgcctgaaggacagtgttcaccaacgggtgagctcagcagaggaggattttaataatcaagtggataggatgagccgttctgtggatatcattcaccctctttccccagccacccctgtcatcacccaatgggtccatgaacaaagtggccatggtggcagggatagaggtcatgcatgggctcagcaacatggacttccactcaccaaggctgacctggctatgttcactgctgagtgcccaattttccagcagcagagaccaacaccgagccctcaatatggcaccattcctcaaggtgatcagccagctacatggtggcaggttgattatattggacctcttccatcatggaaaaggcagaggtttgtcatcactggaatagacacttactccagatataggtttgcctatccttcattcaatgcttctgccaagagtaccatccatggactcatggaatgccttatccacagtcatggtattccacacagcattgcctttaaccaaggcactcactttatggctaaagaagtgtggcagtggtctcatgcttatggaattcactggtcttaccatgttccccattatcctgaagcagctggattgatagaactgtggaatggctttttgaagtcacaattacaataccaactaagtgacaatactttgcagggctggggcaaagttctccagaaggttgtgtatgctctgaatcagtgttcaatatatggtactgtttctcccatagccaggattcatgggtccaggaatcaaggggtagaagtggaagtggcactacttaccgtaacgcccaatgatccactagcaaatattagcttcctgttcctgtgacattacattctgatagg

SEQ ID NO: 3704 - DNA, 1197 bp, Homo sapiens
  SIMILAR (1050)..(784): 321254mologous to Homo sapiens Human N-methyl-D-aspartate receptor subunit encoded by clone NMDA24,accession number W87504,Smith-Waterman Score=52.
tcacactgggccctgggacaggccccagggcaggcacaggctccagctccagccccagctccagtcctggcacaggttcagtcccaggtgcaggcccaggtgcaaattcagttgtgcacccaggtgcagactcaggcgtgagggccggagctgcgctggctcctgggctctgctgagtgaaactgcttgggcagatgagccctccgggaggagctctgggacctcataatgccagacagtctgcagtagctgggggttttggacgggctcggagacctggacggcacgagtagcttcaaggtacttggtggtctgggccagggcagcctctgggagctgctctacagactgccacaggtccagtggtgatgaaccaatttctgaggtgaacatggcatcatgaaggccactccagagcaccatgtcctcggttttggggatggttttaaacttattctggagagaagccacttcccgctgcagtgcaaccatcttccagttctgtattttgaagtcttcagcaaagatgtccattctttctgggtgtaccttgtcaagcatgttcttcagcatgtccacttcttttctgagggctgtgatggtgacctggagtgcatgaagatcagtgagcaagtcctgcagggtctgcattgacttggccatgacttcatcatgaccctccaccatcttccggagcttgatcagatgccacaggtcctggacgggccgggcagtgccctggctggcttccagcagctgggcagtggagggcaggtcctgcagcagggccagctgggttcccaaacttgtcgaggcggctcaccacgtggtcgaagacattgctgagcctcttcatggggttgaggataggctgggcgtctccttccctgggcatgatgaccacctgcgaggtctgcaggaagtcctcatcgcctgagaggactttcttgagctcggccatgtggatgtgctccaagatgccgtgcagcaggaggtgcagggccttgaagttccgcaccccgcactgtgggatggcgatgttggccagctcggtgaacgtgagtgagaagctcatcctgccagggtgggtcagtggggctggggttccaggtgtcctcaaggacaaggggtagctttcagtggttccgagagctacatggactggtcctcgcggaatcgtcgattccggaatacaga

SEQ ID NO: 3705 - DNA, 380 bp, Homo sapiens
  SIMILAR (28)..(96): 691254mologous to Homo sapiens Human secreted protein, SEQ ID NO: 8172,accession number G04091,Smith-Waterman Score=86.
  misc_feature (1)...(380): n = a,t,c or g
cgcggccgcgtcgacctagacactgccttaggcaaggatttcatgaccaagaacccaaaagcaaatgcaataaaagcaaagataaattgctgggactnnnnnnnnnnnnnnnnnnnnnnnnnnnnnnnnnnnnnnnnnnnnnnnnnnnnnnnnnnnnnnnnnnnnnnnnnnnnnnnnnnnnnnnnnnnnnnnnnnnnnnnnnnnnnnnnnnnnnnnnnnnnnnnnnnnnnnnnnnnnnnnnnnnnnnnnnnnnnnnnnnnnnnnnnnnnnnnnnnnnnnnnnnnnnnnnnnnnnnnnnnnnnnnnnnnnnnnnnnnnnnnnnnnnnnnnnnnnnnnnnnnnnnnnnnnnnnnnnnnnnnnnnnnnnnnnnnnnnnnnnan

SEQ ID NO: 3706 - DNA, 1380 bp, Homo sapiens
  SIMILAR (19)..(1368): 631254mologous to Homo sapiens putative p150,accession number U93567,Smith-Waterman Score=1491.
aaacaaacaaacaaaaaaaaaaacttaggaatatacctaaccagggagtcaaaaacctccacaaggaaaactacaaaacactgctgaaagaaatcatagacgacatgaacaaatggaaacacatcccatactcatggatgggtagaatcaatattgtgaaaatgaccatactgccaaaagcaatctagaaatttaatgcaatccccatcaaaataccaccatcattattcacagagttagaaaaaacaatgcctaaaattcatatggaaccaaaaaggagcccacatagccaaagcaagactaagcaaaaagaacaaatctggaggcatcacattacctgacttcaaactatactgtaaggccatagtcaccaaaacagcatggtactggtacaaatataggcacatagaccaatggaatagaatagagaacccagaaatgaacccaaatacttacagccaactgatcttcaacaaagcaaacaaaaatataaagtggggaaatgacacccttttcagcaaatggtgctgggataattggctagccacatgtaggagaatgaaactggatcctcatctctcacctcatacaaaaatcaactcaagatggatcaaggacttaatcctaagacctgaaactataaaaattctagaagacaacattggaaaaacccttctagacattggcttaggcaaggatttcatgaacaagaacccaaaagcaaatgcaataaaaacagtgataaacagctgggacttaattaaactaaagagcttttgcacggcaaaaggaacagtcggcacagtaaacagacaacccacagagtgggagaaaatcttcacagtctatacatctgacaaaggattaatatctagaatctacaacaaactcaaacaaatcagcaagaaaaaaacaaacaatcccatcataaagtgggctaaggatatgaatagacagttctcaaaagaagatatacaaatggccaacaaacatatgaaaaaaggctcaacatcgctaataatcagggaaatgcaaatcaaaaccacaatgtgataccaccttactcctgcaagaatggccataatcaaaaaatcaaaaaacagtagatgctggtgtggatacggtcgacagggaacacttctacactgctggtgggaatgtaaactagtacagctgctatggaaaacaatgtggagattccttaaagaactaaaagcagaactaccacttaatccagcaattccactactgggcatctacccggaggaaaagaagtcattattcgaaaaagatacttgcacatgcatgcttctagcagcacaattcacaattgcaaaatcgtggaaccaacccaaatgcccatcaatcaacagtggataa

SEQ ID NO: 3707 - DNA, 751 bp, Homo sapiens
  SIMILAR (618)..(427): 961254mologous to Homo sapiens Human secreted protein encoded by gene 11 clone HFKEB72,accession number Y02660,Smith-Waterman Score=310.
tttagcgtttaactatttttttttaacttttggaaagcaaggtgtaggaaggggatttagtttttccattaggtcgtggcatgttaagacttgtttctttttccaaaatgttcaagttgctgaagagaactatggactatgggtcaggaagtccgtcggtttcgggtcacattccgctcccgcaggcctgcgggccgccccagctggtttgttcccggcgtgttagaggtcagaggccgaggccgcactcagtgcctgggtctcgcgcagctccagggctctcaggcgacactgggcgtttcctttccggcttcggaaagttttgttttggttcaaggaaaggcgccctgttgaccaaaggcttctcagtctcctccgggtggccagcggccaagtttcctccagcccagcgagtccagactatagtccgttcgagatcctcgaaggccggggaagcgagtcttgtgaggagagaaagcgagtgggcagccagcctgccgactccactgccgctggctggcccttctcttccctctgtccctgggccagtgcccgtcgcaccacaaacagtgcgagcagtctccccggtgactcctcaaggacccagttctccaccattcctaagagaacactcaacccagccgcgcccgggatgcagagagatctaccaacacccgagaatggggacagggcgcatgcgcacaccgtggccgtggcgtctaagtgctcgcccagctgcggcagccgctag

SEQ ID NO: 3708 - DNA, 2949 bp, Homo sapiens
  SIMILAR (1460)..(1876): 341254mologous to Homo sapiens Human secreted protein encoded by gene 70 clone HCHMX01,accession number Y41377,Smith-Waterman Score=109.
ttattcggaattcttgccaacaatagcactttcgctcctccgagacagggatgcagcgctgtccagcaggaaccatctgaagtagccatcacaaggccctgaggtcacgggtgtgggcttgccaacccgtgtcagctcagaatctggagcctggccacagagatctgatatagcttggacattgctgaagacagcatttggagagagtacttggttttctgctcctgcgttggttggcttgggatcttggcctccagctgcttccatgttgttccataggacatgattttgttcttttttatggctggctggcctttcgctgtgtgtgtgtcccacatttcccttgtcccgtccactgctggtgggcacctgggttggttgcttgtttttgctgttgtggttggtgcttatttcttttgctgacctcaagtccaagcattgtctctttttctcagtgttgtcccccccaaaatgctcaacatttgttccctggggccacacacctcgcatggtgtttcttgcgtgcccgggacagctgctgcccagttttgttgggcgttttccagctgcagatgcagtgggtccttttgcaaagcctggctttccaaagcaacaggcaatttcatgtgcacgaccagacagagaatttgcctgctggaacatctgctgcaggggaccttctgctctggtgtccacactgcaccctgtgcttaggcgtgctccagaattggggagcagaaagggacctttcttctctgttagaaccttgcagagctgctcaggtctctgggcctcagcagaagggctgggggtcaaggaccatttgcgcctgatcagatgttctcgtccactgaatgggccctgggagttgttgaggggctggattagcacctgctcctgcccaagctgaatgaggccaaccctgggaacctgcgtgaggaagggccctgcctcctcctccctcactgtctcactgtccccaggttccttcaagcctaacactgccattgtcagcatgccaccagtggtcaaacgtctgccttgattccatgtggagaggtccttggatttggaacctgggacttcctctgtggagctctgcccactgcccttgcttctggcccacgactgcgcgtggccccaaaagctgagcagggcttcttggatctgtgtgactcccgtgtcaccatcagcaattaacatgatactcaacatccggaacgaagttttgttgaacgtggccacatccattcgctcgtatgccatccgtagctgtagcaggccgccggcggcgccgcaggcgctgagcgagacgagggagccggggtggccgagcacacggcccgagtagaagcacagctcggcggggcggccgcggcgccgggccgcgcccgcctcctccacctcgaagcctcgggacaggaagcgcaggtcgcggcgcagctgaaggtacaggtcgcgcccgaaggccggcaggtgcagcagcagggcgcgctctccgggccgggcgcgcggggcggctgggggcgtgcgggggcgtcgccgccgtcggggcccgggggctgcgggcagcggcggcaggtgcacgtcgtcggggcgcacccgccacgggagcaccacctccacgtcggccgccgcgtcgccgacagctccacgctggcccgcgccacccggggagggtctccggcgcagccgcgcgagcacctcccggaacggcgccgcgcatcggcgagcggagacccggcggcggcgcgcctgccacggagccacccgattcccgtactccggccgcggcccgcgcctcctccgctcgggcgccgtcagcggtcccgccgccgcccccgggccgccaggacgccgcgagaacgcagagggaaggtagccgcaggacgcggggtgaagagggctgtgggagggggcgctacctgtgcccgggtccagtccccaaaccagcagcagcagcacgggcaggacgagcggaggcagcagggcgccgtcacacatggtacccgggaccggcagcccccccggaccgtggcggcgaagcaggagcgcgctaggcggcggcgccagccggagtgaagccctccagcctttggaaaaagtaattagcgcttttccgaccctgttttcaggagccgactcctggcaggttggttgtaggggccctcttgagtgcttcacacacagcagtcctgttggggtgaaggtcaccgtcactgtgataattgttgtcgtcgttgaaaccacccagcccgaaagcagcatgggctgtgcccagagccgccgtgccagaagcccacgcttagaaatagagggccgaagaccaaagaggactgcgggttcttgggccaaacgtgaccctctcaaatcccccaactcggggatttcgttagctggggactggtgtgcccgggttccaagacccctgcgtagactctgtctataggtggaagaaggcctttgccccgaggcatccagaggtaacggtgagaggaacaagggcacgtgggggatcccaccacagcctcccctgagaccctcttcacgctggttgcaggagtagccaaccccgctccctggcagcccgtgagatgccacatcccctccagcagggggcggccggcatcggtcccgtcttcctaaaccggcgttggtgggaaatgccggcaccagctccctccccgctccagagccctgttttccccatttgtatttcactactttcctgttgagcttggattccagcctcaaattccgcgatttggccggcatcctaatccccgagtgactcttgccaaccactctctgtggggcctgtgtgcttcctcctgggttctggggcgctggcggcgtccgcttcaccgggaacgggagccccagcctcccgaggccttcctgcctggctctgggaatggccactgtccagaaagccccgcggccgtccat

SEQ ID NO: 3709 - DNA, 355 bp, Homo sapiens
  SIMILAR (203)..(48): 371254mologous to Homo sapiens P/CAF binding region of p300,accession number W40055,Smith-Waterman Score=88.
gcatctgctccacaccagcactttggccctggtgacagctttgagaatccggggagctgaggcctgaaagatggcggaggggttaggagtgaacttcttcctcacctctgggacctggaagccggccccagggctgctgtcccatcccgaagtgtgggttgtgatgactcgggctggttttgtctttgtggatcttgagggcttcactccagtccaagcctggaattcctgtctgtacgacgtggtcactgctgcagccgcgtccgcgtcgccgatgggcagcacgtagaccccgccgtgcgccgggcgccaggtggcgcggaggactgcgcggaggatttgcccctgcggccgc

SEQ ID NO: 3710 - DNA, 1208 bp, Homo sapiens
  SIMILAR (1)..(183): 481254mologous to Gallus gallus putative microtubule associated protein; cNau,accession number AF038560,Smith-Waterman Score=151.
atggcgtggccctgtatcagccgcctgtgctgcctggcgcggcgttggaaccagctggaccgctccgacgtggcggtgccgctcactctgcacggctactcggacctcgacagcgaggagccgggcacgggcggcgccgcctcgcgcaggggccagcctcccgcgggcgcccgggattccggccgggacgtgccgctcactcagtaccagcgggacttcggcttgtggaccacgcccgccgggcccaaggatccgccgccggggcgcggaccgggggcgggcggccgcaggggcaaatcctccgcgcagtcctccgcgccacctgcgcccggcgcccgcggggtctacgtgctgcccatcggcgacgcggacgcggctgcagcagtgaccacgtcgtacaggtatgggctgggtagggaccgcaacgagtccccaccctgtggtgggaggacgcggaggcccggagccagagggatggggtgggcggcagagcggaggcgcctggagcccggatcccacgcgacctcggagctgccggcggcctcagaggtcacccccgtttggtccgtgggcactgcaggcggcgccttcgctgctccatggcccggactctagtgcttcgagtcacccccgtgccgggaggcgcaccgctggcccttcgccagccgcccgtccctgggggcagccgtcaggaatggcctgccttcagccgagttggaaccggcctccctttaactcccaccgccgggcctagccgtgcgaggggtgcgcgcaggccatgtcccccagctctccccggtcactgcctactggatagaacttatactggcttgcagactcttggagcagagacgcttttggctgttgttaatagtgctgctatgaacgtaggtgtacaggtagtggatgttgaactccatcgccattctctcggagaagactgtatctatcctcagtcctcggagtctgacatctctgatgcccctccatctttgcctttgaccattccagccccagtgaaagcttcttcaccaataaagcagtcacatgagccagtacccgatacctctgtggagaaaggcagtcaccgggtcctgcccattccatctttaaggtcccctctcccatctgggctccagccccgggttcctcctctggcggccgccaggattgctgtcgtctgtggctctggtggcttcctgctctga

SEQ ID NO: 3711 - DNA, 954 bp, Homo sapiens
  SIMILAR (307)..(399): 511254mologous to Mus musculus type III collagen,accession number X52046,Smith-Waterman Score=67.
tcaggttagctgcagctctgttccatgtggcttcttcgcagttgggtccaggctgaaggagcagtctctatttcggacagccccttctccctgcatcagtgctgggccgtgctgcacaaagcctggtgtgttttcctccagcttccaggtggcttcacttttactctcaatcctctttctgacaatctgcttggtaaacgtgtggactcggccccttcctggggccctcttggctctgccttcagaggtgtccacatgccctgtgttggtgctgcttgggaaggcaaaggccccaatctgctcagaccaagtggtaagcttggaccaagcggatccagaccaactcccataggtcagcagcaacttcctgaagtcccgcgtgcaaagggacctttgggcccagcagctgtgatctgtcagcaatgcctgctccaagcacgggagggaaaagaggcagtttttccggcaggtacttgtcagcttctctggagctaggcggactccccatggctcccaccggcccctctgctctttctgctccaccctccgtgtccaggggagcccgatagagcacgcgggaaaagccgggtgtctacgcttccgcgacttaggctgcagagataagagaaggtcaggctctgggaggacgcgaggccgtccaggaatggcagggaggcccgctggggcctgactttggtcctaatggaccaaagcttcgacggagcaaggccgggtgtccgtggtggcacctctcatcagtggacgctggcgaatgactatggaaacaacattcaacagcagtgttttctatgccaggtacacaaccgccttggcgtgggttgataaccatgcctatctcaccgcgtggcactgagccgaccgcacacccagggccccggtctccagggctcgcttactcgcttactgcgtgaagcatcacgaaatcgtcgaccg

SEQ ID NO: 3712 - DNA, 857 bp, Homo sapiens
  SIMILAR (60)..(587): 301254mologous to Caenorhabditis elegans weak similarity to collagens; glycine- and proline-rich,accession number AF000298,Smith-Waterman Score=128.
atggcactgtgctggacgacccccatctcacggggtactgttggcatcccccttgtccccctaattctgtctgtaatggaagcctatcacctgtccttcgagaggaggcagagtcgtccgaggcccctgtgcagtccccgcagcgctcgtggactccatcagccaagagtcctccacttccagcttctcctccatgcagccagctcaaggcaggaggagaccaagaaggactacagagaggtgcgttacctgttggaatggacagaggaggacctggaggatgcggaggacactgtcagtgcagcagaccccgaattctgtcacccgttgtgccagtgccccaagtgtgccccagctcagaagcgcctgggcccccgcggcaggtgccccacactcctcgtccccaggagccctcgcggacccggggtcggctcgaggcaatgcgctccgtcctggcagtaaccagcccctcctgcgggatccctgcctgcctggcctcgggcctcccgcacccaccggatcccgcgcacgctgagcaggccttgaggcgtcggagaccacgtggtccaccaacggcccaacaaccgtacacccttaaacgctgtgagctggaagccttggtgcgccacaaacctcagctgccgcatctgaacacagcccctgccccaacctaccgcttccgctttaaaagccaaacaaaacaaaacgacacattccccatggtaacatcaacagtgaaaaaagctgacatcatgtgccttccaacaggataccagagggagataaaacatccctttcagggcattcctatcagaaacgtgtaccgtgatgaaggcgtccttcagcaccccttgtaa

SEQ ID NO: 3713 - DNA, 1812 bp, Homo sapiens
  SIMILAR (1061)..(1132): 371254mologous to Homo sapiens gamma- glutamyltransferase,accession number X98922,Smith-Waterman Score= 41.
atgaagcgcctctccaccttgctcaccctccacttgtacgcataccccattcctcctggacgtgggacaggaactcaggacctgccaaatggcgagactgcaagagctgtaagggctgaaacaccccccaactcaccacactgtggtgatgaggagagaaaagctgtggccattctgggagccagggctgtgatatgctttaacaccctgtttggggctctgtggttcctggcatctccaagctttcaggtgccaccacattccccttgtccagatgctggtgcctgcagtggaagccacttgcagccagctctggggtctcggcaggtggtccgcgacatgacctccgagttcttctctgcccagctccgggcccagatctctgacgacaccactcacccgatctcctactacaagcccgagttctacatgccggatgacgggggcactgctcacctgtctgtggtcgcagaggacggcagtgctgtgtccgccaccagcaccatcaacctctactttggctccaaggtgcgctccccagtcagcgggatcctgctcaataatgaaatggatgacttcagctctaccagcatcaccaacgagtttggggtacccccctcacctgccaatttcatccagccagggaagcagccgctctcgtccatgtgcccgacgatcatggtgggccaggacggccaggtccggatggtggtgggagctgccgggggcacgcagatcaccatggccactgcactgcccccaagccatgctgatcacactcccatgccccaggccatcatctacaacctctggttcggctatgacgtgaagtgggccgtggaggagccccggctgcacaaccagcttctgcccaacgtcacgacagtggagagaaacattgaccaggaagtgactgcagccctggagacccggcaccatcacacccagatcacgtccaccttcattgctgtggtgcaagccatcgtccgcatggctggtggctgggcagctgcctcggactccaggaaagttccaacacctggggcagggttctgggaagggctggtggaggtgggctggtgggaggcggtgatcacagcccagcacctggatatcaccaggggcactggggccaggggccagggaccttcctggctgtgcctcaggatggtggagagaggaggggggacgtcccccacgctgctgtctccactgttcctgctgcccccactgttcctgctgcccaggcctctgagcttccaggactgcagcggagccacggtccaggactgcagagccatggttggcctggtccttctggggctggggctggcgctggctgtcattgtgctggctgtggtcctctctcgacaccaggccccatttgacccccaggcctttgcccacgccgctgttgctgctgactccaaggtctgctcaaatattgtagggcatgccaacttttgcacagaactgggaaaccctctgagcaggaaccacatcctgacttctcacgggagtcgggatccgagcaagcagcgctcagtgaaactgagcaggattgccctggccctggactgccttttgctcctagcccttacccttggacactgtactgcgggacaggatgccttgggctatggtgttcacctttcactcatgagcaatgtgcccaagaacaagagcccaaggaatggtgtagaagatggaaggaaaccacctgggcccctgctgaggacactgcaccaactctatgaattgaccacccctacagctgttggtaaatggatgtcgtcttcatgggaggtgtag

SEQ ID NO: 3714 - DNA, 366 bp, Homo sapiens
  SIMILAR (108)..(179): 831254mologous to Homo sapiens gamma-glutmyl transpeptidase- related protein,accession number M64099,Smith-Waterman Score=99.
atggcccaggactacggagccatgggtgacctggtcctgctggggctggggctggggctggcgctggctgtcattgtgctggctgtggtcctctctcgacaccaggccccatttgacccccggcctttgcccacgccgctgttgctgctgactccaaggtctgctcggatattggacagaggacatgcagagatgcgacacccacttaaactcgaagttgcaaagatgcaaatgagactggggtctcaggcaccagagaccacccatgggcacgtggcttttgggagtggggacctgctgccacagatctctgaagagtctggacctgctgggtctccccgagtgactgtctgggggtctccatag

SEQ ID NO: 3715 - DNA, 462 bp, Homo sapiens
  SIMILAR (132)..(461): 351254mologous to Rattus norvegicus pro-alpha-2(I) collagen,accession number AF121217,Smith-Waterman Score=77.
tccgcccctcccagggtgtctgggggacacgggggctccctggcctgggcctggatgtactgggcctccaccgaggacaagaagtccacctcgccttcctggctgagcacccgccagtaggcttcagaacccccatccaagagggcgtccgtggccagccgggcactctcgttgtcactaaagtcagccctggctggccggacccactggctcttgacatcttccagacgcttccggattttgcccaggtgccttgaccggctcatgcctcccgtccctgggtggtgctgggggaggctggcacgtcagctcctccagatgtgggaagcaaatggaacacaccacggaggagtggggctcccgcacccccgggaggccgcctgctcccaggaccggcgtgcagggcacctccaagaagtgatttaccgctgtcctgagccggacgcgtgggtcgaccaggaa

SEQ ID NO: 3716 - DNA, 616 bp, Homo sapiens
  SIMILAR (339)..(313): 881254mologous to Homo sapiens Human secreted protein clone yd153_1 protein sequence SEQ ID NO:164,accession number Y73471,Smith-Waterman Score=50.
caagagccaagattttagtctttcttggttggcttttttaaatgctttgggctttcctttaatgtatcttcaaaatcattctggggccaagttacatcataaaacattttattacatataaggactgaaacaggatttttcttaactgtaacatggtccacaaatgtaaatgcaaaacccccatggtggttgcaggagcaagtctagttgagacaggtcaggacgaaagcataaaagatgagtaactgaatggcatcccgggtcctgtagccacgccctccagattgccgccgcaaaggacctggaacctcagggccccaccctatgccatgaagaaggccgcagtcgctgcctcaaccaagccaggctccgccggggccgttcctatcctgagggtcggagggggaagggactcagccaaagccgcggcctcccagggcttgggcctccgcggcagccgggacgctgtgggttcgccgtggatcgccgcgatgtggcgtttctccaggcccgggagttcctggccctgctggaccagctgcaggagctgcgccagggtaaccgaagctgaggcagaggccggggccgagcattggggactgcggggacgctccat

SEQ ID NO: 3717 - DNA, 354 bp, Homo sapiens
  SIMILAR (129)..(40): 601254mologous to Escherichia coli 100 pct identical to sp:YI5A_ECOLI,accession number AP002527,Smith-Waterman Score=87.
tcaatgcgtcggtcttttgacagctccaatctgatgccgctttttctggatcaactgatattgcaatgtttcttttggtccaatcttgagcgcgcgtaaaccagcttctccgcgctcttcatagacctcagccacctggctacagaaccacccccttatgtacttgacaccgggcacgggcactctttggcggtttttgaccacacgcgagaacgtcccatatggccccgttccgtagtggaaccgcactatctgtggtgtcgccaactggccatattggccctccgtatgactaacaccgccgctcattgctatcagtaagagtcggtatctgcattcgcaggtacaggccat

SEQ ID NO: 3718 - DNA, 568 bp, Homo sapiens
  SIMILAR (1)..(180): 981254mologous to Homo sapiens Human secreted protein, SEQ ID NO: 8145,accession number G04064,Smith-Waterman Score=300.
ttaaacaaaagacatttattttctcacagtcctggaggctggaagtccaagaccaaggtgttcgcagggttggtttcttctaaggcctctctccttggcttggagatggccctggttggtcttctgagtgcaggtgtccctggtgtctctttgtgtgtccagattttctcttataaggaactggtggttgggtggcgatgctgcaacagtatttcgcgacgcgtgtatcccgcataacgacggtaccaacaacttctataccgctaatctggctaacgggatcgccgctatcggctataaatctcagccagctttgtgggtaactggagggcttctcgttatcatcatcacctttatcgttcgtggcatcgtgtacccgctgaccaagtcgcagtactacctccatggtcgaagatgctggttctgtagccaggtgctgaaggtctatgaagagcgcggagaagctggtttacgcgcgctcaagatggcaccaaaagaaacattgcaatatcagttgatccagaaaaagcggcacagcattggagctgtcaaaagaccgacgcattga

SEQ ID NO: 3719 - DNA, 2006 bp, Homo sapiens
  SIMILAR (454)..(17): 971254mologous to Escherichia coli 100 pct identical to sp:YI5B_ECOLI,accession number AP002527,Smith-Waterman Score=736.
agctcggtacccggggatctattactggagacaaatacagcttgcgcccattgactgcaaattcagtaacatcggtaacccacttctcgtttggccgcgtacccttgaaatctctttggagaacattaggggcggtttgccctacctctcctctgtaagagcggtatcgcttgaccttaatcgctgctttaagtgagagggttcccatcaggcgctgaacagctttatggttaatctgtttcccttctcgatgaagagacagcgttaccctacggtatccgtatcggcctctattctcgtgataaatctcactaatacgctttttaacgtccgcatacttgtcaggcttgctgagagcctttagatgataataaaacgtactgcgcggtatctccgcagccctgagaagctcatcaagaggataaaactgccttagcttcgtgagaactttcacttttttcggggaaggagctaaggctttcagcttttttagatacataagccgcgtttcaagaaatcgaacttgcctttcaagatcctcaatgcgtcggtcttttgacagctccaatgctgatgccgctttttctggatcaactgatattgcaatgtttcttttggtgccaatcttgagcgcgcgtaaaccagcttctccgcgctcttcatagaccttcagccacctggctacagaaccacccaaaccgacacaggtggtcaggtagagaataccaaggcgttgagagaactcgggtgaaggaactaggcaaaatggtgccgtaacttcggagaaggcacgctgatatgtaggtgaagcgacttgctcgtggagctgaatcagtcgaagataccagctggctgcaacttgaaataccaccctttaatgtttgatgtttaacgttgacccgtaatccgggttgcggacagtgtctggtgggtagtttactggggcggtctcctcctaaagagtaacggaggagcacgaaggttggcaatcctgaccccatgccgaactcgaagtgaaacgccgtagcgccgatggtagtgtggggtctccccatgcgaagtagggaactgccaggcatcaaatttagcgtgctgatatggctcagttgtagagcgcacccttggtaagggtgaggtccccagttcgactctgggtacagcaccaccggaccatccccggaaccctcctgcgtccttaggttgttgagtgcatccggagtgcgtggactgacggctccggggtcccagccagcaagcgagacccgcatcctgggagtggccacggcggcgcacgtggaccagcaagagcgcaggccggccacgcccgcggccacgagcagtcccagagccggaggcaaaaggagcgctgagggtccccgggcctgaggcccggcggggccgcgggcaaggccttgcgccgtcggggtgcactgggaactcacaccgcgctcccatgtagcgggagcgcaagcgcagacgaggccggagaagtgggcgtagcagcggccgcgtgagcacaggggcgcgcggcgcacgggtccgcgcgctcgcggcagtccggccgccgaagcccagcgcgcaggagcagcggtgcgcgccgccgccctcacacacgtgccgccgttagcgcaggcgcggcccgcgcagtcgtccaggcgtgctcgcagcgaggacccgcgaagccggcgcggcagcggcagcgcaggcgtggcccaggtccaggcagagtccgcgcggcgcctcacattcgtcctcgagcggtgcgcaggggcgcgtcccggaccgcaccgcgagggggcgctgcgcggacggcagaggcgcgtcacgcggtcccgacggcaggcggctcgcagcgcgcgcggtacgagaagccagctcccaggcgcctgcgcgctgaatgtcccgggcccacgggcctccgctgccaagcgccgcctgccagccacgcgcgccagcaggctccaggcgggcctggacttcaccttcagggcagacccgtcggccat

SEQ ID NO: 3720 - DNA, 505 bp, Homo sapiens
  SIMILAR (290)..(192): 931254mologous to Homo sapiens Human secreted protein sequence encoded by gene 27 SEQ ID NO:80,accession number B25691,Smith-Waterman Score=168.
tcagggttccagggccaagttatccactcccttgggtctttcctgcacgagaagcacagcgggaccaagcaggttcgctcgttgttccctagggggatgtagtcacccttcccgccactcccctcaccttccgcctccacccccagtacagttccgtgcaggtcccagaggccggcagggctcaccttccaggggctcaccttcctggggctttccctgcggggcccgggggagctgcagcagcagcagtgggcgacgaccagcagcagcaggagcagcacggtgcccatgaaggtgaggaaaacaatgaaggcaacagtgtcccatgtggactggaaaaactggtggctcttcagtctccccaggacttcctgaaccgtggcctccagctcctctgtggacacagccatcttggagtgcaccgtgccacctcctagaagcctccaattcccccaaccaggcaggtcctggggagaacaggctgcttcctgcttccggctccgtc

SEQ ID NO: 3721 - DNA, 821 bp, Homo sapiens
  SIMILAR (293)..(379): 411254mologous to Homo sapiens apoptosis-associated nuclear protein PHLDA1,accession number AF220656,Smith-Waterman Score=64.
tttttttaatacctaagatgtttaataagatgtttaacatcactagtcatgagggaaattaacatttaaagcattatgaatcaccactgccaggtgctgatgaaaatgcagcgcgcctggagtcgcgggcgttcctggcgggggtggaaatcgggggctgcccatttggaagacagttgagctgatgagttgaacgtacccttaacataggctccagcaatcccactctcaaaagaaatgaaactgcacgtccccaccaaacctgcacgcaaacgtctgaagtggcttcactcacaacagcccacatgcccatccacaggtgaacccgtgagcaactgtggtacctccacctgtcccacaacctacaactcagcagtaccaagggctggacgctggtgccaccacacgggtcccgcgaagcctgctgcgaagtgaaggaagccagacacaaaagtctccatcctgcgggagtcactcacaggacaattctggaggacgcaaagctctcctgtgacaccccaacacctcctctcccccagagcaccacaggctgctccctccccggaccgagcacccgtgtaactgtgcatctcacttgggtagcatctagcacatcttgggggaccatctgctgtctccttagtgtctgtgtagacctggggtgtcgtactatcatcctgggggcctggactgctgcctggagggttctgaggctgtgcctggcctagtggacggcatgggctgcttaatgacatcttacagcatgcaggaagggcgaagtgcagctcctggatgggctgttgccatggtctggcccccat

SEQ ID NO: 3722 - DNA, 2104 bp, Homo sapiens
  SIMILAR (914)..(1417): 251254mologous to Homo sapiens RNA binding protein,accession number AB016092,Smith-Waterman Score=128.
atgggcagggctaatgacgatggcagggcgacaagagggacagtgcgtagcgtggcaatctgcgtgctagaaaaccgagcaagcggggaaaagccggtgaaggcgagtatcacccacgaggagcggcaaaagaagaggagccgaagaaaagaacagacaagagaagaagaagggcagagaaaaagaaagaagagagaagagaagcgaaagacaaagggacagaagaagaagaaaggagcaaaggaaggaagagcaaagaagaagagcaagaacaaacgagaggaaaccaaggcaaacacaggcaaatggggccacctcgagctaaaaagcttctgcacagcaggccggcatgtgggggggctctccctgaacggatgcgacagcaatcaggcgtggaggtgctccttgcagcagccgtcggacatgcctgaaccaaggcacaatcgcaaccccatcaggacggcagacgacacggtgatgcggggtaaccagggctggcctccgagcacgatgccagtggacacggctgcctcagaaccggagcggggtaaccgtctgactcgacggaatctgtgtgccggcgacctcttgcgatgcatgtgcctacccatgagtctcacggacccgtattcacccgactggtgtcacatacctttcactgcggttgctaagctgcctgcggtgggtcggcccgtggcctgccggcccacatacagccccagcctctgccacaacccccaacgcccagcgcagcttctggctcactcatctgctttgcaatgtgcacctctgtcctgggatccccagagatgtgcacctccatccccgcgtccccacagacgtggacccccgtccccacatccccacagacgtgcacccccatccccacatccccacagacgtgcaccaccacagcccgcacagacccaaccacgagcgccccgcccccccccaaacccagagacgcgcgacaagagagccagccacgaagcacacccgcaacgcacaccccagacgatccgcctgcaaccgaggaacacacacgcacccgcgccgccgtcggaccacagagaggacaacgcaccatgcacgaccacggaaccgaggacaggccacccccaacacgcggcagcccaccgcgggccgacacgaggagacggacggcgccacacggaggcgacagcacggccaaacgcgcggcgagggaggcccaggcgcggcagggcggccaaaacccggcagagagaaagacaagagcccccacacgacaacacgagacgcaccaggagacggccaaagcggcgagacaggacaggcgcaccagcaggaaccagaaaccgaacaagcggacacaaaaagaggcaaccagggacgcgagcaagcaccggaacagccccggcgagccaacaacagcagaccccgactgtcttgtcccgttgtatatcccgtttcggtgttttttacgggcctgatttctctgggggtatattccttctgttctttgcctcttatgtcggattcgacgttgtccacatacggaggacagagacgtggaagtcgcgtgcaaggaagacccaggatacgggagtgctctccccactccgtagagagcgttcctgtcctccagcccatggccgctttccaggactcttcctgtccacccaccggcaagttggcccagcagctttgcgtcctccagaattgtcctgtgagtgactcccgcaggatggagacttttgtgtctggcttccttcacttcgcagcaggcttcgcgggacccgtgtggtggcaccagcgtccagcccttgggagattggcaagtgacagccgtggctccttagccccagacccagtctccttccttgtcgcaatcacgggatgtggaaaaaaggcacaggggtcagcacccttccgtgggttctgtgtgactgatgaaagctgcgtagaggggaccctcaggggcgaagaggccgaagacagcaccgagacctcagtgtcgggcgcgggtgctcccaaagcgcagcgggcccacctcccccggcagaggatcgtgcggcagtcaaagtcgcacacggggcttctgagatgtgcggcccgggcctaa

SEQ ID NO: 3723 - DNA, 603 bp, Homo sapiens
  SIMILAR (123)..(1): 921254mologous to Homo sapiens Human secreted protein, SEQ ID NO: 7420,accession number G03339,Smith-Waterman Score=187.
atgtgggaaagtttggaactccctagagacttgttgaatggctttgaccaaaatgctgataatgatatggacaatgaaatccaggctgaggtggtctcagatggagatgaggaacttgttgggaactggagtaaagggaaacagcttaaaagttcagaaaatttgcagcttgatgatgcaacagaaaagaaaaacctattttctgaggagaaatttaagctggctgaagaaacttacctaagtaatgaggagccaaatattaatagccaagacaatgggaaaaatgtctccaaggcatgccagagaactttggagcaggccttcccatcacaggctcagaggcctagggggaaaaaatggttttgttggctaggcccaaagcccttctgctgtgtgcagcctagggacttggtaccctgtgtcccagctgctgtagccatgggtaaaggggccaaggtacagcttgtgccatggcttcagaggggagcaagccccaagccttcgcagcttccatatgatgttgagtctgtgggtgcacagaaatcaagaattgaggtttgggaacctctgcctagatttcagaggatgtacggaaatgcctag

SEQ ID NO: 3724 - DNA, 732 bp, Homo sapiens
  SIMILAR (409)..(729): 681254mologous to Homo sapiens mariner transposase,accession number U49974,Smith-Waterman Score=387.
atgtggaagcaactttggaactgggtaacatgcagaggtcagaatactttggagggctcagaagaagacaggaaaatgtgggaaagtttggaactccccagagacttgttgaatgactttgaccaaaatgctgataatgatatggacaatgaaatccaggctgaggtggtttcagatgaagatgaggaacttgttggaaactggagcaaagcacattaccgcttttgcattgggcagggctggcctgtcctctggcccctggcacgtgcacaagtgggccactcctcaggctccccaaaggtgaatgcagctatgcggcagccctggctggcactggaagaggtcggtggtagtggctccaggccggcagctcccaggctctggagagtgcatgtttcagctccctttgccctgcaggcagccttctttgtgtgctataccacctattctccaagcaaacttgccactcaatggacgccaaaactgttgtgcccagatcagctgcaaagaagatcagagctttcattagaaattttaaacaagtgggaccaagatcttgaagcatttattcaaagaactgtaacaggagatgaaacatggctttaccagtacaatcctgaagacaaagcacaatcaaagcactggcaccgaagaggtggaagtggtccagtcagagcaaaagcagactggtcaagagcagaggtcatggcaccagttttccaggatgcttaa

SEQ ID NO: 3725 - DNA, 1374 bp, Homo sapiens
  SIMILAR (195)..(73): 871254mologous to Homo sapiens Human secreted protein, SEQ ID NO: 7420,accession number G03339,Smith-Waterman Score=176.
atgtggaagcgactttggaactgggtaacaggcagaggttggaatagtttggagagctcagaagacaggaaaatgtgggaaagtttggaactccctaaagacttgttgaatggctttgaccaaaatgctgataatgatatggacaatgaaattcaggctgaggtggtctcagatggagatgaggaacttgttgggaactggagcaaaggtgactcttgttatgttttagcaaagagactggcagcattttgccccggtcctagagatttgtggcactttgaacttaagagagatgatttagggtatctggcagaagaaatttctaagcagcaaagctttcaagagaaatgctatttctctcccccgaagaagaatgggaccttgaaggacctactgggactagtcattcaaccttggtgtgggcctgcccacttctccgggaccagactgggccacctcctgagaaccacagatgtgccacgccttcaggaaccccatcacatgctgtccgaggaggaaggaagaggggttgagtgtgctgacacacagagtaacaggctgtttaggagagagggtggaagaagagggccacgtttttcagtgtggcatgggtccccgcaggcttcccttcctgctggagcaagtggagactatgcacctccccagaaacgtcctctgggccgagggcaggctcagagtaaggaggagagagagagagagagacagagaagcagcaagaagagcagaaaagtcaacaggcctgagagggccatggtgcaaactgcttcaaaggcaggtccttggagcccatgtcactgcagaggagttggagggctagagaacagagaagtttggcagccatcatccttggccatagttccggaaggctgcaagaggctaggtgggcaatgtatgagcaggacatctagcaaatgggccatggagagcctgactgagactcttatgtcctattctggcccagaaacttcacaatgggtcttaaatagcacagagaagtgcagccctgaaaggttcacatggacaggagtctcagcatgtggacaggtgatagaggagcaaatgggctcaaagaatcttgactatatgctggagcacagtctgccatgggccctgcacatttttgcaggatatgccaagaattcaaggccatgcatctctttcctaagacctttctcagaatcgtgtttgcagggagcaatgttgcaggatgaagtaacctctctcacaaagagcaggcttgcatctgcttcctataaaagcagcaggccaattccaggtttcccagccccaggcaagctgaccccagacaatgcaggccccaggagtatcatggaggaagaaaagaagggttga

SEQ ID NO: 3726 - DNA, 873 bp, Homo sapiens
  SIMILAR (166)..(128): 691254mologous to Homo sapiens Human secreted protein, SEQ ID NO: 7420,accession number G03339,Smith-Waterman Score=45.
atgtgggaaagtttgcaactccctggagacttgttgaatggctttaaccaaaatgttgataatgatatggacaatgaaatccaggctgaggtgatctcagatggagatgaggaacttgttgggaactggagcaaaggtgactcttgttatgctttagcaaaaagactagtggcattttgcccctgccctagtgatttgtggaactttgaacttgagagagacaattcagggtatccggcagatgaaatttctaagcagcaaagcattcaagaggtgacttgggtgctgttaaaggcattcagttttaaaagggaaacagagcataaaactttggaaaatttgcagcctgacaatgcaatagaaaagaaaatcccatttcctaagaagaaattcaagcaggctacagaaatttgcataagtaacaaggaggcaaatgtgcagaagacaaatgtagagttggagccctcacacagaatccctactcaggcactgcctagtggagctgtgagaagagggtcaccgtcctccagaccccagaatggtaggtccactgacagcttgcaccatgtgcctggaaaagccacagagactcagcaccagcccgtgaaagaagccaggaggggggatataccctgcaaagccacaggggcagatctgccaaaggctgtggaagcccactttttgcatcagcgcatcctgaatgtgagatatggagtcaaaggaaatgattttgaagctttaaaatttgacggccctcctggatttcagacttgcatgtggcctctagcccctttgttttggccaatttctcccatttggaatggctgtatttacccaatgcctgtacccccattgtatctaggaagtaactaa

SEQ ID NO: 3727 - DNA, 1210 bp, Homo sapiens
  SIMILAR (123)..(1): 871254mologous to Homo sapiens Human secreted protein, SEQ ID NO: 7420,accession number G03339,Smith-Waterman Score=176.
atgtgggaaagtttggaactccctagaaacttgttgcatggctttgaccaaaatgctgataatgatacggacaatgaaatccaggctaaggtggtctcagatggagatgagaaacttgttgggaactggagcaaagagccacctggcaacacggagagggagcccacttcccctgagccgggatgtagatgggacctgttgatgtcaactgccaatagcatggaagagagcgtgcaggaacaggagagagaacgcacaggttttcctcccttttcctgtgcagacctgctccagggtcatacaacatcgagtgccaatcagacaaggttcaccccgtggatgaaaaaagagctacagtttgaaaacctagtgggaaatctaactgactcatccctgccttcccaaatatttgcagaaaatagtttgggggcatcaggatctgcaacacatgtacgtcgtatcaaaatcattattcgcatgacagccaagacctcgggctctctgaagctgattgcctggctttctctgaatgctgtggatctgctgagctgtgggcttactctttggggttttctggtgatagctaagcctcctggggatgattcactacatgttcaaaacaccaaacgaggccaggacatcgcccagagcagcaacatcctgcggaaaagagtgtcagtggcatcttttgttatgcagaggagatggaatcctcccagctcccagacccaggctccggtcaaccccctcgaggtggcccctgggaccgccgtatgagcctctctccaaccggatccctgatgctcccggagagccggcccagcctcgaccccgggacactagtcattggatcagggcatacctggataaccgggtctggcgccgcgtggacataggctgtggaagtccccggagacccctgccccatcccctgccccgcggggtgtcagcggtggcctcccaggcagcaggagcgcgcaagtgggaagcggggatcccagcccacaccacctatgacagccagctgctgcagggaggaaggattcttcatccttctgagccacatggcgtcccccagaccacctggtccagctgctgctgcagggaggaaggattcctcatccttctgagccacatggcgtcccctagaccacctggtccagctgctgcagggaggaaggattcttcgtccttcatggttcttccctga

SEQ ID NO: 3728 - DNA, 1621 bp, Homo sapiens
  SIMILAR (628)..(581): 751254mologous to Homo sapiens Human secreted protein, SEQ ID NO: 7420,accession number G03339,Smith-Waterman Score=60.
atgttcttaaataaagtacctgtctttggaaagcaagccccccagtatggactgagtggggtgagcaacgaaggcaaggtggaggcacagatcacctgtgcacctcagagcaatatttctcagactttaatgtgcaccaagttacctggggatcttgttaaactgcagcttcttaccccacagagtgacaacagttgtacccatattggtgacaacggaacttaccggtcacaactgaaagcagcttttgcagagaaactcaatatgggaaaattaacctttttcataactggagtaaatcacaagtgggggctgccattgtccctgacctggctgcctgccaattcctgggagagccttctgtctttcccacctccttccccaccccaacagctaaatgataaaccaggcagacgatcgaacataacgcacagctcaaaagaagacaagaaaaccgaagaaagtttggaactccctagagacttgttgaatggctttgaccaaaatgctgataatgatatggacaatgaaatccaggctgaagttgtctcagatggagatgaggaactttttgggaactggagcaaaggtgactcttgttatgttttagcaaagagactggtggcattttgtcccttccctagagatttgtgggactttggacttgagcgggatgatttggggtacctggtggaagaaatttctaagcagcaatgcattcaagaggttactcgtgtgctgttaaaggcattcagttttataagggaaacagaccataaaagttcagaaaatttgcagcctgacaatgccatagaaaataaaatagcattttctaagaagaaattcaagccagttgcagaaatttgcataagtaataaggagccgaatgttaatccccaagacaatggggaaagtgtctccagggcatgtcagaggtcttcacagcaggccctcccagcacaggcccagaggcctaggaggaaaaaatggtttcacagctgctccagctatggctgaagggtccaacatagagctctggctgtggcttcagagggtgcaagccccaaaccatggcagcttccatgtggtgttgagcctagttcagaagatgtatggaaacacctggatgaccaggcagaagcttgctgcaggagcaggttcctcatggagaacctctgctagggcagcacagaagggaaatgtggggttggaacccccaagcacagtccctactggagtaccacccagtggagctgtgagaagaaggccaccatcctccagaccccagaatggtagatccactgacagcttgcaccatgcacctggaaaagccacaagcactcaatgccagcccctgaaagcagctatgagggaggcggtaccctgcaaagccacagaggcagagctgcccaagaccatgggaacccacctcttgcatcagcatgacctggatgtgagacatggagtcaacagagataatttgggagctttaagatttgactgccccactggatttcagactcgcatggggcctgtagccccttcattttggccaatttctcccgtttggaatggctgttgtttacccaatgcctgtatccgcattgtgtctagaaagtaa

SEQ ID NO: 3729 - DNA, 636 bp, Homo sapiens
  SIMILAR (531)..(466): 1001254mologous to Homo sapiens Human secreted protein, SEQ ID NO: 4260,accession number G00179,Smith-Waterman Score=98.
atggagattcggaggacctggcaggagcatcaaggtcccttatccacaaacttcctgcccatgctgcccagggaaaagcaataccagtctgtatcagccagggagaggcctgccagccaagatagtggctctgggctgtggttggtcacagtaaaggacgttttcacggtcgtttcgtattcagcactaagagaaagcctacggccgctgtcagccgaagacaggaatcttgaggccctgtctctggacaccatcgagttaactgtctgccctgtaccattctgcctctgcgcaggtgacgagcaaaagggcacctgtgtcgcctgctctgtccagccggagaagccacgggtgcaagatggcggcattcgccacagcccctcgccctcctgcagagagcgcccgagccggcgcaccaccaccctgcagccccacccggccgcctgcatcatgccggccttcggtgctcaccagtccggcccgccgaggaagggcgcggaccacggccgcagcaacgcgcacggacagcatctttgcagttactccgcaggcggtacttctgcagccgcagcctccggactgactgggacaaaatggccgagccgcaaagaaggtcaagacagccggcccacctga

SEQ ID NO: 3730 - DNA, 1896 bp, Homo sapiens
  SIMILAR (1828)..(1265): 361254mologous to Homo sapiens H(+)-transporting ATP synthase,accession number X59066,Smith-Waterman Score=140.
gcattatggaacctttatttttcatgtgatttctgtacataaggagtatgagagtaacccttttacaaatggaactaatttactagaacaatgacaaaactgaactggtatttgatgtgaatccacaggagtttaagcttcaaatccagccaagaaatttgttacaatctctttcagctttgcatctgattgttctgagatctttccatcagccctgatagtgcccaacaaggcttggtgctggctgacgacatgagacaagaaagcattctcaaactttgtaatcttgctgggctccagtttatcaagatatccccttacacccgcatagataacagccacttgttcttcaatagccatgggagaatactgtccttgcttcagcaactcagttagacgcacgccacgactcaaaagttgttgagtggcagcatcgaggtcagaaccgaactgggcaaaagcagcaacctcacgatactgagccaattccagcttcatggtacctgctacctgcttcatagccctggtttgggcagcggatccgacacgagatacagacagaccaacgttaattgcagggcggatacctttgtagaacaattctgtttccaagaagatctgtccgtcagtgatggaaatgacatttgttggaatgtaagcagacacatcaccagcctgtgtttctatgactggcaaagcagtcaaggagccaccaccaaaagcatcgttcattttggctgctctctccagcaaccgggagtgtaggtagaacacatcaccaggataggcctcacgaccagggggtcggcggagcaacagagacatctgacggtaagcaacagcctgtttggataagtcgtcatagatgatcaaagcatgtttgccattgtctctaaaatactctcccatggaacagccagagtaaggagccaggtactgaagtggggcagcatccgaggccgtagccgacaccacaatggtgtacttcatggcatctgcatctgtaagtctcttcaccaactgggcaacagtggatctcttttgaccaatagcaacataaatacagtacagcttcttcttttcatcagatccatcattgaaacgtttctggttaatgattgtgtcaatagcaattgaggttttcccagtctgtcggtcaccaataatcagttcacgctgaccacgaccaattggcaccaagctatccacagccttaatgccagtctgcattggttcccgcactgaaattcgaggaatgataccgggggctttcagaccaacttcgcctacgcgtcttggaaccaaattggaccctttccatcaatagcattacccaagggcatcaactacacgacccaacagctcttcacccaactgggaacgtccacaatggctcctgtccttcttcactatatctcctttccttaattagtttatcaatttcccaaacacggacaacacccaaccattgtcaggttccaaagttcaaaggacatacccttttaagcctgaaagaaaaactcttaccatttcttctgcttggaacattccttcagcccattgtacggcgggcaataaccatcaccaatactttaagacacgcccaggtttcattcaagatcaaaaagaggtatcacgctccaagaatacgcttcttcaagaaattagaggacatcttcagcagtcccagtcttttgaaggatgagtgttagaggcatggaagttccttgcagcaatgaaagatgaacccaaagcatttctggagaccaggtccggcccgccgaggaagggcccggaccacggccgcagcaacgcgcacggacagcatctttgcagttacctcgcaggcggtactttctgcagccgcagcctccggactgactgggacaaaatggc

SEQ ID NO: 3731 - DNA, 499 bp, Homo sapiens
  SIMILAR (230)..(304): 561254mologous to Mus musculus signaling molecule,accession number U97571,Smith-Waterman Score=73.
  misc_feature (1)...(499): n = a,t,c or g
agtgtcgtgcaattcgctcgggaccggcctggagatggagttcgactgcgagggcctgagacggtttgcttgttatgtacaagttcagggacctagggtgtggaagaactaaggaatgtaaatgtatttttcccacatttcaaatattccatggacacctatgtttttaaagatagttctcagaaagacctgctgaattttactggcacacttcctgtgatgtatcaggcctaaatctgtcattgttggnnnnnnnnnnnnnnnnnnnnccaagtttcaagaggaacttcccatgtattctctatcatcatctgatgaggcacggcaggtagacttgctagcctatattgcaaaaatcactgaaggtgtttcagatacaaattcaaagagctgggcaaatcatgagaataaaacagtcaataaaattactgtggttggaggtggagaactcggtattgcctgcacattagcaatttcagcaaagggtattgcagacagg

SEQ ID NO: 3732 - DNA, 1449 bp, Homo sapiens
  SIMILAR (766)..(1389): 411254mologous to Homo sapiens Protein sequence and annotation available soon via Swiss-Prot; available at present via e-mail from LABEIT@EMBL-Heidelberg.DE,accession number X90568,Smith -Waterman Score=424.
atgtccgacgtgcacgcggccactgggagcccagctgagttgtgtgtagtgctgaatgacgagaaggtggagggtgtgtggctgaaggatggcaaggagatcacggacttgccaggcgtgcagattgtgaagcagggtgcagtgcacaagctcatctttcccagtatgggccctgagcacgagggcaagtacacattccgggccaagggcacggaaagtgaagcctctgtattcatcgcagatcctcctaccatcgacccgtcagtactggaggcactggctgcgcacgccatcactgtgaaggtaggccacacggcccacatcaaggtccccttccggggaaaaccactgcccaaagtgacatggtacaaggatggcatggaagtgacggaggaggaacgcgtgtccatggagcgcggggaagaccaggcactgctcaccatctccaactgtgtgcgtgaagacagcggcctcatcctgctcaagctcaagaatgaccacggctcagccacggccactctgcaccttagtgtgctgggtgtttcagatacaaattcaaagagctgggcaaatcatgagaataaaacagtcaataaaattactgtggttggaggtggagaactcggtattgcctgcacattagcaatttcagcaaagtgtcatccggagcgctatgaagagctagtcgcatattgcgtggcgtcctgccgctgtcatgaggaagctagcgtcaagagcattatggtcgtccacacaggagacagagagcctcctggttttgcctcccagcctcaagtgactgatgtgactaaagaagccgtgaccatcacgtggaatgcccctacccaggatgggggagccccagtgctcggctacattgtagaacgaaggaagaaaggcagcaacctgtgggtgccagtcaacaaggaccccatccagggcaccaagtgcactgtggatggtctcctggaggacacagaatatgaattccgagttatagctgtaaataaggcaggccctggacagcccagtgtgccatccagctcagtagtggccaaggatcctgttaaacccccaggcctggtccaggacctgcatgtatctgattcctccaactccagcatttccctggcctggcgggagcctgcagagggagacccaccctctggctacatccttgagatgagggctgaagacacaaaggagtggtccaagtgcacaaagatccccatctcaggcacctgctacacagtgggaggactcatcgagaggcagaaatacttcttccgaatccgggctgtgaatgaggctggggttggggagcctgtggagctagacaagggggtccgtgccatgccaccaccagtccacagggtgccagaagatgacagtggctccatggggacaacagaggcagaacaaggtagcggtgacgacacgggctactga

SEQ ID NO: 3733 - DNA, 930 bp, Homo sapiens
  SIMILAR (1)..(924): 531254mologous to Homo sapiens putative p150,accession number U93574,Smith-Waterman Score=781.
atgcagagatggtttaatatatgcaagtcaataagtgtgatacaccacataaacagagttaaaacttacatgatcatctcaatagatgcagaaaaagcatttgacaaaatccagcatctctttatgattaaaactctcagcaaaattggcatacaagggacatacctccacgtaataaaagtcatctatgacaaacccacagccaacataatactgaatgggaaaaaagttgaaagcattccctttgagaactggaacaagacaaggatacccactctcacaactcttcttcaacatagcactggaagtcctagccagagcaatcagacaagagaaataaagggcatccaaatcagtaaagagaaagtcaaactgtcactgtttgctggtgatatgatcttttatcttgaaaaccccaaagactcctccaaaaaactcctagaactgataaaagaattgagcaaagtttccaggtataagattaatgtacacaaaccagtagctcttctatacaccaacagtgacctagtggagaatcaaatcaagaactcaaccccttttacagtagctgcaaaaataataaaatacttagaaatatacctaatcaattacatgaaagacctctacaaggaaaactacaaaacactgctgaaaaaaatcatagacaacacaaacaaatggaaacacattttatgcttatggataggtagaattaatcttgtggaaaatgaccatactgcaaaaagcaataaacaaactcaatacaatccccatcaaaatactaccataattcttcacagaattagaaaaaccaattctaaaatgtatacagaacgaaaaaagagcccacatagccaaagcaagactaagcaaaagaataaatctggaggcatcagactacctgatttcaaactatactataagccatag

SEQ ID NO: 3734 - DNA, 639 bp, Homo sapiens
  SIMILAR (1)..(294): 641254mologous to Homo sapiens PRO2221,accession number AF116695,Smith-Waterman Score=310.
atgggaagaaaccagagcaaaaaggctgaaaattccaaaaaccagaatgccttttctcctccaaaggaaaacgactcctcgacagcaagggaacaaaactggatggagaatgagtttgacatgttgacagaattggacttcagaaggtcggtaataacaaacttctccaagctaaaggagcatgtcctaacccatcacaaggcagctgaaaaccttgaaaaaaggttagacaaatggctaactagaataaacagtgtagagaagaccttaaattacctgatggagctgaaaaccacattgttcatggtggacaatggagcagatgactggagaatagccatgacttatgagcgtattttcttcatctgcttggaaatactggtttgtaatgctgtgttagggggcaaattggggatggaaaggaaaagagagagcaaagggacagcaggagcatgggaggattctaagggctcagctggagcctttcgcattccatcagagatctgtgcaatgtggggacatcagagatctgtggatggggtatttcctcttgaacctcatgaaaaagctaacatttcaatgatttccatgacaggatacttgacagttaaaagaactgaaaaagatagcatcaactaa

SEQ ID NO: 3735 - DNA, 1833 bp, Homo sapiens
  SIMILAR (496)..(1122): 241254mologous to Homo sapiens KIAA1509 protein,accession number AB040942,Smith-Waterman Score=106.
ctgcgccagggccccgcggggctggggcccaaaaagcgtgcggagcctcagctggtggagacccagaatgtgcggcttattgaggtggagcgcagtgtgagtgtgggcccacagtgggccctggggaggtgccccgtgcagtgtgagtgtgggtccacggtggaccctgggctggggggtatcccgtgcagtaatgcgatgctggtggcagagaaggcagctttgcaggggcagctgcagcacctggaggggcagctggggagcctgcagggccgtgcccaggagctgctgctgcagagccagcgggcgcaggagcacagcagccgcctgcaggccgagaagtctgtgctggagattcagggccaggagctgcaccggaagctggaggtgctggaggaggaggtgcgggcggcacggcagtcccaggaggagacccgcgggcagcagcaggccctgcttcgggaccacaaggccctggcacagctgcagcggcggcaggaggccgagctagagggactgctggtgcggcaccgagacctcaaggccaacatgcgggcactggagctggcccaccgggagctgcagggccggcacgagcagctgcaggcccagcgggccagcgtggaggcacaggaggtggccctgctggcagagcgtgaacgcctgatgcaagatgggcatcggcagcggggcctggaggaggagctgcggaggcttcagagcgagcacgacagggctcagatgctgctggcagagttgtctcgggagcggggtgagctgcagggtgaacgcggggagctacggggccggctggcgcggctggagctggagcgggcacagctggagatgcagagccagcagctgcgcgagtccaaccagcagctggacctgagcgcctgccggctgaccacgcagtgtgagctattgacacagctgcgaagtgcccaggaagaggagaaccggcagctgctggctgaagttcaggccctgagccgggagaacagggagctcctggagcgcagcctggagagtcgggaccacctgcaccgcgaacagcgggagtacctggaccagcttaatgccctgcgccgcgagaagcagaagctcgtggagaagatcatggaccaataccgcgtgctggagcctgtgcccctgccccggaccaagcccagctcaggtccaggccccatgaaggtcaacctggcctttgacatccccaggacaccctttgctccctccctcctccctgtcctgaccccctcttgtgccctcttgcccccaggaagggcagctggctggcagacaaggacatccgggctttggccggccggactggccaagcccctggagaaaggcctgtgctgccctgtccaggcaggggccctctgcccacagacccccaccaaccagcaggactggggcggcatgtgtcctggtgccctgagggcagggggttctcttgccaactcctgccagcctccttcagctgggggatcccccagagaccgctgcctcaacgggagccacctggaagaaccagaactccagcctggagctgctcgtgggggccagccatcccccctgtccacacactcgtcccagctccatctccgggccccggcgctgaccgtggaggatctcagggcccaggcctccttgtccaaggactccccttggggtccctggctccctgagctcttgggctgcctggggcctccgctgacactccagtgccgagaaggctgcactcccaagcctgctgttcccacggtgtcactggctgagggatggggtgaggggacgtttctccggttcctgtacctcggggcctag

SEQ ID NO: 3736 - DNA, 1267 bp, Homo sapiens
  SIMILAR (289)..(1266): 411254mologous to Leishmania major L8453.1,accession number AC008054,Smith-Waterman Score=440.
  misc_feature (1)...(1267): n = a,t,c or g
ttttcattttttttttttttttgaccatgcatcgactcttttatttctttaggactcaaattccactcggatggggtcaggcttgggtctggggacccggctggcacggggctggttcgggtcgctgctcgagcccaaggtggcgtttttaattcacgtacagcctcttgctccggcgcttcttgagcccttcgatgtatcgctgcagctccttagtcaggaagtggtccctgccgatccctaactggtagctccggagggctttggtgaggatttccagagcttcattctccatgagttccatcaggggcagtggcagaggctccagcacgcggtattggtccatgatcttctccacgagcttctgcttctcgcggcgcagggcattaagctggtccaggtactcccgctgttcgcggtgcaggtggtcccgactctccaggctgcgctccaggagctccctgttctcccggctcagggcctgaacttcagccagcagctgccggttctcctcttcctgggcacttcgcagctgtgtcaatagctcacactgcgtggtcagccggcaggcgctcaggtccagctgctggttggactcgcgcagctgctggctctgcatctccagctgtgcccgctccagctccagccgcgccagccnnccncgtagctccccgcgttcaccctgcagctcaccccgctcccgagacaactctgccagcagcatctgagccctgtcgtgctcgctctgaagcctccgcagctcctcctccaggccccgctgccgatgcccatcttgcatcaggcgttcacgctctgccagcagggccacctcctgtgcctccacgctggcccgctgggcctgcagctgctcgtgccggccctgcagctcccggtgggccagctccagtgcccgcatgttggccttgaggtctcggtgccgcaccagcagtccctctagctcggcctcctgccgccgctgcagctgtgccagggccttgtggtcccgaagcagggcctgctgctgcccgcgggtctcctcctgggactgccgtgccgcccgcacctcctcctccagcacctccagcttccggtgcagctcctggccctgaatctccagcacagacttctcggcctgcaggcggctgctgtgctcctgcgcccgctggctctgcagcagcagctcctgggcacggccctgcaggctccccagctgcccctccaggtgctgcagctnnnnnngcaaagctgccttctctgccaccagcat

SEQ ID NO: 3737 - DNA, 679 bp, Homo sapiens
  SIMILAR (427)..(32): 391254mologous to Mus musculus GABA-A receptor epsilon-like subunit,accession number AF189268,Smith-Waterman Score=229.
atgagggaaaggatgagagaaacgatgagaaaggatgagggaaaggatgagaaaaagaatgagagaaacgatggaaaggatgagagaaacgatgagggaaaggatgagggaaaggatgagagaaaggatgagagaaacgatgagggaaaggatgagggaaacgatgagggaaaggatgattgaaaggatgagggaaaggatgagggaaaggatgagggaaaggatgatggaaaggatgagagaaaggatgagggaaaggatgagggaaaggatgagagaaaggatgagggaaaggatgagggaaacgatgagggaaaggatgagagaaaggatgagagaaaggatgagggaaaggatgagggaaaggatgagggaaaggatgagagaaaggatgagggaaaggatgagggaaaggatgagggaaaggatgcagggaaaggatgagggaaaggatgagggaaaggatgagggaaaggatgagagaaaggatgagggaaaggatgagggaaaggatgagggaaaggatgagggaaaggatgagggaaaggatgagggaaaggatgagagaaaggatgagggaaaggatgagggaaaggatgagggaaaggatgagggaaaggatgagagaaaggatgagggaaaggatgatgctgccttatcatactctcatcaaggttaa

SEQ ID NO: 3738 - DNA, 660 bp, Homo sapiens
  SIMILAR (260)..(96): 451254mologous to Homo sapiens Human secreted protein, SEQ ID NO: 6708,accession number G02627,Smith-Waterman Score=107.
atggcaaatacaattgagattgacaaacaaacaaacaaaaatccactttcactagaagctccattttatgacaactgtgttgtgtgtgatgctggtggagaggattgtggaggacgaatggcagagatgaaagggcttgctgaggttactatagaacttctggaacctactggggaagaagagctgggcaggcagctccaggcactagcacaggtgccgactccatgtgaggctgtgtctggaccagatgtactgcatacagcttctgctgcaggcacctgcatccagacaaggggtacacagtggcacccagaagcttggagatgccaggaactgcagagccccaaagagagcgtcacagccctgactctggagcccctaaatccaggttccctgaagggctgcagctcttttctcctcattgcctgcaatgtgagggaggaagtgcatgctgataagtccgtggccatgagtgggcccagaaaaagtaccacaagttctcactgtggtctgtggactccacctgaaactgacagcccagcccccatgcttcaggctgtcactggcttgaagagcctgcagccttctgccatgcctcccctgctgcttctggcatctttgcagcagctgcttcagacaggccgctgctgccatcagtag

SEQ ID NO: 3739 - DNA, 1025 bp, Homo sapiens
  SIMILAR (2)..(199): 551254mologous to Homo sapiens Human gene 52-encoded protein fragment, SEQ ID NO:387,accession number Y86472,Smith-Waterman Score=164.
caggccactatccttgataaacatacatgcaaacttcctcagcaaaatactagcaaactcaattaaacaatgccttaataggatcatccaccatgatggagtgagatttatctttgagatgtaagaataatttaacatacatagatcaataaatgtgacatactacattaacagaatgaagaataaaaatatgatcatcagatgcagaaaaagcatttgacaatattcaacaccctttcataataaaaattctcatcaaattaggtatagaaggaacatagctcaatacaataaaggccctactgatggcagcagcggcctgtctgaagcagctgctgcaaagatgccagaagcagcaggggaggcatggcagaaggctgcaggctctcggcctcctctgaactttgggcaccaatgagcatgggagggggactgaggtaggcctgagggcagcttggcgcaggcctgcaggcccctttggcacaaacagcctgggtgccatggacattattgatggcaacaggaggcagacaggctcctgggtggaaaggggcacattcctggtgaagccccaccttcaagccagtgacagcctgaagcatgggggctgggctgtcagtttcaggtggagtccacagaccacagtgagaacttgtggtactttttctgggcccactcatggccacggacttatcagcatgcacttcctccctcgtgagtccattcacagggccagagttccaagtgtgcggcgtgggcggggcctgcagaaagggacggggcctgcagaaagggacggggctggcaaaggcctggtctacctcaccgatccgggtcgcgggggctcctagggggttccttccacagtgtccaagacagcgattccgcggctcctctgagaactggcgcttgtgagtgactgaacgggccactggagaggagcggtgctcacgggtatcgttctcgtcagcgggcggtggggacgcggggtcttggaattgggaatcacgcttgagggcgtccat

SEQ ID NO: 3740 - DNA, 1164 bp, Homo sapiens
  SIMILAR (372)..(1130): 311254mologous to Herpesvirus papio NTR,accession number AF200364,Smith-Waterman Score=164.
cgacacccaggctggccgactccggcagcgtgccccacgactctcaggtggctgaaggccccagtgtggacaccaggcccaagaagatggaaaaagagcctgccgccagggggaccccaggaacggggaaggagaggctgaaagccggagcgagtgggtttgcaggaggcatgggccctcggagcgtccccgcgcgcaagaaggcgcagaccgcgccgcccctgcagccgccgccgccgcccccggccctgagcgaggagctgccctggggagacctgtcgctcaacaagtgcctggtgctcgcctcgctggtggcgctgctgggctcggctttccagctgtgccgcgcgttctgccgcctttcccctgcgccctctctggggaccgctcagctcgtgagcgccccccgggggcactcctgcgacccctcccttgctaggggcctcctacagcccgtggtcggggggaagaatgaccaattgaaagagcgagctgactcgggtcccgaccctgtcgctgcagacgccgtccctggggaggcagcactccaagcacgtgtgcccgagccctgggtcccgccaagctcagccccgagggagccatcgtcgcccctgcctaagttcgaggcccagggcgcctccatcagcccggcctgcgccccgggccgaggcagaggtcagacccaagattccccgggagtcgggagcctgcagagaacgcggaagaggagcccggcgaggccaccggagaggccgtccgggaggaccgtgtgaccctcgcagaccggggacccaaggagaggcctcggagagaggggaagccgcggaaggagaagccgcggaaggaggagagacctaagaaagagaggccgcggaaagaggagaggccacgggccgccagggagccccgggaagccctaccccagcgctgggagtcacgcgaagggggccaccggccgtgggcacgggactccagggacgccgagcccaggaagaagcaggcctgggtgtccccgaggcgtcccgacgaggagcagcggcctgggagtcgccagaagctccgcgcaggcaaggggcgggactgagccggccccgcgccggagtccaggggccccttctggacgccccgcgactctggcgaaataaagcgagtgctgcggccaaa

SEQ ID NO: 3741 - DNA, 529 bp, Homo sapiens
  SIMILAR (12)..(359): 871254mologous to Homo sapiens p40,accession number U93566,Smith-Waterman Score=510.
cagattcaccaaagttgaaatgaaggaaaaaaatgttaagtgcagccagagagaaaggtcgggttacccacaaagggaagcccatcagcctaaaggctgatctttcagcagaaactctacaagccagaagagagtgggggccaatattcaacattcttaaagaaaagaattttcaacccagaatttcatatccagccaaactaagcttcataagtgaacaagaaataaaatactttacagacaagcaaatgctgagagattttgtcatcaccaggcctgccctaaaggagctcctgaaggaagcattaaacatggaaaggaacaactggtaccagccactgcaaaaacatgccaaattgtaaagaccatcaaggctaggaagaaactgcatcaactaacgagcaaaatagccagctgacatcataatgacaggatcaaattcacacataacgacattaactttgaatgtaaatgggctacacagactggcaaattggataaagagtcaagacccatcagtgtgctgtat

SEQ ID NO: 3742 - DNA, 369 bp, Homo sapiens
  SIMILAR (368)..(6): 911254mologous to Homo sapiens p40,accession number U93569,Smith-Waterman Score=577.
ctttacattttggcatgattttgcagcggctggtactggttgttcctttccatgtttagtgcttccttcctggtggtgacaaaatctctcagcatttgcttgtctgtaaaggattttatttctccttcacttatgaagcttagtttggctggatatgaagtgctgggttgaaaattcttttctttaagaatgttgaatattggcccccactctcttctggcttgtagggtttctgccgagagatccgctgttagtctgatgggcttccctttgagggtaacccgacctttctctctggctgcccttagcattttttccttcatttcaactttggtgaatctgacaattatgtgtcttggagttgctctt

SEQ ID NO: 3743 - DNA, 394 bp, Homo sapiens
  SIMILAR (319)..(23): 871254mologous to Homo sapiens p40,accession number U93569,Smith-Waterman Score=438.
atagcattgatggtctctaccatttggcatgtttttgcagtggctggtactggttgtttctttccatgtttagtgcttccttcaggagctcttgtaaggcaggcctagtggtgacaaaatctttcagcatttgcttgtctgtaaaggattttatttctccttcacttatgaagcttagtttggctggatatgaaattctgggttgaaaattcttttctttaagaatgttgaatattggtcccccctcttttctggcttgtagggtttctgccgagagatccactgttagtctgatgggcttatggctgcccttaacactttttccttcatttcaaccttggtgaatccaacaattatgtgtcttggggttgctcttcttaaggagtatgtttgt

SEQ ID NO: 3744 - DNA, 1247 bp, Homo sapiens
  SIMILAR (1245)..(556): 891254mologous to Homo sapiens p40,accession number U93564,Smith-Waterman Score=1037.
ttatttcttgccttctgctagcttttgaatgtgtttctcttccttctctagttcttttaattgtgatgttagggtgtcagttttagatcttttctgctttctcttgtgggcatttagtgctataaatttccctctacacactgctttaaatgtgtcccagagattctggtatgttgtatctttgttctcattgttttcaaagaacatctttatttctgccttcatttcattttgtacccagtagtcattcaggagcaggttgttcagtttccatgtagttgtgcagttttgagtgagtttcttaatcctgagttctagtttgattgcactgtggtctgagagacactttgttataatttctgttcttttacatttgctgaggagtgctttacttccaactatgtggtcaattttggaataagtgtgatgtggtgctgagaagaatgtatattctgttgatttggggtggagagttctggagatgtctattaggtctgcttggtgcagagctgaattcaattcctggatatccttgttaactttctgtcttgttgttcggttgttcctttccatgtttagtgcttccttcaggagctcttctagggcagggctagtggtgacaaaatctctcagcatttgcttctctgtaaagtattttatttctccttcacttatgaagcttagttttgctggatatgaaattctgggttgaaaattcttttctttaagaatgttgaatattggcccccactctcttctggcttgcagagtttctgccaagagatctgctgttagtctgatgggcttccctttgtgggtaacccgacctttctctctggctgcccttaacattttttccttcatttcaactttggtgaatctgacaattaggtttcttgtagttgctcttcttgaggagtatctttgtggcattctctgtatttcctgaatttgaatgttggcctgccttgctagattggggaagttctccaggataatgtcctgcagagtgttttccaacttggttccattctccctgtcactttcaggtacatcaatgagacgtagatttggtcttttcacatagtcccacatttcttggaggctttgttcgtttctttttattcttttttctctaaacttctcttctcgcttcatttcattcatttgatcttcagtcactgataccctttcttccagttgatcaaatcggctactgaagcttgtgcattcatcacgtagttctc

SEQ ID NO: 3745 - DNA, 1698 bp, Homo sapiens
  SIMILAR (1626)..(1697): 831254mologous to Homo sapiens ORF2 contains a reverse transcriptase domain,accession number M80344,Smith-Waterman Score= 102.
atggagctgaaagccaaggctcaagaactacgtgaagaatgcagaagcctcaggagccgatgcaatcaactggaagaaagtgtatcagtgatggaagatgaaatgaatgaaatgaagcgagaagggaagtttagagaaaaaagaataaaaagaaatgaacaaagcctccaagaaatatgggactatgtgaaaagaccaaatctacgtctgactggtgtacatgaaagtgacggggagaatggaaccaagttggaaaacactctgcaggatattatccaggagaacttccccaatctagcaaggcaggccaacattcagattcaggaaatacagagaacgccacaaagatactcctcgagaagagcaactccaagacacataattgtcagattcaccaaagttgaaatgaaggaaaaaatgttaagggcagccagagagaaaggttgggttacccataaagggaagcccatcagactaacagtggatctctcggcagaaactctacaagccagaagagagtgggggccaatattcaacattcttaaagaaaagaattttcaacccagaatttcatatccagccaaactaagcttcataagtgaaggagaaataaaatcctttacagacaagcaaatgctgacagattttgtcaccaccaggcctgccctacaagagctcctgaaggaagcactaaacatggaaaggaaaaaccgagacacacataggctcaaaataaaaggatggaggaagatctaccaagcaaatggaaaacagaaaaaggcaggggttgcaatcctagtctctgataaaacagactttaaaccaacaaagatcctaaaagacaaagaaggccattacataatcgtaaagggattaattcaacaagaagagctaactatcctaaatacatatgcacccagtacaggagcacccagattcataaagcaagtccggagtgacctacaaagagacttagactcccacacattaataatcggagactttaacaccccactgtcaacattagacagatcaacgagacagaaagttaacaaggatacccaggaactgaactcagctctgcaccaagcagacctaatagacatctacagaactctccaccccaaatcaacagaatatacatttttttcagcaccacaccacacctattccaaaattgaccacatagttggtagtaaagctcttctcagcaaatgtaaaagaacagaaattataacaaactatctctcagaccacagtgcaatcaaactagaactcaggattaagaaactcactcaaaaccactcaactacatggaaactgaacaacctgctcctgaatgactactgggtacataacgaaatgaaggcagaaataaagatgttctttgaaaccaacgagaacaaagacacaacataccagaatctctgggacacattcaaagtagtgtgtacagggaaatttatagcactaaatgcccacaagagaaagcaggaaagatccaaaattgacaccctaacatcacaattaaaagaactagagaagcaagagcaaacacattcaaaagctagcagaaggcaagaaataactaaaatccgagcagaactgaaggaaatagagacacaaaaaacccttcaaaaattaatgaatccaggagctggttttttgaaaggatcaacaaaattgatagaccactag

SEQ ID NO: 3746 - DNA, 1539 bp, Homo sapiens
  SIMILAR (658)..(1536): 951254mologous to Homo sapiens putative p150,accession number U93568,Smith-Waterman Score=1457.
atggaagaagaaatgaatgaaatgaagcgagaagggaagtttagagaaaaaagaataaaaagaaatgagcaaagcctccaagaaatatgggactatgtgaaaagaccaaatctacgtctgattggtgtacctgaaagtgatggggagaatggaaccaagttggaaaacactctgcaggatattatccaggagaacttccccaatctagcaaggcaggccaacattcagattcaggaaatacagagaacgccacaaagatactccttgagaagagcaactccaagacacataattgtcagattcaccaaagttgaaatgaaggaaaaaatgttaagggcagccagagagaaaggtcgggttaccctcaaagggaagcccatcagactaacagcggatctctcggcagaaaccctacaagccagaagagagtgggggccaatattcaacattcttaaaggaaagaattttcaacccagaatttcatatccagccaatctaagcttcataagtgaaggagaaataaaatactttacagacaagcaaatgctgagagattttgtcaccaccaggcctgccttacaagagctcctgaaagaagcactaaacatggaaaggaacaactggtaccagctgttgcaaaatcatgccaaaatagtcacacataggctcaaaataaaaggatggaggaagatctaccaagcaaatggaaaacaaaaaaaggcaggggttgcaaacctagtctctgataaaacagactttaaaccaacaaagatcaaaagagacaaagaaggccattacataatggtaaagggatcaattcaacaagaagagctaactaccctaaatatatatgcacccaatacaggagcacctagattcataaagcaagtcctgagtgacctacaaagagacttagactcccacacattaataatgggagactttaacaccccactgttaacattagacagatcaacgagacagaaagtcaacaaggatacccaggaattgaactcagctctgcaccaagcggacctaatagacatctacagaactctccaccccaaatcaacagaatatacatttttttcagcaccacaccacatctattccaaaactgaccacatacttggaagtaaagctctcctcagcaaatgtaaaagaacagaaattataacaaactatctctcagaccacagtgcaatcaaactagaactcaggattaagaatctcactaaaaaccgctcaactacatggaaactgaacaacctgctcctgaatgactactgggtacataatgaaatgaaggcagaaatgaagatgttctttgaaaccaacgagaacaaagacacaacataccagaatctctgggacacattcaaagcaatgtgtagagggaaatttatagcagtaaatgcccacaagagaaagcaggaaagatccaaaattgacaccctaacatcacaattaaaagaactagaaaagcaagagcaaacacattcaaaagctagcagaaggcaagaaataactaaaatctga

SEQ ID NO: 3747 - DNA, 2673 bp, Homo sapiens
  SIMILAR (97)..(1842): 901254mologous to Homo sapiens human homolog of Drosophila lethal discs large 1; Method: conceptual translation supplied by author,accession number U37707,Smith-Waterman Score=2629.
gttccttcggagagcgagcgggagtcggtgctcggcctcctgcggggagcagcccgaggaatctgcagggagaggtcgggaggtgacaacgccagcatgccagtgctatcggaggactctggtttgcatgaaaccctggccctgctgacctcccagctcagacctgactccaaccacaaggaggagatgggcttcctgagggatgttttcagtgaaaaaagcctcagttacttaatgaagattcatgagaagcttcgctattatgaaaggcaaagtccaaccccagttctgcacagcgctgtggccctcgctgaggacgtgatggaggagttgcaggccgcctccgtgcacagtgatgagagggagctgctccagctgctgtccaccccgcacctgagggctgtgctcatggtacatgacacggttgcccagaagaattttgaccccgttctcccgcctctgcctgacaatatcgatgaggattttgatgaggaatcggtgaagatcgtccgcttggtgaagaacaaggaacccctgggtgccaccatccggcgggacgagcactcaggggctgttgtggtggccaggatcatgcgaggaggcgcagcagacaggagcggcctggtccacgttggagatgagctccgagaagtgaacgggatcgcagtcctgcacaagcggcccgacgagatcagccagattctggcccagtcccagggatccatcaccctaaaaatcatcccagccacccaggaggaagatcgcttaaaggagagcaaggtgttcatgcgcgccctcttccactacaaccctcgggaggaccgggccatcccttgccaggaggcgggcctgcccttccagcgcaggcaggtcctggaggtggtgagccaggacgaccccacgtggtggcaggccaagcgagtcggggacaccaaccttcgagccggcctcatcccctccaaggggttccaggagagacttccaggaaggtcagtcttgggtcagagggtggcagttgtgacttccactgtgggttgtagccctcacatcttttggtgtgtggactgtgagacctgtgactgtgagggctacctcaaagggcactatgtggctggtcttcggaggagcttccggctgggctgtagggagagactgggtggctcgcaggaaggaaagatgtcctccggagctgagtctccggagctgctgacttacgaagaggtggccaggtaccaacaccagcccggagagcggccccgcctggtggttctgatcgggtctctgggagcccgactgcacgagctgaagcaaaaggtggtggctgagaacccacagcactttggcgtcgctgttccacgggcaccctgggatgtcaagctccagtgggcagaggatcctggttctgaatgtgataaggaggatgaggaggaggagaatgaaggtgccaggttcctggaacatggtgaatataaggaaaatctgtatggaaccagcctggaggccattcaggctgttatggccaaaaacaaagtttgtttggtggatgtggagccagaagcactgaaacaactgaggacctcagaatttaaaccctatattatatttgtaaagcctgcaattcaggaaaaaagaaaaacgccacctatgtccccagcttgtgaggacacagcagccccatttgatgagcagcagcaagagatggccgcttctgccgccttcatagaccggcattacgggcacctggtagacgccgtgctggtgaaggaggatctccagggtgcctacagccagctcaaagtggtcttagagaagctgagcaaggacactcactggcctccgctggtgatacccaggcaaacagggtctggagtggacctccagcaaactccaacagacctgcagctgagggtcctgactgttagaaggaaaactaagaaacagaaaggacatccacaccaaaaccccacctgtacgtcaccatcatcaaagaccaaagtgggagaaagggtatcagtgattgaagatcaaatgaaggaaatgaagcgagaaaagaagtttagagaaaaaagagtaaaaagaaatgaacaaagcctccaagaaatatgggactatgtgaaaagaccaaacctacgtctgattggtgtacccgaaagtgatggggagaatggaaccaagttggaaaacactcttcaggatattatgcgggagaacttccccaatcgagcaaggcaggccaacattcaaattcaggaaatacagagaatgccacaaagatactcctcgagaagagcaaccccaagacacataattatcagattcaccaaagttgaaatgaaggagaaaatgttaagggcagccagagagaaaggttgggttacccacaaagggaagcccatcagactaacagcggatctcttggcagaaactctacaagccagaagagagtgggagccaatattcaacattcttaaaggaaagaattttcaacccagaatttcatatccagccaaactaaacttcataagtgaaggagaaataaaatcctttacagacaaacaaatgctaagagattttgtcatcaccaggcctgccttacaagagctcctgaaggaagcactaaacctggaaaggaacaactggtaccagccactgcaaaaacatgccaaattgtaa

SEQ ID NO: 3748 - DNA, 1911 bp, Homo sapiens
  SIMILAR (424)..(1188): 981254mologous to Homo sapiens similar to several hypothetical proteins: U70849 (PID:g1572765), U00043 (PID:g470341), Z50070 (PID:g899462), AL033127 (PID:g3821335), and P40034 (PID:g731464),accession number AC004849,Smith-Waterman Score=1341.
atggccggagcggcggcggcggtggccgcgggagcagcagctggagccgccgcggcagccgtgtcggtggcggctcccggccgggcctcggcgcctccgccgcccccgcccgtgtactgtgtgtgccggcagccgtacgacgtgaaccgcttcatgatcgagtgcgatatctgcaaggactggttccacggcagaagccagagtggtgcttttaacatctgtgttggagtagaagaacatcatgctgttgacattgacctgtatcactgtcccaactgtgcagttttacatggttcctccttgatgaaaaaaaggaggaactggcacagacatgactacacagaaattgatgatggttccaaaccagtgcaagctggaactagaactttcattaaggaattacgctctcgagtcttcccaagtgccgatgaaataattataaagatgcatggcagccagctgacacaaagatatctggagaaacatggatttgatgtccctattatggtcccaaaattagatgatctaggactcaggctcccttcacctacattttctgtgatggatgtggaacgttatgtaggtggtgacaaagtgatagatgtcattgatgtggcgaggcaggcagacagcaaaatgacacttcacaattatgttaaatacttcatgaatcctaacagaccaaaagtgttaaatgtgatcagccttgaattttcagatacaaagatgtctgaattggtggaggtccctgatatagccaaaaaactttcctgggtggaaaattattggccagatgattcagtctttcccaagccatttgttcagaaatattgcttaatgggagttcaagacagctatacagatttccacattgacttcggtggaacttcagtctggtaccatgtcctctggggtgagaagattttttatttaataaagccaacagatgaaaatttggcacgttatgaatcttggagttcatctgtgacccagagtgaggtgttctttggagataaggtggataaatgctacaaatgtgtggtaaagcagggacataccttatttgttcctacagggtggatccatgctgtgctcacttctcaggactgtatggcttttggggggaacttcctgcacaaccttaacattggcatgcagctcagaataagcagcacagagaaaaccttaaatgacctgatggagctgaaaaccatggcaaaagaactatgtgacgcatgcacaagcttcggtagccgatttgatcaagtggaagaaagggtatcagtgattgaagatcaaatgaatgaaatgaagcaagaagagaagtttagagaaaaaagagtaaaaagaaacaaacaaagcctccaagaaatatgggactatatgaaaagaccaaatgtacgtctgataggtgtacctgaaagtgacggggagaatggaaccaagttggaaaacactcttcaggatattatccaggagaacttccccaacctagcaaggcgggccaacattcaaattcaggaaatacagagaacgccacaaagatacttcttgagaagagcaactccaagacacgtaattgtcagattcaccaaagttgaaatgaaggaaaaaatgttaagggcagccagagagaaaggtcgggttacccacaaagggaagcccatcagactgacagcggatctctcggcagaaactctacaagccagaagagagtgggggccaatattcaacattcttgaagaaaacaattttcaacccagaatttcatatccagccaaactaagcttcataagtgaaggagaaataaaatcctttacagagaagcaaatgctgagagattttgtcaccaccaggcctgccttacaagagctcctgaaggaagcactaaacatggaaaggaacaactga

SEQ ID NO: 3749 - DNA, 1791 bp, Homo sapiens
  SIMILAR (1090)..(1788): 921254mologous to Homo sapiens p40,accession number U93564,Smith-Waterman Score=1089.
atgaccggtgtgagcagaggctcagggctgccaattagcatggccgaaaatcgcaggcctctgcccgtttctgcaggctccaagcctgtgattcctatcttacagtctcctctccagatactgaataccactcactatttcttaaaatcacttctcacccccacttcttcctttgcacatgttatttcttctgcagaggatttggtacaacgtagaaatgtgattggcgatgtctattctcaggggcctgcctctccttttgaaataaacaatgggttaggcagtcccctgaagtatacagcttggaggaagcaagagatgggaccttggcaatggttgtggcagcaggactttcacttgtttcttggggctccactccagagatatgcagagccactaccagttggtacaatcagccctggatggggcagctgtgttgtggattcaagccaggagtccctgcccaatgacaagcatctgagggcagcaaaggaagtaccactgcagttacagtggcagaggagttttcagttgcctcttggagcttcacctcaaagaaatacaaggatcctgctaaccggaatgttcagctgggtgtggctgaatattcatccagggaccctgcttggtgaaaagctggggtcctggggcagcaagggcagaaccactgcaggagccatagcggagaggctgttggtttcttctgagagctccatccctgggaacccagagcaactaccaagaaacgcagagctgccactgactgaagtattcaggtgcgggcagtgtagttatgctgcaggcacacctcaaaaagccccctgcccagtgaggagtagcagggccagggacccatgcagaaagccatctgactgtttgttgggcacagacgaacaaaaagacagcagtaacctctgcagacttaaatgtccctgtctgacagctttgaagagagcagtgtttctcccagcacgcagctggagatctgagaacgggcagactgcctcctcaagtgggtccctgagccccgagcagcctaaatgggaggcaccccccagtaggggcagactgacacctcacacggccggaagcctcagaagccaatgcgatcaacgggaagaatgggtatcagcgatggaagatgaaatgaatgaaatgaagcgagaagggaagtttagagaaaaaagaataaaaagaaaagaacaaaccctccaagaaatatgggactatgtgaaaagaccaaatctatgtctgattggtgtacctgaaagtgatggggagaatggaaccaagttggaaaacactctgcaggatattatccaggagaactttcccaatctggcaaggcaggccaacattcagattcaggaaatacagagaacaccacaaagatactcctcgagaagagcaactccaagacacataattatcagattcaccaaagttgaaatgaaggaaaaaatgttaagggcagccagagagaaaggttgggttacccacaaagggaagcacatcagactaacagcggatctctcggcagaaactctacaagccagaagagagtggggatcaatattcaacattcttaaagaaaagaattttcaacccagaatctcatatccagccaaactaagcttcataagtgaaggagaaataaaatactttacagacaagcaaatgctgagagattttgccaccaccaggcctgccctaaaagagctcctgaaggaagcactaaacatggaaaggaacaaacggtaccagccactgcaaaaacatgccaaaatgtaa

SEQ ID NO: 3750 - DNA, 1360 bp, Homo sapiens
  SIMILAR (321)..(986): 781254mologous to Homo sapiens p40,accession number U93570,Smith-Waterman Score=878.
aacacttttggtgtcacaaacaggattcaaaaacaaaagtgtgccactttttagcaacaagggcagggcgggaggctcgaggacttcccatatccccggatggaaactcccccagttctctcccttggcaattgaatggtcaaggggaaccggactttgcacgcagctggagcgacgaggacggctttccgcttttggcgcggcctttgtctctagctgcagccggcgtttcaggtctcgtcttcactggtctgtgtcctattctcctggaggcccagcctctgtggccctgtgacctgcagttcttcagacaatcagtaaaaacaaacttctccaagctaaaggaggatgttcgaatccatcataaagaagctggaaaccttgaaaaaagattagatgaatggctaactataatagacagtgtagagaagaccttaaatgacctgatagagctgaaaaccatggcccaaaaactacgtgatgaatgcagaagcttgagtatccaatgtgatcaacaggaagaaaaagtatcagtgattgttaaaatgaatgaaatgaagcaagaagagaagtttagagataaaataataaaaagaaatgaacaaagcctccaagaaatatgggactatgtgaaaagaccaaatctacgtctgattggtgtacctgaaagtgatggggagaatagaaccaagttggaaaacactctgcaggatattatccaggagaacttccccaacctagcaaggcaggccgacattcaaattcaggaaatacagagaacgccacaaagatactcttcgagaagagcaactccaagacacataattgtcagattcaccaaagttgaaatgaaggaaaaaatgttaagggcagccagagagaaaggtcgggttacccacaaagggaagcccatcagactaacagtggatctctcggcagaaactctacaagctagaagagagtgggggccaatattcaacattcttttttttttttttttttttttttttgagacggagtctcgctctgtcgcccaggctggagtgcagtggcgggatctcagctcactgcaagctccgcctcccgggttcacgccattctcctgcctcagcctcccaagtagctgggactacaggcgcccgccactacgcccggctaattttttgtatttttagtagagacggggtttcaccgttttagccgggatggtctcgatctcctgacctcgtgatccgcccgcctcggcctcccaaagtgctgggattacaggcgtcacgaccgcgcccggcctcaacattcttaaagaaaagaattttcaagccagagtttcatatccagccaaactaagcttcataagtga

SEQ ID NO: 3751 - DNA, 3483 bp, Homo sapiens
  SIMILAR (334)..(909): 981254mologous to unidentified cloning vector 29kD protein essential for the replication of mini F plasmid,accession number AB015619,Smith-Waterman Score=982.
atgcaggaacaacagcaagcctccagcctgatcaggagcggcaatgggcgcctccctggatcaggagcacagcggacaccctgccatatccggagggatggaagtcagcggcgggtctgcgatgactgcaaacagcagtggtggaaggcaaaatacaacataccatctggcttgcatgcttgcactgcgactctagaagaaacccatattttagactcgggggcacatgtgcaagttttttacaagggtcaactgcatgtcatgagagttccatgtacagattattttgacacccagaagaaccccaacttgtcacacttacatggatctgtcatggcggaaacagcggttatcaatcacaagaaacgtaaaaatagcccgcgaatcgtccagtcaaacgacctcactgaggcggcatatagtctctcccgggatcaaaaacgtatgctgtatctgttcgttgaccagatcagaaaatctgatggcaccctacaggaacatgacggtatctgcgagatccatgttgctaaatatgctgaaatattcggattgacctctgcggaagccagtaaggatatacggcaggcattgaagagtttcgcggggaaggaagtggttttttatcgccctgaagaggatgccggcgatgaaaaaggctatgaatcttttccttggtttatcaaacgtgcgcacagtccatccagagggctttacagtgtacatatcaacccatatctcattcccttctttatcgggttacagaaccggtttacgcagtttcggcttagtgaaacaaaagaaatcaccaatccgtatgccatgcgtttatacgaatccctgtgtcagtatcgtaagcccgatggctcaagcatcgtctctctgaaaatcgactgggacatagaaccgtaccccgctggcctaaaagagcagattaagtctgatgttttcttgttaagttcctgtgtggaagttctccccaatgctgaaattgggttcttaaaatgtctagctattattggattatgggctgtttctctcttcagctacaataattgctttatatgtacaccggcgttcggtcgaagagtatctggtgtcatagaaattgccgatgggagtcgccgtcgtaaagctgctgcacttaccgaaagtgattatcgtgttctggttggcgagctggatgatgagcagatggctgcattatccagattgggtaacgattatcgcccaacaagtgcttatgaacgtggtcagcgttatgcaagccgattgcagaatgaatttgctggaaatatttctgcgctggctgatgcggaaaatatttcacgtaagattattacccgctgtatcaacaccgccaaattgcctaaatcagttgttgctcttttttctcaccccggtgaactatctgcccggtcaggtgatgcacttcaaaaagcctttacagataaagaggaattacttaagcagcaggcatctaaccttcatgagcagaaaaaagctggggccataaacacacaactggttgaaaccctgctctctgactctagaagaatccccgacttcatgtctaaaacaccaaaagcaatggtaacaaaagctaaaattgacaaatgggatctaattaaactaaagagcttctgcacagcaaaagaaactaccatcagagtgaacaggcaacctacagaatgggagaaaattttcgcaacctactcgtctgacaaagggctaatatccagaatctacaaagaactcaaacaaagttacaggaaaaaaacaaccctgtcaacaagtggtggccatgagaagtggagacgaaatctgaaactcaatgttgctctgctgatatggttttgctgtgaccccacccaaatttcatttttaattgtagctgccaaaattcccatgtcatgtgagggatctggtgggagaagaaaccccatgataaccaggcaaacaggatctggagtggacctccagcaaactccagcagacctgcagaagagggactttactggtagaaggaaaactaacaaacagaaaggaatagcaccaacatcaacaaaaattacgtccacatggaaacctcatccaaaggattgcaactcctcaccagcaagggaacaaaactggatggagaatgagtttgacaaattgacagaagtaggcttcagaaggtggacaataacaaactcctccaagctaaaggagcgtgttctaacccaatgcaaggaagcaacgaaccttgcaaaaaggttagagaaattgctaactagaataaccagtttagaaaagaacaaaaatgacctgatggagctgaaaaacacagcacaagaacttcgtgaagcatacaccagtatcagcggccgaatcaatcaagcagaacaaaggacatcagagattgaagatcaacttaatgaaataaagcgcagaggcgtctccgtgtgtccacaaccatcagaagacaccccgaggagtactgccagggtcccaaaggggatggtccccttccggccccgggtccccttggtcactccacccagagagaaaaaagaagctccttggcttgcatgccttcgcactagggctctaaggatcctcatagaccctccgagccaggtgtgggatatagtctcgtgtgatgcggagaatgaaaccaagttggaaaacactctgcaggatattatccaggagaacttccccaatctagcaaggcaggccaacattcaaattcggggaaattacagagaacgcccacaaaggttgcctcctcgagaacagcaactccaagcacacctaattgtcagattcaccaaagttgaaatgaagggaaaaaatattaagggcagcccagagagaaaggtcggggttacctacccacaaaggggaagcccttcagactaacaacagctgatctctcagcagaaacttctacaagccagaagacagagtgggggccaatattcaacattctctaaagaaaagaattttccaacccagaatttccatatccagccaaacctaagcttcataagtgaaggagaaataaaatactttacagacaagccaaatgctgagagatttttgtcaccaccagggcctgcccttaaaagagctcctgaaggaagaagcacttaaacatgggaaagggaaccacccggtacccagccacttgcaaaaattcattgcttaaatttgttaaaggccatttgagggcttggggaggaaacttgcatcaacttaatgggccaaaattaccagctaacattcttaattgacaggatccaaattcacacataacaatattaactttaaatgtaaatggggctaaatgctcccatttaaaagacacagactgggcaaattggataaagagtcaagacccatcagtgtgctgtatttaggagacccatctcatgtgcagagacacatataggctcaaaataaagggatggaggagatcacaagcaatggaagacaaaa

SEQ ID NO: 3752 - DNA, 888 bp, Homo sapiens
  SIMILAR (418)..(570): 321254mologous to Cavia porcellus sperad-7,accession number AF180148,Smith-Waterman Score=75.
atggcccggcctctcccttgggaaaccaaccctaggcttcccttaggaggcccctgcctgcctttagaaggctctcagccccctggccccaacaacaatctcttcagtggactgtggattccgggcctccacaggcatcacgttgctcccccggaccggtgctgcccacggtgctgctggatgagatcgaggcggccgagctggagtgttaacgatgacagcatcgagggcgtgctgtgcggggccgtgaagcagctgaaggtacctaaggcagtaaacccccaactccctggaagggcccactgggcgctcacttcgctccagagcctcgcctggtttccgcttcgggatccggtcacccaacccagctctccagtcgctgctgtttctccctgggggtggaaccgggactggcccccgctctttgaagccaaagggtctgagctcttccccggtagaccaggcgaaaaagcaaagccacagcgccaacggccaccaaacccaacgcaggacacaacacaacaaaaaaggcccggccaggacaagggcccacgccagaaatccccgcccttggaagcccgagggaagtggatcccgaggttgcccatcctggtgcgttcctctctcaacctgagcggaggcgatgtgtacttggttcctccttccctcctggttaccaacagagaagagttgatcccctccctgttttcagttgaaaagcagcagaacagtaaggacatcaacgggggaataaatgcctttaactgtgtgcctagaatcgcccctgcccctctgcgccattttcccaacgaccattctcaaggctccgtgactccctgggagtcgctctggcagctatcgcaccagccccagcaggggatcctctag

SEQ ID NO: 3753 - DNA, 829 bp, Homo sapiens
  SIMILAR (446)..(820): 311254mologous to Homo sapiens Human apolipoprotein E mutant protein fragment 11,accession number Y20298,Smith-Waterman Score= 112.
cggcacgagggccgggtggcggcggcggcgctccggtcgcgatgggccagaggtgacgccgcagccgccgggagccgcgagggacggggcaggatgaaccgggccaagcccaccacggtgcgccggcccagcgccgcggccaaaccctcagggcaccctcccccaggagacttcattgctctgggctcaaagggtcaggccaatgaatcgaaaacggcgtccaccctgctgacaccagccccttccggcctgccttctgagcgcaagcgggatgcggcggctgcgttgtccagtgcctcggccctcaccggtctcaccaaacgccccatactctcctccacaccccctctgagtgccctggggcgcctggctgaggctgcagtggcagaaaaacgagccatttctccgtcgattaaagagccatctgtggtgccaattgaagtgctgcccacggtgctgctggatgagatcgaggcggccgagctggagggcaacgatgacaggatcgagggcgtgctgtgcggggccgtgaagcagctgaaggtcacccgcgccaagcctgacagcaccctctacctgagcctcatgtacctggccaagatcaagcccaacatcttcgccactgagggcgtcattgaggctctgtgtagcctcctgcggcgggacgcctccatcaacttcaaggccaaggggaacagcctggtgtctgtgctggcctgtaacctcctcatggccgcctacgaggaggacgagaactggcccgagatctttgtcaaggtgtacatcgaggactccctgggggagcggatctgggtggacagccctcact

SEQ ID NO: 3754 - DNA, 576 bp, Homo sapiens
  SIMILAR (392)..(574): 421254mologous to Homo sapiens Human secreted protein fragment encoded from gene 42,accession number Y07785,Smith- Waterman Score=98.
ttatgatggcagcagcggaggtctggaccagctgctgccatgctgactgcagtgtggcaggcacagccagggctgcattctccgtggatccgacaagagccaggaacaggtgagaactccgtccccttccaacttggacgggtgggatccctgccctccaaggcacagctgctgccactcagctgcccggtgctttttcaaggcccacccatggccacccatggaccaatcagcatgtacttcctcccttctgaagcccatagaaacgccagactcagttagacttgagtagacatagggataaccttcctgcggagaggatctacccactgggggtttcctctttgctgagagctgtacactcagacaggatgacttgccactactcgccatgttgcgggaaacaagaaagagagcagaactgcagctcttctgggagcccagacctagtggttccctgcatgagggctgtgacaccttctttggcatctccaagcttctgcgtgacactgcattcgccttgtccagacgcagttgcccaaagcagcagttgcccaaagcagcagccacgtgcat

SEQ ID NO: 3755 - DNA, 2052 bp, Homo sapiens
  SIMILAR (91)..(2): 431254mologous to Homo sapiens Human neurofilament-L mutant protein fragment 9,accession number Y20502,Smith-Waterman Score=59.
atgggtgcccatcttgatgggtcagacaagagtggcaacttaggtttggagcccaacttcatgttcagctcagccagcatctacaaatggatttctcaggaccacgacagcactttaggctgttgtaggacttcatttcctgcttgtggtagattgcaaatagccccaattcttcacacctctcttactacaccctttgccatggtgtgccctcctgagtcacaacagcttggccatgggacttggtttggccattgggatgttcatggagccaacagaggcttgcatggggcccgtgtgttaagctttcatctctggagccccttctcctgctatgagaaggacatacctggctggcctgctggaggaaaagagacttggggagtagagccacagaaaccattggacttcaaccagaagttcattggagcaaaagaacccaacaaaacaagcatcaggaattctttagatgccttctttgaaaccagaaattgccacagttcttcgctttctggttttctacacaccccagttgccaacagctatagccctaactccaagcaggaagtgaccgctggaaagcagctgaacaaagcaaagcaacttggtcaacactgcatcccccatgagctggctctcatctctgaggttctcataaaaaaggtcccacctcccctgtccagtcccagcttattcacagtcccagtgaatgctggactcagggaaagggaatatgaaccaagcatatttgacttggatttgccactaacaaacaagagtcctgagtgctctgcgaacaaaggcctgctcccttggttctaccacggaaacccctacgaacataaaataaatttgtaccgccaggtccctggtgttcagagcagaccggactccaggccgtgctgcgccgcggagcgaggagggagccgggcttcggcggtgcccgcgatgggcgctagggggcccccgcggagcttggaaggcggctttgctgtaaatcccagccctctgcgctttcttccggttccacaggatttggctctgttgggaagaacacagagcatgcgggctgggggccaatgcacgtgtgctcggcagcaagggtggtgggaaaatcagccaggaattcccttccttctcttgatccacaaacccaaaatccacctgtccacctactcgctgcctcctcaaccaaggcctctggaaacccccaaccccctactgccttcagaaaagctgcagctgatcccagcacatgactcacacagcatctacctgtcacattccaagtgcctcgctgtgtcgtgggcatcaagtggcaaaatgaacaaagatcgaatgtcaggaggccctatccagggtcacatgcttggccgcacttcccctttcaagagctggtgggagaaagattttgagcagggtcaccgaagacagatacccatcaccaaggagctccataagcacatttcacccatccccagctccgttccccaagaaaacaaccacattccagccgttagcaggcagtctggaaagaggggtgccaggacacagagcatcaacagcccggagtgcgcgtccaggcaggaggacgaggcacacgcagagctctcgctgcaggacgaatttcagagcacccagaaaggccctgaagctcccacacgcagggaacttggcgcatccctcatctgccgcgtgtgcagctccccacctcctcccaattcccccccacaaacagttatatcttttggcgcaaatgtgcagctttatggaggagaggggaacaaagaggcaagcttcacctgcttagcctcgtccatcccccaagctgcctccacggctggtcatggcgttgtggtcatctccggagtcctcatgcgtgggagtctgctggatttctcagtttgccgacactccagaagtgtgtttgacatcctcgtaaattcattcttccttcctgttctgttcgagatccctccaaagtcaggagacactggtgatgtggctgcatctttctctgcctctgtgcagccaggtacagaggacaaatga

SEQ ID NO: 3756 - DNA, 1320 bp, Homo sapiens
  SIMILAR (598)..(1179): 301254mologous to Homo sapiens transcriptional coactivator AIB3,accession number AF208227,Smith-Waterman Score=113.
atgctctctccattgtcagaagaggttgatcatcaccagccctgtgcgagggaacaggaagctgaacctgaggagcccccctcaggaagtaacactcctcagatgtgcgacattgtgctgagggccaccgctctcatctccgtgcatataggaaaactcttcaaggtggagcatggtgcctgggtcattgaaggggcccaggatgtggttgttgaacaggtgaatggagtaccaaaagcctggttctgtgccattagattacctgagtacacgggagggtcatcagtgcgggtgaaggatgaaggaaagacaggtctgaatctgcaagaggagccatcttgtgccacctcagaatcacctccttgttgtgggaaggaagagaagaaggaaggtgactgcagacaaaccttaggaaccctctctcttggtacaagttcaagaattgtcagggaaatggacaaacgaactgtgaaggatatttctccatctgctggtgagcatggtgactgtactactcacagcactgctgccacatcaggattatctctgcaatctgacacctgcctggcagtggttaatgacgtgcctctaccccctggcaaaggtcttgaccttgggttgctggagactcagctgctggcctcccaggattcagtctcaacagatcccaaaccatacatcttctcagatgctcaaaggccttcttcctttgggtccaaaggaacttttccccaccatgacattgctacctctgtggctgccgtttgtatttctctgccagtgagaacagatcacatagcccaggaaattcacagtgctgaaccacgagaccacagccagactgcagggaggactctgacatcaagctccccagacagcaaagtcacagaagagggcagagcacagaccctcttgccagggagaccttcatctggacaaagaatttcagattcggttccactggagtcaactgaaaaaactcatcttgaaataccagcttcaggaccaagttcagctagttcacaccacaaggaagggagacacaagacgttttttccttccagaggccagtatgggtgtggggaaatgactgtcccctgcccctctttaggaagtgacggtaggaaacgtcaggtatctggattaatcactcggaaagattctgtggttccttctaagccagagcagcccatagaaattcctgaagccccttctaaatccctcaagaagaggagtctggaaggaatgagaaagcaaactcgagtagagttcagtgacaccagcagcgacgatgaagaccgattagttatagaaatatga

SEQ ID NO: 3757 - DNA, 4848 bp, Homo sapiens
  SIMILAR (544)..(3756): 1001254mologous to Homo sapiens dJ492J12.1 (novel protein similar to zinc finger protein human immunodeficiency virus type I enhancer-binding protein 1 (HIVEP1)),accession number AL121919,Smith-Waterman Score=5749.
gggaattgggaggaggtggggagctgcacacgcgttagatgagggatgcgccaagttccctgcgtgtgggagcctggggatggcaacagggtgagggcttggcattcagtccaggtgaccaaggggctgtcccggacccttccctcgctcaaagaggaaggtgttagtcagctgtcatcttgccagcagggatcagctgttactcaaaggcgtcaatttcgcagtgatcacagaacaggctgcagagagcacaaaatgatcatcgtggcagagcagggcctggccccccccactgtgttcctgaaggccctgcccatcccactgtaccacacggtgcctcccgggggcctccagccccgcgccccgctagtgacgggcagcctagatgggggcaacgtgcccttcatactcagccctgtgctgcagcctgaagggcctggccccacccaggtggggaagccggcggcccctacgctgacggtgaacatcgtgggcactctgcctgtcctgtcgccgggcctgggccccacgctgggcagcccaggcaaggtgcggaatgcgggcaagtacctgtgtccgcactgtggtcgcgactgcctgaagcccagtgttctagagaagcacatccggtcccacacgggtgagaggcccttcccgtgtgccacctgcggcatcgcctttaagacccagagcaatctctacaagcacaggcggacgcagacgcacctcaacaactcccggctgtcctcagagtccgagggcgccgggggcggcctcctggaggaaggggacaaggccggagagccccccagaccagagggcaggggcgagagcaggtgccaggggatgcacgaaggcgcctcggagagacccctttctccgggtgcccacgtgcccctacttgccaagaacctggatgtgaggaccgaagctgctccctgtccagggtccgcatttgccgacagagaggctccttgggactctgcccccatggcgtcacctgggctcccagcggccagcacacaaccctggcgtaagttgccagagcagaagtcgccgaccgccgggaagccgtgcgccctgcagcggcagcaggcgacggcagcggagaagccctgggatgccaaggcccccgagggccggctgcggaagtgtgagagcaccgactcggggtacctgtcgcgctccgacagcgcggagcagccgcatgcgccctgcagccccctgcacagcctttcggagcacagcgccgagtccgagggggagggcggcccgggcccggggccaggggtcgcaggggccgagcccggggcgcgagaagccggcctggagctggagaagaagcggctggaggagcgcatcgcccagctcatctcccacaaccaggcggtggtggacgatgcccagctggacaacgtgcggccccggaagaccgggctgtccaaacagggcagcatcgacctgcccacgccctacacctacaaggactccttccactttgacatccgcgcgctggagccaggccgtaggagggccccgggccccgtgcgctccacctggacgcccccagacaagtctcggcccctcttcttccactccgtccccactcagctctccaccaccgtggaatgtgtccccgtcaccaggagcaactcgctgcccttcgtcgagggctccaggacgtggctggagcccagggagccccgggacccctggtccaggacgcagaagcctctgagccccaggcccggcccagcccgcctgggctgccgctcgggactaagctcgactgacgttcccagtgggcatccccgggccctggtcagacaggccgcggtggaggacctgccaggcacccccattggcgatgccctggtgcccgcagaggacacagacgcaaagagaactgctgcgcgggaggccatggccggcaagggcagagcgggcggcaggaagtgcggccagagaaggctgaagatgttctcccaggagaagtggcaggtgtacggggatgagacgttcaaaaggatctaccagaaaatgaaagccagtccccatggaggcaagaaagccagggaggtgggaatgggcagtggggcagaactgggctttcctctgcagaaagaggcagcagggagctcaggcacagtccccacccaagacaggaggacccctgtccatgaggacatatccgcaggggcaacgccagagccttggggaaatccaccagccctggaggcctccttggtgactgaacccactaagcatggggagacggtggccaggagaggagacagtgaccgacccagggtggaagaggctgtgtcatcccctgcactgggtggcagagacagtccctgttcaggcagtaggagccccctggtctctccaaatgggaggctggaactggggtggcagatgcccccagcacctggccccctcaaagggggtgatgtagaggctcccaggccagtttggccggaccccaagctggaaggaggtgcccgaggtgtgggggatgttcaggagacctgcctgtgggcccagactgtcctgagatggcccagcaggggctcaggggaggacaagctcccctcagagaggaagaagctgaaagtggaggacctgcacagctggaagcaaccagagcctgtgagcgcagagaccccaggtgggcccacgcagcctgcctctttgtcatcccagaagcaggatgccgatcccggggaggtgccagggggctcaaaggagagtgccaggcaggtgggcgagcctctggagtcctctggagcctccttggctgctgcttctgttgccctgaagagggtggggccaagggacaaggctaccccactgcatcctgcagccccagcccccgcagagcacccctcgctggccaccccacctcaggctcctagagtgctctctgccctggcagataatgccttttcccccaagtacctcctcaggttacctcaggcagagacccccttaccactgcccattccctggggaccaaggcacagccaggactctctctgcagcagtgggtggcctgaagaacgggcatcatttgttgggtcaggactggggacccctctttctcccagcccagcctcaggcccctccccaggtgaggcggacagcatcctggaggaccccagctgttccaggccacaggatgggagaaaaggggcacagttggggggggacaagggggacaggatggccactagcaggccagcagccagggagttgcccatctcagcaccaggggctcccagggaggctacctcctccccgcccactccaacgtgtgaggcacacttagttcaggacatggagggtgacagccaccgtatccatcgcctctgcatgggcagcactttggcaagggccaggctctctggggatgtcctgaatccctgggtacccaactgggagctgggggagcctcctgggaatgccccagaagatccttcttcagggcccctggtgggccccgacccgtgttcccccctccagcctggctccttcctcactgccctcactcggcctcagggtgtgcccccaggctggccagagctggccttgtcttcccactcagggacgtcccggagccacagcacccgcagtccccacagcacccaaaacccctttccctcactgaaggctgagccgcggctcacgtggtgttgcctgagccgcagtgtccctctgcccgcggagcagaaggcaaaggcggcatctgtgtacttggcggtgcactttcctggtagcagcctccgagatgagggtcccaatggccctcctgggagcaatggaggatggacctggacaagccctggagaaggagggccggcgcagatgtccaagttctcctacccaacagtcccaggggtgatgccccagcaccaggtgtctgagccagaatggaagaaaggcctgccttggagggcaaagatgtctcgtgggaacagcaagcagagaaaactgaagatcaaccctaaaaggtacaaagggaatttcttgcagagctgtgttcagctgagagccagtagacttcgcacaccaacctgggtgcgaagaagaagccgccaccctcccgcacttgagggactgaagccatgcaggacccctgggcagacctcttcagaaatagcagcgaaattgcccattgggctgtgcttgatactgccacgccccatggagggcatctcagggctaaatgctggtctgtaccaccaggacaagaggatgtctcccccatgcaaaggccaggggaccatgcaactctctgctttctcgttgggccgtcctgtgacaggcacaggtgccatcgatatcacctctgtgctctccagagcttggatggaacccctgctgagacgctggcagagagctggtagcccccgctacctgggaggttctgatggtcactggtggaatccaacagaatcagccagagctctgccagttgcccccatggaggagcttaccaccagctctcttcccagcaccttaaggacagccaaatggagctgctcctggaactccccgtcagcctccctgcttagctccccaggcactggactcggcactgtgacagggaggggaactaaggtgacccctggtctcgataaatgtgctcagatgccaccgggaacgacattggcagatctgtttgcttccccgggacatctcgtgtctgtctgtctaggatgtcgacggtctgtcagtgtgagattcaaggtgcagcaatgccttgcagactccagcatggatgaccaagtatcatcatatgctcagcattataaacacatgtgcatgacagttagcacatactga

SEQ ID NO: 3758 - DNA, 1284 bp, Homo sapiens
  SIMILAR (390)..(698): 471254mologous to Mus musculus Pro-Pol-dUTPase polyprotein,accession number Y12713,Smith-Waterman Score=205.
ttaagtcacttgctcctcaacacaaccttccagggtaagtgctattttcattcccatttcatagatgaggaaataaaggcacaaacgtttaaggagcttgcccaaggctacgtcactaagagtagcagagctggcgttgagacccagctgcttgtcctcagggtctgtgtccccaccaccacaccatggttcacgcagagaacccagaacagtgctggccgcaggaggctctaggccaacgtgagcagctggacgtccttctgtgatgaaggtgatatcaccccattctccgatggtcagttcacttcctaccgaaagcactggcatagctctttgaaatccatgtacagggctttggaaatagccactcataatctgaacatttcttcgattgcctgagtgttcgttccaccttgcatgtaactgccacaactggaatctgagtaagtcacctggaggcccaaaaataaccctcctggacctgctgacaccagtgtcagtgtgcactgcccatgttcccccatcattctgaagcagatggattgatagaatagtggaatggccttttgaagtcacaattacagtgcccaccaggtggcaatattttgtagggatagggcaaagttctccaggaatctgtatatgctcagaatcggcatctaatatatggtactgtttctcccatatccaggactcataggcccctttgttcgcagagcactcaggactcttgtttgttagtggcaaatccaagtcaaatatgcttggttcatattccctttccctgagtccagcattcactgggactgtgaataagctgggactggacaggggaggtgggaccttttttatgagaacctcagagatgagagccagctcatgggggatgcagtgttgaccaagttgtttgtcaggtaatgtgtcgatttcagacaaagaagaatcagacctgattcctgtcctcaaggacccttcggcctgaggtgtcgatgcatccttcatctcccatccagtgaccttgatcacctttgctttgttcagctgctttccagcggtcacttcctgcttggagttagggctatagctgttggcaactggggtgtgtagaaaaccagaaagcgaagaactgtggcaatttctggtttcaaagaaggcatctaaagaattcctgatgcttgttttgttgggttcttttgctccaatgaacttctggttgaagtccaatggtttctgtggcaaagagcctctcagcactgtgctgcccagcagggctgtatgcaacat

SEQ ID NO: 3759 - DNA, 1881 bp, Homo sapiens
  SIMILAR (1534)..(1701): 281254mologous to Mus musculus Pro-Pol-dUTPase polyprotein,accession number Y12713,Smith-Waterman Score=42.
tcaagaccctggggatctggtaatggcagtggcagtggcagaacaatcttcttggttttgggctatgcacactggtgttggcaatagcttctgtgggcttgatgggcctatctccaggcccgctgatgttgcgtgcatgtaagtgtcagggtgctttttcaaggcccacccatggccacccatggaccaatcagcatgtacttcctcccttctgaagcccatagaaacgccagactcagttagacttgagtagacatagggataaccttcctgcggagaggatctacccactgggggtttcctctttgctgagagctgtacactcagacaggatgacttgccactactcgccatgttgcgggaaacaagaaagagagcagaactgcagctcttctgggagcccagacctagtggttccctgcatgagggctgtgacaccttctttggcatctccaagcttctgcgtgacactgcattcgccttgtccagacgcagttgcccaaagcagcagttgcccaaagcagcagccacgtgcatctggtccagctggcacaggtgccagctcccagggctccttgcccctctgctctgaacaccagggacctggcggtacaaatttattttatgttcgtaggggtttccgtggtagaaccaagggagcaggcctcccgtgtactcaggtaatctaatggcacagaaccaggcttttggtactccattcacctgttcaacaaccacatcctgggccccttcaatgacccaggcaccatgctccaccttgaagagtcctttgttcgcagagcactcaggactcttgtttgttagtggcaaatccaagtcaaatatgcttggttcatattccctttccctgagtccagcattcactgggactgtgaataagctgggactggacaggggaggtgggaccttttttatgagaacctcagagatgagagccagctcatgggggatgcagtgttgaccaagttgtttgtcaggtaatgtgtcgatttcagacaaagaagaatcagacctgattcctgtcttcaaggacccttcggcctgaggtgtcgatgcatccttcatctcccatccagtgaccttgatcacctttgctttgttcagctgctttccagcggtcacttcctgcttggagttagggctatagctcgagcacccggccacagtcattttctgcttctcttgggagacttttgacccacaggggttctgcttttctctgccaaaagtatctggtacctgcctcatctctctgctgctgcatgcgtttcctttcgttgtaacctctgccccctgcccccaggagtttccccactcaccccacttatgtttccatgttcccccatcattctgaagcagatggattgatagaatagtggaatggccttttgaagtcacaattacagtgcccaccaggtggcaatattttgtagggatagggcaaagttctccaggaatctgtatatgctcagaatcggcatctaatatatggtactgtttctcccatatccaggactcataggccaccaggtcacacatggacagcctgtgaagacgactctttatagagtccatcaatgggaagttgggggatagccctggtgttacccccgcttgtacctgctcctctctggttgaagcctgaccctcccacttgccttcctcctccgcacccatccgcttctcactacagtccagcgaagggcagagcttcctttcacatcctggatttgtttcctgagcctctttgagcgagggaagggtccgggacagcccttggtcacctggactgaatgccaagccctcaccctgttgccatccccaggctcccacacgcagggaacttggcgcatccctcat

SEQ ID NO: 3760 - DNA, 1324 bp, Homo sapiens
  SIMILAR (35)..(1294): 941254mologous to Homo sapiens dJ492J12.1 (novel protein similar to zinc finger protein human immunodeficiency virus type I enhancer-binding protein 1 (HIVEP1)),accession number AL121919,Smith-Waterman Score=2129.
cccaggcaaggtgcggaatgcgggcaagtacctgtgtccgcactgtggtcgcgactgcctgaagcccagtgttctagagaagcacatccggtcccacacggagtccgagggcgccgggggcggcctcctggaggaaggggacaaggccggagagccccccagaccagagggcaggggcgagagcaggtgccaggggatgcacgaaggcgcctcggagagacccctttctccgggtgcccacgtgcccctacttgccaagaacctggatgtgaggaccgaagctgctccctgtccagggtccgcatttgccgacagagaggctccttgggactctgcccccatggcgtcacctgggctcccagcggccagcacacaaccctggcgtaagttgccagagcagaagtcgccgaccgccgggaagccgtgcgccctgcagcggcagcaggcgacggcagccgagaagccctgggatgccaaggcccccgagggccggctgcggaagtgtgagagcaccgactcggggtacctgtcgcgctccgacagcgcggagcagccgcatgcgccctgcagccccctgcacagcctttcggagcacagcgccgagtccgagggggagggcggcccgggcccggggccaggggtcgcaggggccgagcccggggcgcgagaagccggcctggagctggagaagaagcggctggaggagcgcatcgcccagctcatctcccacaaccaggcggtggtggacgatgcccagctggacaacgtgcggccccggaagaccgggctgtccaaacagggcagcatcgacctgcccacgccctacacctacaaggactccttccactttgacatccgcgcgctggagccaggccgtaggagggccccgggccccgtgcgctccacctggacgcccccagacaagtctcggcccctcttcttccactccgtccccactcagctctccaccaccgtggaatgtgtccccgtcaccaggagcaactcgctgcccttcgtcgagggctccaggacgtggctggagcccagggagccccgggacccctggtccaggacgcagaagcctctgagccccaggcccggcccagcccgcctgggctgccgctcgggactaagctcgactgacgttcccagtgggcatccccgggccctggtcagacaggccgcggtggaggacctgccaggcacccccattggcgatgccctggtgcccgcagaggacacagacgcaaagagaactgctgcgcgggaggccatggccggcaagggcagagcggcggcaggaagtgcggccagagaaggctga

SEQ ID NO: 3761 - DNA, 1263 bp, Homo sapiens
  SIMILAR (889)..(1143): 981254mologous to Homo sapiens prepro-endothelin 3,accession number X52001,Smith-Waterman Score=469.
atgacaaccaatccaacaactctgcaaagacaggaagaaccaaggaatgaaactctcatgaaagcatgtgcagcaagactcttcaaggtggagcatggtgcctgggtcattgaaggggcccaggatgtggttgttgaacaggtgaatggagtaccaaaagcctggttctgtgccattagattacctgagtacacgggaggggcaacagaagcagcagccaaggaggctccagaggactccagaggctcgcccacctgcctggcactctcctttgagccccctggcacctccccgggatcggcatcctgcttctgggatgacaaagaggcaggctgcagaaggcataaagagaagcagaggcagagatgggacgagcagggagaatgctcctgcctcatcggagccaccggttttcgggagagagcggcagcccccacctgcctgtggactgagcacttaaagagccaaatcctgtggaactggacccggagagaacaggaaggagtcaacaagatcttaagcctgctccagaccccttgcctgacttttgagaaggctcaggaaacaaatccaggatgtgaaaggaagctctgcccttcgctggactgtagtgagaagcggatgggtgcggaggaggaaggcaagtgggagggtcaggcttcaaccagagaggagcagtacagccttcctgatcttcctaaaattgcacaggatgagaaggattttctgtttcctaagcaagtcggctccattggggtgggggcaggctccctcagggtccagatcacctttgtcagcttcacaaagtcatggtatcaagggcctgtgttctctccaggtctgtgtagctctgtgttgggtgggccattgccaggcccctgtgtggaacccacagccagatctgagggggactgtgaagagactgtggctggccctggcgaggagactgtggctggccctggcgaggggactgtggccccgacagcactgcagggtccaagccctggaagccctgggcaggagcaggcggccgagggggcccctgagcaccaccgatccaggcgctgcacgtgcttcacctacaaggacaaggagtgtgtctactattgccacctggacatcatttggatcaacactcccgagtctcttctgcaggtcaggggtgtgacccacatcccccctgagggcctggcccaagagaaactcaatcctgagtttgatcctgtggaaggaggagccctccctctgaatgaagtgaactga

SEQ ID NO: 3762 - DNA, 5592 bp, Homo sapiens
  SIMILAR (427)..(3423): 761254mologous to Homo sapiens dJ492J12.1 (novel protein similar to zinc finger protein human immunodeficiency virus type I enhancer-binding protein 1 (HIVEP1)),accession number AL121919,Smith-Waterman Score=3833.
atggccccaagatccctgagaatggaagatgccatagaatccttagcagtggtgagctctgagtatgtaggagctggtgtgaactggatgtttcttccccccagctccaaatctacatgtaaaatcctcactccccatgtgatggtattaggagagcagggcctggccccccccactgtgttcctgaaggccctgcccatcccactgtaccacacggtgcctcccgggggcctccagccccgcgccccgctagtgacgggcagcctagatgggggcaacgtgcccttcatactcagccctgtgctgcagcctgaagggcctggccccacccaggtggggaagccggcggcccctacgctgacggtgaacatcgtgggcactctgcctgtcctgtcgccgggcctgggccccacgctgggcagcccaggcaaggtgcggaatgcgggcaagtacctgtgtccgcactgtggtcgcgactgcctgaagcccagtgttctagagaagcacatccggtcccacacgggtgagaggcccttcccgtgtgccacctgcggcatcgcctttaagacccagagcaatctctacaagcacaggcggacgcagacgcacctcaacaactcccggctgtcctcagagtccgagggcgccgggggcggcctcctggaggaaggggacaaggccggagagccccccagaccagagggcaggggcgagagcaggtgccaggggatgcacgaaggcgcctcggagagacccctttctccgggtgcccacgtgcccctacttgccaagaacctggatgtgaggaccgaagctgctccctgtccagggtccgcatttgccgacagagaggctccttgggactctgcccccatggcgtcacctgggctcccagcggccagcacacaaccctggcgtaagttgccagagcagaagtcgccgaccgccgggaagccgtgcgccctgcagcggcagcaggcgacggcagccgagaagccctgggatgccaaggcccccgagggccggctgcggaagtgtgagagcaccgactcggggtacctgtcgcgctccgacagcgcggagcagccgcatgcgccctgcagccccctgcacagcctttcggagcacagcgccgagtccgagggggagggcggcccgggcccggggccaggggtcgcaggggccgagcccggggcgcgagaagccggcctggagctggagaagaagcggctggaggagcgcatcgcccagctcatctcccacaaccaggcggtggtggacgatgcccagctggacaacgtgcggccccggaagaccgggctgtccaaacagggcagcatcgacctgcccacgccctacacctacaaggactccttccactttgacatccgcgcgctggagccaggccgtaggagggccccgggccccgtgcgctccacctggacgcccccagacaagtctcggcccctcttcttccactccgtccccactcagctctccaccaccgtggaatgtgtccccgtcaccaggagcaactcgctgcccttcgtcgagggctccaggacgtggctggagcccagggagccccgggacccctggtccaggacgcagaagcctctgagccccaggcccggcccagcccgcctgggctgccgctcgggactaagctcgactgacgttcccagtgggcatccccgggccctggtcagacaggccgcggtggaggacctgccaggcacccccattggcgatgccctggtgcccgcagaggacacagacgcaaagagaactgctgcgcgggaggccatggccggcaagggcagagcgggcggcaggaagtgcggccagagaaggctgaagatgttctcccaggagaagtggcaggtgtacggggatgagacgttcaaaaggatctaccagaaaatgaaagccagtccccatggaggcaagaaagccagggaggtgggaatgggcagtggggcagaactgggctttcctctgcagaaagaggcagcagggagctcaggcacagtccccacccaagacaggaggacccctgtccatgaggacatatccgcaggggcaacgccagagccttggggaaatccaccagccctggaggcctccttggtgactgaacccactaagcatggggagacggtggccaggagaggagacagtgaccgacccagggtggaagaggctgtgtcatcccctgcactgggtggcagagacagtccctgttcaggcagtaggagccccctggtctctccaaatgggaggctggaactggggtggcagatgcccccagcacctggccccctcaaagggggtgatgtagaggcccccaggccagtttggccggaccccaagctggaaggaggtgcccgaggtgtgggggatgttcaggagacctgcctgtgggcccagactgtcctgagatggcccagcaggggctcaggggaggacaagctcccctcagagaggaagaagctgaaagtggaggacctgcacagctggaagcaaccagagcctgtgagcgcagagaccccacgtggggcccacgcagcctgcctctttgtcatcccagaagcaggatgccgatcccggggaggtgccagggggctcaaaggagagtgccaggcaggtgaggcggacagcatcctggaggaccccagctgttccaggccacaggatgggagaaaaggggcacagttggggggggacaagggggacaggatggccactagcaggccagcagccagggagttgcccatctcagcaccaggggctcccagggaggctacctcctccccgcccactccaacgtgtgaggcacacttagttcaggacatggagggtgacagccaccgtatccatcgcctctgcatgggcagcactttggcaagggccaggctctctggggatgtcctgaatccctgggtacccaactgggagctgggggagcctcctgggaatgccccagaagatccttcttcagggcccctggtgggccccgacccgtgttcccccctccagcctggctccttcctcactgccctcactcggcctcagggtgtgcccccaggctggccagagctggccttgtcttcccactcagggacgtcccggagccacagcacccgcagtccccacagcacccaaaacccctttccctcactgaaggctgagccgcggctcacgtggtgttgcctgagccgcagtgtccctctgcccgcggagcagaaggcaaaggcggcatctgtgtacttggcggtgcactttcctggtagcagcctccgagatgagggtcccaatggccctcctgggagcaatggaggatggacctggacaagccctggagaaggagggccggcgcagatgtccaagttctcctacccaacagtcccaggggtgatgccccagcaccaggtgtctgagccagaatggaagaaaggcctgccttggagggcaaagatgtctcgtgggaacagcaagcagagaaaactgaagatcaaccctaaaaggtacaaagggaatttcttgcagagctgtgttcagctgagagccagtagacttcgcacaccaacctgggtgcgaagaagaagccgccaccctcccgcacttgagggactgaagccatgcaggacccctgggcagacctcttcagaaatagcagcgaaattgcccattgggctgtgcttgatactgccacgccccatggagggcatctcagggctaaatgctggtctgtaccaccaggacaagaggatgtctcccccatgcaaaggccaggggaccatgcaactctctgctttctcgttgggccgtcctgtgacaggcacaggtgccatcgatatcacctctgtgctctccagagcttggatggaacccctgctgagacgctggcagagagctggtagcccccgctacctgggaggttctgatggtcactggtggaatccaacagaatcagccagagctctgccagttgcccccatggaggagcttaccaccagctgtcttcccagcaccttaaggacagccaaatggagctgctcctggaactccccgtcagcctccctgcttagctccccaggcactggactcggcactgtgacagggaggggaactaagaagcacatccggtcccacacgggtgagaggcccttcccgtgtgccacctgcggcatcgcctttaagacccagagcaatctctacaagcacaggcggacgcagacgcacctcaacaactcccggctgtcctcagagtccgagggcgccgggggcggcctcctggaggaaggggacaaggccggagagccccccagaccagagggcaggggcgagagcaggtgccaggggatgcacgaaggcgcctcggagagacccctttctccgggtgcccacgtgcccctacttgccaagaacctggatgtgaggaccgaagctgctccctgtccagggtccgcatttgccgacagagaggctccttgggactctgcccccatggcgtcacctgggctcccagcggccagcacacaaccctggcgtaagttgccagagcagaagtcgccgaccgccgggaagccgtgcgccctgcagcggcagcaggcgacggcagcggagaagccctgggatgccaaggcccccgagggccggctgcggaagtgtgagagcaccgactcggggtacctgtcgcgctccgacagcgcggagcagccgcatgcgccctgcagccccctgcacagcctttcggagcacagcgccgagtccgagggggagggcggcccgggcccggggccaggggtcgcaggggccgagcccggggcgcgagaagccggcctggagctggagaagaagcggctggaggagcgcatcgcccagctcatctcccacaaccaggcggtggtggacgatgcccagctggacaacgtgcggccccggaagaccgggctgtccaaacagggcagcatcgacctgcccacgccctacacctacaaggactccttccactttgacatccgcgcgctggagccaggccgtaggagggccccgggccccgtgcgctccacctggacgcccccagacaagtctcggcccctcttcttccactccgtccccactcagctctccaccaccgtggaatgtgtccccgaaggtgttagtcagctgtcatcttgccagcagggatcagctgttactcaaaggcgtcaatttcgcagtgatcacagaacaggctgcagagagcacaaaatgatcatcgtggcaggacaaggcatgacagcacctgcattggaatatagactgtgctttggagcctttggcatcagcttccacctgctgcatgaggtagttttgtttgaaagaatagtcaatgcagactgcagttttccgaatgaggcttgctcttggcaaaaggaccccgaaggtgcaattccaattccacaggcccaggacatggttttttcttccacggcagagaagtcccaggtgggtgagagctctgaagagccaggacaagctacaaagtcccagtgcggagtgaccacggaaaccctgggtcaaggtaatatggccatccacttctag

SEQ ID NO: 3763 - DNA, 339 bp, Homo sapiens
  SIMILAR (70)..(279): 1001254mologous to Homo sapiens ribosmal protein small subunit,accession number L13802,Smith-Waterman Score=356.
gcacgagatggcggttggcaagaacaagcgccttacgaaaggcggcaaaaagggagccaagaagaaagtacaatgattgaagctcacgttgatgtcaagactaccgatgggtacttgcttcgtctgttctgtgttggttttactaaaaaacgcaacaatcagatacggaagacctcttatgctcagcaccaacaggtccgccaaatccggaagaagatgatggaaatcatgacccgagaggtgcagacaaatgacttgaaagaagtggtcaataaattgtaagtgtttctttgcttcctcacacaacacaaccttgagtatttgaatattcctgagatg

SEQ ID NO: 3764 - DNA, 517 bp, Homo sapiens
  SIMILAR (2)..(316): 801254mologous to Homo sapiens ribosmal protein small subunit,accession number L13802,Smith-Waterman Score=434.
caagggtcttgcttttgaagtgagccttgctgatttgcagaatgatgaagttgcatttagaaaattcaagctgattactgaagatgttcagggcaaaaactgcctgactaacttctatggcatgggtcttacctgtgacaaaatatgttccatggttgaaaaatgttcaacaatgactgaagctcatgttgatgtcaagactaccgatggttatttctttcatctgttttgtgttggttttactaaaaaacacaacaatcagatactgaagacctcttatgctcagcaccaacagtcccccaaatccagaagaagatgatggaaatcatgacctgagaggtgcagacaaatgacttgaaagaagtggtcaataaattgattccagacaacattggaaaagatacagaaaaggttttccaatttatcctctccatgatgtcttcattagaaaagtaaaaatgctggagaaccctgggtttgaaaggcatggagcttcgtggtggaggtagtagttctg

SEQ ID NO: 3765 - DNA, 766 bp, Homo sapiens
  SIMILAR (563)..(601): 921254mologous to Homo sapiens bA486O22.3 (similar to RPS3A (ribosomal protein S3A)),accession number AL356115,Smith-Waterman Score=60.
cggccgcgtcgacctgaccagcaccatggcggttggcatgtaacaagcgccttacgaaaggcggcaaaaagggagccaagaagaaagggggtgaatcccttttctaaaaaagaatggtatggatggtgaaagcacctgctatgttcaatataagaaatattggaaagacgctcgtcaccaggacccaaggaaccaaaattgcatctgatggtctcaagggtcgtgtgtttgaagtgagtcttgctgatttgcagaatgatgaagttgcatttaggaaaattcaagctgattacttgaagatgttcagggtaaaaactgcctgactaacttccatggcatggatcttacccggtgacaaaatgtgttccatggtcaaaaaaatggcagacaatgattgaagctcacgttgatgtcaagactacccgatggttacttgcttcgtctgttctgtgttggctttactaaaaaacgcaacaatcagatacggaagacctcttatgctcagcaccaacaaggtccgccaaatccggaagaagatgatggaaatcatgaacccgagaggttgcagacaaatgacttgaaagaagtggtcaataaattgtaagtgtttctttgcttcctcacgcaacacaaccttgagtattggattattcctgagatgagagaacgcatatgagacaaggtaaaggtctgtggaaatcctgtctgtgaatccttctagctatatctctttaagtgaaagagtgttaagtactcagtaaatatg

SEQ ID NO: 3766 - DNA, 1173 bp, Homo sapiens
  SIMILAR (706)..(1170): 841254mologous to Homo sapiens p40,accession number U93572,Smith-Waterman Score=655.
atgttcacagcagcattattcacaatagccaaaagatgggaacaacgcaagtgtccactgacagtccttgcgctcatcacaggagtggcatttgacctggacacccctcctctttcacttctggcccccaggcaaatgtgcaagctcctgcccgtgcctctcatgggcaagcaaaagggtgagggagcctgggtggagcactcggcaagggtcagtcctcagggatgcacgcccttgatgcatgcggtttctggacgtcaagcggacacagtgaagctgctgttgaagatgggagccaatattaacatgcaggatgcttatggccgcacaagtttatgcctggccacctacctgggctggcttgaaggctgtgtgagtctactcagaaacggtgccaagcacaatatcccagataaaaatggccgcctgccactgcatgctgccactgctgagcccgatatgaggctcctcacggtcctgttgcaacagtcgaacatcagcgagattaatcaccaggacaatgaggtgagccacactctcaagcaacaagtggtcattttgcatcctccgctggtgatacccaggcaaacagagtctggagtggacctccagcaaacaccaacagacctgcagctgagggtcatgactgttagaaggaaaactaagaaacagaaaggacatccacaccaaaaccccatctgtatgtcaccatcatcaaagaccaaagaaagggtatcagtgattgaagatcaaatgaatgaaatgaagccagaagagaagtttagagaaaaaagagtaaaaagaaatgaacaaagcctccaagaaatatgggactatgtgaaaagaccaaatctacgtctgattggtgtacctgaaagtgacggggagaatggaaccaagttggaaaacactcttcaggatattatccaggagaacgtccccaacctaggaaggcaggccaacattcaaattcaggaaatacagagaatgccacaaagatactcctcaagaagaccaactccaagacacataattgtcagattcaccaaagttgaaatgaaggaaaaaatgttaagggcagccagagagaaaggtcgggttacccacaaagggaagcccatcaaaccaatagatgatctcttggcagaaactctacaagccagaagagagtga

SEQ ID NO: 3767 - DNA, 1329 bp, Homo sapiens
  SIMILAR (111)..(632): 311254mologous to Homo sapiens splicing coactivator subunit SRm300,accession number AF201422,Smith-Waterman Score=150.
atggaagaacaggagtggagaagaataaggaaaaggaaagagctcacccagcgtgtggtcacagtttatgggttcctaagctggcacacaaaatatgaaacaagaaataaagaaatagaaggagagaaagacacaaagaaagagaggggggaggaacgggagggacggactggtgacgacgaggaaacagaaggaagcgaacacaacgcggacgggacgacgagcggaggggacgcgacgacgaccagaaccacaccacgaacacgcgacgagaaacgaccaaaacgaaacggacaacgaaccgcacacaacagaaacgagaacagaaacgaaacgaaacgagcaaacgaaacgaaacgaaacgagcaacagaacagaacagacgagaacggacagggacacggagcggacgatcagcgaagcgacagcgaactgaaccggaacgcgaacgggcagcgcgacgggcacgggcaaagcgcacggcatcagctgcacgagatcgtggactcagcagcactttccagctacctacgcggagcggcaacagcgtccatacatctaagaaacccttgtccagaaaatacgaacaagacccttgggctgacagtgttccgaaggcgtttggaagccggtgccgaggcgtttggaagccaaagttatgcgagaatcgcaaggctcctcacggtcctgttgcaacagtcgaacatcagcgagattaatcaccaggacaatgaggtgagccacactctcaagcaacaagtggtcattttgcatgcctgccggcaggtgcctaacagtgacctcgccgtgctgcactccctgcgcgttggtcacaagaaagatgctggttaccttgggcctgtagagcaggtcccgggaattgaccacatgaggcacatttgtgcgtggaaagcaaaagcagtgtgttttcggctgcctggggacctgggcaccaggcacagtgctcagagcagccatcccgaggcagatttcaccgtgcacagcctatggcataagagccatgctgcaagagccgccacccccgggccaccccactacacccgcggccctcacgaccaaaaagcccaaccacacccccccccacgcgccaaaacgccaacaacaaaggccacaacacaacgcacaccaaaccaagggccccaccggagccgcaaacaacacaacacgagcacacaccccaacccccgccagacagccacgcgcaagacaacaataacaaaaacaccccacaacaacccccaaccaagaacgcagaacgaccaccacgccccacagcccacccaccacccgcccacaaaccgttgctag

SEQ ID NO: 3768 - DNA, 585 bp, Homo sapiens
  SIMILAR (393)..(584): 1001254mologous to Homo sapiens Peptide QQ3351-BF04 comprising a full length protein kinase,accession number Y69159,Smith-Waterman Score=344.
cgaattcccgggtcgacgatttcgtgcggctccagggagccagggcaccgtgagcctggtggttggcagctggatccacgtcggagggggaagtgtcgcagcattctctgcaggcatcacagacctgaggcagtggcctccggagggcactggacagaaacagccatccaagtggctgagtggagggaccctgctcaagtgcagctgcagtggccggggtttccctcaggtagggatcggggcgccttgtcgccgccagccacgtgtggcgtccggtacagtcagcagagtgcagggtgcgggcaccaggaaagggggcgcaggggaactcccgcgggcctcgcgtttgcaaacttctcgcctgggcaggaggcggtcgtgggaaagaaggtggaagagcgagctttttggaactgtgcacgggacagattggacgcacacccctcgggaggcgcgaaggcatggaaaatttgaagcatattatcacccttggccaggtcatccacaaacggtgtgaagagatgaaatactgcaagaaacagtgccggcgcctgggccaccgcgtcctcggcctgatcaagcctc

SEQ ID NO: 3769 - DNA, 1102 bp, Homo sapiens
  SIMILAR (370)..(960): 761254mologous to Homo sapiens Peptide QQ3351-BF04 comprising a full length protein kinase,accession number Y69159,Smith- Waterman Score=740.
atgcaagccaagcagatgctggctttggcaaaagtccttggacaaaagcaggaacatagaggtagggatcggggcgccttgtcgccgccagccacgtgtggcgtccggtacagtcagcagagtgcagggtgcgggcaccaggaaagggggcgcaggggaactcccgcgggcctcgcgtttgcaaacttctcgcctgggcaggaggcggtcgtgggaaagaaggtggaagagcgagctttttggaactgtgcacgggacagattggacgcacacccctcgggaggcgcgaagggccgcttcaccccacgcatccagccaaccaagggagagtgtgaggaggcggcacagctgccccagtccgaagtagagcaggtcatccacaaacggtgtgaagagatgaaatactgcaagaaacagtgccggcgcctgggccaccgcgtcctcggcctgatcaagcctctggagatgctccaggaccaaggaaagaggagcgtgccctctgagaagttaaccacagccatgaaccgcttcaaggctgccctggaggaggctaatggggagatagaaaagttcagcaatagatccaatatctgcaggtttctaacagcaagccaggacaaaatactcttcaaggacgtgaacaggaagctgagtgatgtctggaaggagctctcgctgttacttcaggttgagcaacgcatgcctgtttcacccataagccaaggagcgtcctgggcacaggaagatcagcaggatgcagacgaagacaggcgagctttccagatgctaagaagaggcaagctgggtctttggtcagatttaccaccaaaatgcatgcaggagatcccgcaagagcaaatcaaggagatcaagaaggagcagctttcaggatccccgtggattctgctaagggaaaatgaagtcagcacactttataaaggagaataccacagagctccagtggccataaaagtattcaaaaaactccaggctggcagcattgcaatagtgaggcagactttcaataaggagatcaaaaccatgaagaaattcgaatctcccaacatcctgcgtatatttgggatttgcattgatgaaacag

SEQ ID NO: 3770 - DNA, 1547 bp, Homo sapiens
  SIMILAR (62)..(1405): 1001254mologous to Homo sapiens MAP kinase kinase MEK5b,accession number U71087,Smith-Waterman Score=2336.
cctcctaaccagcggccagtgggtttcccataccccaggatgtgagcctctttaacctgtaatgctgtggctagcccttggcccctttcctgccatggagaaccaggtgctggtaattcgcatcaagatcccaaatagtggcgcggtggactggacagtgcactccgggccgcagttactcttcagggatgtgctggatgtgataggccaggttctgcctgaagcaacaactacagcatttgaatatgaagatgaagatggtgatcgaattacagtgagaagtgatgaggaaatgaaggcaatgctgtcatattattattccacagtaatggaacagcaagtaaatggacagttaatagagcctctgcagatatttccaagagcctgcaagcctcctggggaacggaacatacatggcctgaaggtgaatactcgggccggaccctctcaacacagcagcccagcagtctcagattcacttccaagcaatagcttaaagaagtcttctgctgaactgaaaaaaatactagccaatggccagatgaatgaacaagacatacgatatcgggacactcttggtcatggcaacggaggcacagtctacaaagcatatcatgtcccgagtgggaaaatattagctgtaaaggtcatactactagatattacactggaacttcagaagcaaattatgtctgaattggaaattctttataagtgcgattcatcatatatcattggattttatggagcattttttgtagaaaacaggatttcaatatgtacagaattcatggatgggggatctttggatgtatataggaaaatgccagaacatgtccttggaagaattgcagtagcagttgttaaaggccttacttatttgtggagtttaaagattttacatagagacgtgaagccctccaatatgctagtaaacacaagaggacaggttaagctgtgtgattttggagttagcactcagctggtgaattctatagccaagacgtatgttggaacaaatgcttatatggcgcctgaaaggatttcaggggagcagtatggaattcattctgatgtctggagcttaggaatctcttttatggagcttgctcttgggaggtttccatatcctcagattcagaaaaaccagggatctttaatgcctctccagcttctgcagtgcattgttgatgaggattcgcccgtccttccagttggagagttctcggagccatttgtacatttcatcactcagtgtatgcgaaaacagccaaaagaaaggccagcacctgaagaattgatgggccacccgttcatcgtgcagttcaatgatggaaatgccgccgtggtgtccatgtgggtgtgccgggcgctggaggagaggcggagccagcaggggcccccgtgaggctgccgcagggcactgaaagcccaggaccagtaaccaaggagaacaacccacccgtcgcccttctccgtatgctgcctgcgccagaagagctttgctgggccctggcttccctgccctcgccttcaccctctgtcag

SEQ ID NO: 3771 - DNA, 1134 bp, Homo sapiens
  SIMILAR (24)..(497): 271254mologous to Homo sapiens pre-mRNA splicing factor,accession number L14076,Smith-Waterman Score=129.
atgaatgaacaagacatacgatatcgggacactcttggtcatggcaacggaggcacagtctacaagctgggcgcggctgagcactggagcccgggagaagcaggagtaggcggggacacccaaggcggaagggccaggggaagaaccgggctcgaagcgaccaccaacccccaaagccaagaaccccacccaacacaaccgcccaagaagcgagggcgacagagccaaaccagcgaggccgagctaaggaaagggattgcggaagtggaggaggaggaaggtcccacgtggtggagcaggccgaacaggaagccagggggcaagagaccagccagcgcggcagccaaaggggggagaaacaagcggaaatcgcgccagcgaaaagtagaccacgaagtggaagaactgcaaaaagagagacagagaggggcgcaggggagggaaaaaacaaccgaggaacggcaaagaggccgaaaaggaagtggagagccagagccgctgtgtggaaaacccccggaagggaaaccccgggggggcccacgggccctttttatgcccccttttagctctcccacttgcggcctcttcgggtcccaactcaacttttctgtggctcgacaaaacccccacgggttccaaaaatgggccgttacaagtggggtagggaagcacctcacactcaccatcgacacatccctctccacccacagctctctcaacactgtttacctcatccctcaactttcacccacatcaacaccctctattcaaactcaccctctagactatgactctcaacgcgctccactctctcctcacactattgctctacatgctctcacttattatacttgcttgccatctcacatcgcagcgctcacactctcaacactatcccaccgctacatcccagcatctcgcacacagactcaattctactcttctacacaatctctacatccacctactcaacacactactccctatcctcgactactctgcgactcgcagacacgtctgctactacttaccagtacgtgctaccgacacttcacagatcatacgcactcttactaccgcacacaccatctgcagccagctcaaacttctaccaagcaatctcgacactcataa

SEQ ID NO: 3772 - DNA, 2084 bp, Homo sapiens
  SIMILAR (841)..(1611): 961254mologous to Homo sapiens MAP kinase kinase MEK5c,accession number U71088,Smith-Waterman Score=1270.
agcgttcgctcaactccagaaccttccgacctccgctagttcctgcgggcctttgcccgcttcccggtgcaccctccccgggagacacctcagacccccgacagcctgggcaggctcggtgcctgcgggtgcgttcctgatcacccctcccctcttccctccccctcatcctccattcccttgttttcaccctctgtcctctgcccgtcactccccttgtcacctcttggagccccctcctaaccagcggccagtgggtttcccataccccaggatgtgagcctctttaacctgtaatgctgtggctagcccttggcccctttcctgccatggagaaccaggtgctggtaattcgcatcaagatcccaaatagtggcgcggtggactggacagtgcactccgggccgcagttactcttcagggatgtgctggatgtgataggccaggttctgcctgaagcaacaactacagcatttgaatatgaagatgaagatggtgatcgaattacagtgagaagtgatgaggaaatgaaggcaatgctgtcatattattattccacagtaatggaacagcaagtaaatggacagttaatagagcctctgcagatatttccaagagcctgcaagcctcctggggaacggaacatacatggcctgaaggtgaatactcgggccggaccctctcaacacagcagcccagcagtctcagattcacttccaagcaatagcttaaagaagtcttctgctgaactgaaaaaaatactagccaatggccagatgaatgaacaagacatacgatatcgggacactcttggtcatggcaacggaggcacagtctacaaagcatatctatgtcccgagtgggaaaatattatctgtaaaggtcatactactagatattacactggaacttcagaagcaaattatgtctgaattggaaattctttataagtgcgattcatcatatatcattggattttatggagcattttttggagaaaacaggatttcaatatggacagaattcatggatgggggatctttggatgtatataggaaaatgccagaacatgtccttggaagaattgcagtagcagttgttaaaggccttacttatttgtggagtttaaagattttacatagagacgtgaagccctccaatatgctagtaaacacaagaggacaggttaagctgtgtgattttggagttagcactcagctggtgaattctatagccaagacgtatgttggaacaaatgcttatatggcgcctgaaaggatttcaggggagcagtatggaattcattctgatgtctggagcttaggaatctcttttatggagattcagaaaaaccagggatctttaatgcctctccagcttctgcagtgcattgttgatgaggattcgcccgtccttccagttggagagttctcggagccatttgtacatttcatcactcagtgtatgcgaaaacagccaaaagaaaggccagcacctgaagaattgatgggccacccgttcatcgtgcagttcaatgatggaaatgccgccgtggtgtccatgtgggtgtgccgggcgctggaggagaggcggagccagcaggggcccccgtgaggctgccgcagggcactgaaagcccaggaccagtaaccaaggagaacaacccacccgtcgcccttctccgtatgctgcctgcgccagaagagctttgctgggccctggcttccctgccctcgccttcacctctgtcagcaggtggccttgcctggggagccccatgtgtggcccaccccaccaggccatccccataccttctggtttgaaggcgctgacactggcagagaggtaaagggtggggcattgagaatggaggctcccagggtccctgcccacttctgttttcctaatgtttttctctataaagggtcaggcccgtcagcatcactgatgggaataaaagtattaatgctttgtgacagcctctgcctgaaaactggacagaaggacccagaggtgttctttcattttctctcttacctccaatctttcccctttcaagctacaggtaaaggctctaccaccat

SEQ ID NO: 3773 - DNA, 466 bp, Homo sapiens
  SIMILAR (189)..(404): 881254mologous to Homo sapiens unnamed protein product,accession number AK022917,Smith-Waterman Score=360.
  misc_feature (1)...(466): n = a,t,c or g
ggctgaagaaaatcgaccgcccactcttcaaggatttctggcagagattccttgacagtttaaaagccttggcagtcaagcaacaacgaactgtctacagactgacgctcgtgaaagcatggaacgtggacgagctccaggcctacgcgcagctcgtgtccctggggaatcctgacttcatcgaagtgaagtttaaaattggtggtgaatggtggacatggatcgattataaccgcttccaggagctcatccaggaatatgaagatagtggtggatcaaaaacgttcagcgcaaaggattatatggccagaactcctcactgggcattatttggtgccagtgaaagaggctttgatcccaaggacacaagacattcagaggaaaggaacaaattcaaagggcttattttctgggtgtttgagatttatctgatttttcaangtactgaagggncaaaaacttagga

SEQ ID NO: 3774 - DNA, 810 bp, Homo sapiens
  SIMILAR (166)..(579): 711254mologous to Homo sapiens unnamed protein product,accession number AK022917,Smith-Waterman Score=457.
gctcgacctgtgaatgttagtgtataaaaattttgtagacaaatatttttgtttctcttggacaaacactgtgaggaattgctggatttgtaaacatccatttggacagtttgtcttttttaactggagtaccgggcgtcaaagcagaacgctttgatataaagaatgacggcaaagcactgtgcattgtccctcgtgggagaaccaataatgtacccagagatcaacaggtttttgaagctactccaccagtgtaaaatttccagcttcctggtcacaaacgcacaatttcctgcggaaatcaggaacctcgagccggttactcagctgtatgtcagggtggatgccagtaccaaagacagcctgaagaaaatcgaccgcccactcttcaaggatttctggcagagattccttgacagtgtaaaagccttggcagtcaagtatctgcagaggattggttccaggacccccatggataccaaaatctacagttactgtcctgcagttcaccctgcagaacccacagatatgaaaagttggccttctctattcgaggttcctacatccctcgagtactgccctttctatttgcagttggttgaatctgcagatgctgaaggaacccagaaatatagaaggctaactgcatattacatacctgtgtatacagagccaccactgattactaaagagccttcctgtttgtggaagcaggcagagtttggcgatttgggaaagcacgtgtggcttgtggagcagttcagttccaccagagtccaagagcatggggtcggatggggagtggaatga

SEQ ID NO: 3775 - DNA, 2088 bp, Homo sapiens
  SIMILAR (53)..(1999): 261254mologous to Saccharomyces cerevisiae mal5, sta1, len: 1367, CAI: 0.3, AMYH_YEAST P08640 GLUCOAMYLASE S1 (EC 3.2.1.3),accession number Z38061,Smith-Waterman Score=372.
atgaacttggtgggggacacaattcagtccatgaaaagtgatgaacaaaagaagtcagacacagaatggcacccgctacatgaccccaccaccaagaagctcacacacaaaacagcacctgctccacaaccccaccaccacgaagctcacacacaaaacagcacccgctacacgaccccatcaccacgaagctcacacacagaacagcacccgctacacgaccccatcaccacgaagctcagacacagaacagcacccgctacacggccccatcaccacgaagctcagacacagaacagcacccgctacacggccccatcatcacgaagctcagacacagaacagcacccgctacacgaccccaccaccacgaagctcacatacagaacagcacccgctacacgaccccaccaccacgaagctcacacacagaacagcacccgctacacgaccccatcaccacgaagctcagacacagaacagcacccgctacacggccccatcaccacgaagctcacacacagaacagcacccgctacacggccccaccaccacgaagctcacacacagaacagcacccgctacacggccccaccaccacgaagctcagacacagaacagcacccgctacacggccccaccaccacgaagctcagacacacaacagcacccgctacacggccccatcaccacgaagctcacacacagaacagcacccgctacacggccccatcaccacgaagctcagacacagaacagcacccgctacacggccccatcaccacgaagctcacacacagaacagcacccgctacacggccccatcaccacgaagctcacacacagaacagcacccgctacacggccccaccaccacgaagctcagacacagaacagcacccgctacacggccccaccaccacgaagctcacacacagaacagcacccgctacacggccccatcaccacgaagctcacacacagaacagcacccgctacacggccccaccaccacgaagctcagacacagaacagcacccgctacacggccccaccaccacgaagctcacacacagaacagcacccgctacacggccccatcaccacgaagctcacacacagaacagcacccgctacactgccccatcaccacgaagctcacacacagaacagcacccgctacacggccccatcaccacgaagctcagacacagaacagcacccgctacacggccccatcaccacgaagctcagacacagaacagcacccgctacacgaccccatcaccacgaagctcacacacagaacagcacccgctccacgaccccatcaccacgaagctcacacacagaacagcacccgctacacggccccatcaccatgaagctcacacacagaacagcacccgctacacggccccatcaccacgaagctcacacacagaacagcacccgctacacggccccatcaccacgaagctcacacacagaacagcacccgctacacggccccatcaccacgaagctcacacacagaacagcacccgctacacggccccatcaccacgaagctcacacacagaacagcacccgctacacggccccatcaccacgaagctcacacacagaacagcacccgctccacgaccccatcaccacgaagctcagacacagaacagcacccgctacacggccccatcaccacgaagctcagacacagaacagcacccgctacacggccccatcaccacgaagttcaggaacaggcaaagccaatcaagtgaccacccaggcccagcccagagaccacccgggcccagcccagagaacctgctgtcaccctcctccccagtggggccctgggacaagcctgtccctgcgatgccactgccggcccacacggaaccacgctgtggcctgcggttccgccaaggtggcagcagcatctcaccagggagctcctgcatcctgtcccaagggcttgcccataacagggacagggacagccattcacagccgggcctgggcgaggctcacacccgtatgaccccacaggagccagcccgaaagggcaaagcagcatcttga

SEQ ID NO: 3776 - DNA, 184 bp, Homo sapiens
  SIMILAR (121)..(2): 851254mologous to Homo sapiens Human secreted protein, SEQ ID NO: 5576,accession number G01495,Smith-Waterman Score=170.
ctggcagccactcccagagtccctggaactctggcccaaggctctctgactccttcccagatcttcttggcttagcggctgaagactgacgctgcccgatcgcctcggaagcccccctgacacccattaggctcagcacattacccgggctgtactgccgcaaggcttcacagacagcccccat

SEQ ID NO: 3777 - DNA, 1165 bp, Homo sapiens
  SIMILAR (283)..(732): 491254mologous to Gibbon ape leukemia virus pol polyprotein,accession number M26927,Smith-Waterman Score=336.
atggctgaggaggactcaggaaacttacaaccagaaggtgaaggggaagcaggcacctcttcacatggtggagcaggagagagagtgaaggggaaggtgctacaaacttttaaacaaccagatctcacaaagcagacacgttttatccgtggacccaaaactccggcgccggtcacggactgggaaggcagccttcccttggtgtttaatcattgcagagatgcctctctgattatacacccacatttcaagggtgtcagaccacgcagggacgcctgccttggtccttcacccttagcggcaagtcccgcttttctggggaaggggcaacacgctttaaaaagattaaagcctattatcactcgcctgctacagcatggccttttaaagcctataaactctccttacaattcccccattttacctgtcctaaaaccagacaagccttacaagttagttcaggatctgtgccttatcaaccacattgttttgttgcctatccaccccatggtgccaaacccatatactctcctatcctcaatacctgcctctacaacccattattctgttctagatctcaaacatgctttctttactattcctttgcacccgtcatcccagcctctcttcgctttcacttggactgaccctgacacccatcaagctcagcaaattacctaggctgtacagccgcaaagcttcacagacagcccccattacttgaatcaagcccaaatttcttcttcatctgttacctatctcggcataattcttcatgaaaacacccgtgctctccctgctgaccatgtctgactaatctcccaaaccccaatctcttctacaaaacaacaactcctttccttcctaggcatggttagcgtggtcagaattcttacacaagagccaggaccacaccctgtagcctttctgtgcaaacaatttgaccttactgttttagcctagccctcatgtctgcgtgcagcggctgccactgctttaatacttttagaggccctaaaaatcacaaactatgctcaactcactctctacagttctcataacttccaaaatctattttcttcctcatacctaacgcatatactttctgctccccagctccttcagctgtactcactctttgttgagtctgccacaatcaccattg

SEQ ID NO: 3778 - DNA, 324 bp, Homo sapiens
  SIMILAR (72)..(311): 341254mologous to Homo sapiens Pro-a2(XI),accession number U32169,Smith-Waterman Score=82.
tcacttcgaagcccgtcgccaagccggacctcccaaacccagcccacagccacctttccgttgacttcctaccgctggcacacagggggcggtggggaaaaagcggctggagggttccgctggggccgctttgctggctggggcagggccctgacccaccaggagcccatggtcagaacccagccagcccctcgcttgattttccgtggggtcctatctgcgcctcccaaggagtcacggaccagtcgccttcgactttccaaggccctctgggggaggcataaaaacccaccgccggagccaaacccggagccggagcaggag

SEQ ID NO: 3779 - DNA, 1391 bp, Homo sapiens
  SIMILAR (692)..(1354): 281254mologous to Zea mays extensin-like protein,accession number AF159297,Smith-Waterman Score=107.
tcgcaccggcatttccgggtcgacgatctcgtcagaggagtcaggtctgagggtttgtagccagaccctcgtcctctagggacaccttggccatcacagtagatgggctggtgccccacatggcatctgctccaaacaggggcttcagagggctctgaggtgacctcactcaagaccacaggtgccctggccccttccccgccagctacaccgaaccctgtcccaacagctgccccagttccaacagccaattcctggggcccagaattgctgtagacaccagcctcgttccagcacctcctgccaattgcctggaatcccatcctggctggaatcaagagggcagcatccgccaggctcccaacaggcaggactcccgcacaccctcctctgagaggccgctgtgttccgcagggccaggccctggacagttcccctcacctgccactagagaaacacctgccattgtcgtccccacctggaaaagaccactcgtggagcccccagccccaggaggccccagagctcagggcgcctggtcggattctgaacagccccgagtcacagtgggtataactggaacgaccaccgtgagaaaaactgtgtccaaaactgactcctggcagcagtcggaggccccgccagagaggggagcagccgccctgaacccatgtcctgccggttcccatgacccccagcacccagagccccacgtgcctctgtgctccctccttctggggaacaccctgtgcagcccctccctgcagcccacacgctggggagaccccaccctgcctcgggccttttctacctgctgcacttgccgcccacccaaacaaccctggacccggccctggtatttccaggacaaaggctcacccaagtcttccccatgcaggcccttgccctcactgcctggttacacgggagcctcctgtgcgcagaagcagggagctcagctcttccacaggcagaaggcactgaaagaaatcggcctccagtgccttgacacacggaggctccgcactccctctaaagatgagggatccaggcagcaacatcacgggagaatgcagggctcccagacagcccagccctctcgcaggcctctcctgggaagagacctgcagccaccactgaacagccacggaggtcgctggatagtaaccgagtcagtgaccgacctggagggcaggggagcagtgaaccggagcccagaccatagggacagagaccagccgctaacatcccgagcccctcactggcggccccagaacaccccgtggaaacagaacagacccacagtcccacctggaacagggcagacactgctgagcccccagcaccagccccaagaaacactaggcaacagcatcagagggggctcctga

SEQ ID NO: 3780 - DNA, 824 bp, Homo sapiens
  SIMILAR (239)..(763): 311254mologous to Homo sapiens Protein polymer adhesive substrate PPAS1-F,accession number W49723,Smith-Waterman Score=130.
ttatcgtgctttaacttgagaaacatatcgatgaactacagctttctgatacgcggtacagtagttcatcacactgcactctagcctgcacgacagagcaagactcgtagccgccctcttgggaatggacagtgacacagcagcaaagtggaaatggaaagactggttaggaggcgcaggtgagatccgcctcgcgagtggagcgctaggattcaggtccagatctgactgggaagttccgcagggaattccgccccggacccctggagacccacatcgtccggtgtgttttcctttcacaacacttcccacagccactggattctcaggctccgcactcaggaaaggttcagcgaggtttgtgttcagggaacatggcctacaaggcctctttgggctctgccaccaccctaattcccatttccctctcctgcaccagctgcatttgcttcctgtcagtccctgcctccccacagtccgcagtccccgaggcctggagccgggatttcggtcctcggtctcaagaagctcccgacagttctcagcagcgccaaccaggccatcagtcccttcgcccatggccaatcagggctcgggagatgaccgccaacccccgcccccccaagacacgcccccgcgtcccaacgcagccagtcagagcgcgggacacaactacgcgtccctccccgcaccacgagggcgagtcggagtgggaatcggctttccaggcagcccagcctgtgctggcgggggcatctggcattttcacaccctttccttcccagcattttaggaagcggagttccagtagctttgacgcttag

SEQ ID NO: 3781 - DNA, 1980 bp, Homo sapiens
  SIMILAR (861)..(121): 971254mologous to Homo sapiens 12R-lipoxygenase,accession number AF038461,Smith-Waterman Score=1314.
tcaaggataacgagagacggctgaatacatgcaggtccacacgctcacataagcgcgcgcacactcggaggagcattcgcgcacacagaggctcagcggcagcgccgcctgcagcccaggcacctggatggcgatgggcatcatcttgccctcgggtccaaagtgcagcaggcagaggggggcgcagtggtgctgcttccggccgctgagctccacggtggggatgccctccatgatgcggtagtcggccaggtaaatgttccccttctccagctccgcttgcaagcacgttccctcgcccaggaacggagccaccatgtcgtctgtgacggggaacttgtctgggatccgcgtgcagcggcggatcaggccggggttgacgccgttgaggtactggtacccaaagaaggtgtcctctgcccagtgctcggccacgtactcggagacgacagatttcttgccagggaaaattttcctaatgtccttcagcctcttccacgaatgtttgcagtccaacaggccgcggactttgaaagccagtgccatgggccccaggcggacgaagaaggaggccgtcttgaggaaggagtagcggagatttaagttcaggaacttggtggccttaaagttgatgagaattgggaatcccggaatatagccattccactcaggccggttggggttgcgatgcctccgcaccggagggcggtaactgggaatgtgcacatagctgggcaggccaggaagaaagactcgccagtggtagaagtcctgcttggctctgatctcctcttttctgtgctccaggaggacggggagcgagtcatctgctgttgtctttcccttgagagtctccagcgccttagaccgctcggccactctacctgcacgaaaacttactgtccccgttgtcctcctaagagacggcttgggccggggcggtttggggcgcagatagccgtgcagcgcggagaagagctgggcgcgggcggtcgggctggcgtcgtgcgcgaaggccgccaagcgaagcaggcactcgcggaaaccggacaagtagcagctggcgagcgccttggcgtcctggactggggaccggggaacccccgggggctccacccggcttcgctccctcaagtagcccacggcgaactccaatatctccgctttctccagcttcgggttccggaggttctgggctgggcagaaggcagagggcagcagacagagccaggaccaagccaggcggcgattgagttggcagctgggcaggtaggaggcctccgggaggggcagaagggccttagggtcaaaggaggcccaggccttacgctgtccttcttctttcagggtggccagagtggggaaggaggagggagtctgcagccgagtgtacagctgctcgtacagggaggccccgtaggcttgacgggatgagtgagccccaggcttctgacgagagaagctttgaagcagaacggcgccacggaggcagggggcgagcactggccttcttgtcccccctcccactgactggagcaggtgaacatcctggagctgcagacacactccaggtcgcatcacccgcctaaggccacggaactgctggtaggcaaggcagagccccagctgcccatccagctcatagaggccagcgggctcattcaacacgccagtgactgctcccgaataggataggagtctagaataccggacaagactttctggatccttcttgtcctccgagttgctgggcatggggagtggcttggggtcagcctctaagaggggtccttccagctccagttccagctcctgcacacattctggtttcagcagcaacagacgggaggactgactggtcatccaaacatgctggcgctgaccacggatcttggacactcgcagttctgtcagcacataggctgtaccaggccgaagggctctgtgccacaccagctgggcagggacctggctctccat

SEQ ID NO: 3782 - DNA, 509 bp, Homo sapiens
  SIMILAR (36)..(491): 821254mologous to Homo sapiens unnamed protein product,accession number AK025823,Smith-Waterman Score=634.
tgcttcgccatgactacgccaagcttgccacgaggttgacacggacactatgtgaaccccttgtggcgtctctctggatgaaactggggaacacgggggccatgagaaggtgtgtgaagctaacagtcgctcttgagactgctgaatgtgaattcccccctcacctggatgtatatatagaagacccacacttgcctccctcactaggactacttccaggagcccgggtccacttcagccagttggagaaaaggggttccagatctcacaatgtttattgttggttccggtcatccacttatgtgcaggtcctgagttttccccctgagaccaccatcagcggtcccctgccccacatctacctgggctgaacttctgcagggtggtcagtcccccattccagggccactgcctcttgccatatcggctctggtcttcaggcttcagctcttctggggtgtgttgcttattgtaccagcatctgccggcagctttcaaccagggttgag

SEQ ID NO: 3783 - DNA, 728 bp, Homo sapiens
  SIMILAR (141)..(40): 441254mologous to Homo sapiens T-cell receptor beta chain,accession number AF088528,Smith-Waterman Score=68.
gtttgaggaccagtcgacctgggctgctataggcgcgagtatttcctcctgctccccataggctcctggtggaggatgggactgccgaagccgtggtgacctgtatgaatcaccatgtggcagcagcactagggctgtgtcctatagagtgggcctccctcctagatttcgtccaagtgccaggcagagtggtcttgcagtttgcagggcctggagcccaacttgaggtgtaatgtggctgggagggagggactcggatacccaaattcctgggcttttggcaaagggtttaggagccagttaaccttgaccttctctttctagtcttcagccagggttgacgagcccatgaccatgttcctctggacactttgtactagcccctctgtcctccgtcctattgtgctttcttttgagctggaaaggaaaccgtcgaagatcgtcccattagaacctcctcggctacagcgattccagtgtggagagctccctttcttgactcacgtgaaccccaggctccgattgtcctgcctttctatccgagagtcagagtactccagctctctggggatccttgcttcctcctgttaactgaactgcaaggatggcctgagagtccttccttgctgaaaacctgaaggcctaggtcctggctcctctccctacttgttctgtgattgaaccaaggactccagattcacaaactgctacaccaatataaaaaaaaa

SEQ ID NO: 3784 - DNA, 2114 bp, Homo sapiens
  SIMILAR (1383)..(2087): 281254mologous to Homo sapiens alpha-1 (III) collagen,accession number X15332,Smith-Waterman Score=109.
ttcattggtatctcaaagaaattgttcctagatcccctaattgtcgggttgtgatttcggagcactttctggtctcaaggtatatcgatcaaggatctgccttaggccaggcccttgggaaacctacagggctaaccgtagcctggggccctatagcacagtcacccagagtcctcacctgcccctgcttgtgcctggcacttgcctccccctacaccttctttgtgcttgtgaacacctctaggcattcatctttgacttcctgcagggcccagccttactgactgagaccatcatagctatgctctctgccttgccgccaactccccaatttacttcctttacagactgattttggtaccatttcttctgctggacgaaaagctattctcttacaaatcactttccacctttggccctggcggcaaagggctgaaatgatgatgaacgactaggagttcctaatgggacgatcttcgacggtttcctttccagctcaaaagaaagcacaataggacggaggacagaggggctagtacaaagtgtccagaggaacatggtcatgggctcgtcaaccctggctgaagactgccggcagatgctggtacaataagcacacacccagaagagctgaaggctgaagacagagacgatatggcaagaggcagtggcctggaatggggactgaccaccctgcagaagttcagccaggtagatgtggggcaggggaatgctgatggtggtctcagggggaaaactcaggacctgcacataagtggatgaccggaaacaacaataaacattgtgagatttgtcactgagcaggtcggtcagtgaggattcaggcaatgacttgtttgcatccagcacatcttggatatcctgggagctttcaagctccagagtccagttgtcctggacagtgaggcaggatgcacagccagccaactccagaggacgccgagatatgcaggatgaaccatccttttcaaacaacattggtgtagcggggccaggagctatgagtcggtacacctgtcccgggtgcaagaactcaaaccagcggactgaagagccaaagaaaatgaggtgaaccttctgatcattgtcgtcatttccctggggctcgggcagcccccatccagtaccctccttcctctgggtgcccccaagccagctccccaacacatagaaactgagggcgggcttgggcacctctggacttgctcctggggggacacaaaaattacgcttcatgagggcctccttgtggcagagcaagaagagccggctctgtcctaggtggggtccctctgggccggtgggatctgtctgaggtgttgagggtgttgctgaatgaaggcagggtctgggcacaggcaggatcagggcatcagccagaaagaactggacatagactctggcctgctgcttctggatgaagcctggcatgctcagctccttccaggaagggaagctgcttctcacgtccctctctacgatcaactgaaacctctctgcccgcaccaggcagcctatcagccgtgggtcactgaggggttgagagtgcttggccagcagcaggcagggcagggaaccactttggtcccgaagttgcagacaacctttatgagatgaagccaccagaaccccaagtaaaacctgggctgggcagaaggcagagggcagcagacagagccaggaccaagccaggcggcgattgagttggcagctgggcaggtaggaggcctccgggaggggcagaagggccttagggtcaaaggaggcccaggccttacgctgtccttcttctttcagggtggccagagtggggaaggaggagggagtctgcagccgagtgtatttctggaggggacagtgatgtggctcttcaaggatctcattgtgtgcattccgaacagggctgcctggcggagctagaagatccagggtaggagccaggagttgcagtcccaggctggggctcccaggagaggaatgttgcaggaactggtggtgtctcagcacatggggacacagcttgcaggccagctcctccagggcattggtagcccacaggtagaggggacgaaatcgtcgaagcgaagacgaaa

SEQ ID NO: 3785 - DNA, 452 bp, Homo sapiens
  SIMILAR (103)..(432): 311254mologous to Cucurbita maxima AOBP (ascorbate oxidase promoter-binding protein),accession number D45066,Smith-Waterman Score=109.
tgccacgacattccccagggtgcaggtgcccggtggccgagggtcagtccagtggtagagccttgcctcctaggctcatcctgctggcggtcctcctgcttctgctgtgtggtgtcacagctggttgtgtccggttctgctgcctccggaagcaggcacaggcccagccacatctgccaccagcacggcagccctgcgatgtggcagtcatccctatggacagtgacagccctgtacacagcactgtgacctcctacagctccgtgcagtacccactgggcatgcggttgccctgcctttgggagctggaactggactccgtggctcctcctgcctacagcctgtacaccccggagcctccaacctcctacgatgaagctgtcaagatggccaagcccagagaggaaggaccagcactctcccagaaacccagccctctccttggggcctcg

SEQ ID NO: 3786 - DNA, 457 bp, Homo sapiens
  SIMILAR (386)..(339): 621254mologous to Homo sapiens Fragment of human secreted protein encoded by gene 29,accession number Y41453,Smith-Waterman Score=60.
tttcgtccggagtgaaggcggctgggcagggggccaggcccgggatgggtaggaggccaggaggcccagcctgactgtgctctgggtggtgaggcgagcgtctgccctccgcaacactaacccccgtgtgctatgggtcacgccctgcagctttgacccccctggccccctgtcagccggaatgtcctgtgaagtgcttgtcaccttcaagccgatgataaacaaggatctagaaggaaatatctcatttttggctcagacgggcgagttttcagttccactgaaatgttcaacaaagaaatgttcgctgtccctcgacaaggagctcattgacttctgcagctacgtggtaggagagaccacgtctcggaccatcacgctgaccaacgttgggggcttgggcacgactttcaagttcctgccagcttcagagccctgtgagatggacgactcccag

SEQ ID NO: 3787 - DNA, 1047 bp, Homo sapiens
  SIMILAR (783)..(1046): 351254mologous to Caenorhabditis elegans Similar to cuticular collagen; C18H7.3,accession number AF067607,Smith-Waterman Score= 91.
tcagcgcttgagagctgtgattttagggttcagtctctggttcttggagtaagaagctgatggattctgtgtagcttcactacagcctgcgggctgctcctcctcctgctccttgtccagcttctccagctccttccggctctgcatgtccgcctgggaggactccgtgccctctagctgctgctcagagaagctggtggcggctttgtcatacaagcttttatcttcgtaggtcaggagactgcttaatttcagggcagactgggagtcgtccatctcacagggctctgaagctggcaggaacttgaaagtcgtgcccaagcccccaacgttggtcagcgtgatggtccgagacgtggtctctcctaccacgtagctgccgaagtcaatgagctccttgtcgagggacagcatcggcttgaaggtgacaagcacttcacaggacattccggctgacagggggccaggggggtcaaagctgcaggacgtgacccatagcacacgggggttagtgaaggctgtaggcagaggagccatggagtccaggtccagctccccaaagggcaggggcaaccgcatgcccagtgggtactgcacggagctgtaggctgcagggaaccagagtgggttcgtggaggcgggcttggcatttacccccgccatctccaccctcaactggcgggcccctaggcactcacaggtcacagtgctgtgtacagggctgtcactgtccatagggatgactgccacgtcgcagggctgccgtgctggtggcagatgtggctgggcctgtgcctgcttccggaggcagcagaaccggacacaaccagctgtgacaccacacagcagaagcaggaggaccgccagcaggatgagccccacttgccacaggctgctccagcgggcctcgtgcgggcactggtccgaggggtcgcagctgccgtccgcgaagcccagcgccacctgcggcagcggcaggagcggcaggagcggcaggagcggcagcagcagccgcagtccgcgggcggtcagcggcccccgggccat

SEQ ID NO: 3788 - DNA, 462 bp, Homo sapiens
  SIMILAR (219)..(437): 501254mologous to Caenorhabditis elegans proline and glycine- rich,accession number U41557,Smith-Waterman Score=161.
aggccctgtgagcatcggtgaacccgagataggccccccaggccctgtgagcatcggtgaacccgagtaaggccccccaggccctgtgagcatcggtgaacccgaggaaggccccccaggccctgtgggcatcggtgaacccgaggaaggccccccaggccctgtgagcatcggtgaaccctaggaaggccctcccaggccctgtgagcatcactgaacccgagtaaggccccccaggccctgtgagcatcggtgaacccgaggaaggccccccaggccctgtgggcatcggtgaacccgaggaaggccccccaggccctgtgggcatcggtgaacccgaggaaggccccccaggccctgtgagcatcggtgaacccgaggaaggcccaacaggccctgtgagcatcactgaacccgaggaaggccccccaggccctgtgggcaacgaaatgtcgagccggg

SEQ ID NO: 3789 - DNA, 374 bp, Homo sapiens
  SIMILAR (261)..(172): 401254mologous to Homo sapiens UPF3,accession number AF318575,Smith-Waterman Score=42.
aatacagggcactggtcttctcttcctccacacagtaggtttctaaaaacttcttatattctggatcatcttcgatgcttccagtcttggcatctttttttctcagcttctttttggctatcttctggaatggagcaaactctgccactgcaggatattctaggcctcaggtcggcggcgaagaactcgaagtagtcgtgtgctggcagcgggcgcagctgctcctccagctgctccttggtgaggcccggaggcaggcggcggatgaccacctgcggggagcgcgcggccgttcccaccggggcggagcgtggacaaggagctcaaaaggcaccgcgtaccgcgctgggaggcccggcccccgccccacgaaa

SEQ ID NO: 3790 - DNA, 619 bp, Homo sapiens
  SIMILAR (118)..(504): 931254mologous to Homo sapiens hUPF3A,accession number AY013250,Smith-Waterman Score=594.
gaaggatgaattatagtttaaatagtaataatgcattgtcgttggtacacttactctttaagtaagttaggtcattattttccgaaatgaatgtagtagaatttcagaatggcttctggaacatgtttcctgttaaaaggcctaaaatatcctgcagtggtagagtttgctccattccagaagatagccaaaaagaagctgagaaaaaaagatgccaagactggaagcatcgaagatgatccagaatataagaagtttttagaaacctactgtgtggaggaagagaagaccagtgccaaccctgagactctgctgggggagatggaggcgaagacaagagagctcattgctagaagaaccacacctcttttggaatatattaaaaatagaaaattagaaaagcagagaattcgagaagagaagcgagaagaacggaggaggagagagttagaaaagaaacgtttgcgggaagaggaaaaaagaagaataagcgttgaggacagatggctttacactatacggatcaaccgaagaaaatcgcagagaaagaagtaaggattaaggtcacacagcggcagtgataaagagcacagggatgtggagagatctcaagaacaag

SEQ ID NO: 3791 - DNA, 751 bp, Homo sapiens
  SIMILAR (467)..(357): 1001254mologous to Homo sapiens UPF3,accession number AF318575,Smith-Waterman Score=192.
  misc_feature (1)...(751): n = a,t,c or g
ctcttgaggcatccgtctgtgaccactgacttcaactatgtgacacaacatgccttccttgacgctcaggaacagaccatncatgtgtcttctgcactgctcattcggaagcatcataacttaaaatgatcttaactaaaaaaaatcacgtgctctccatcaaccaacgctcagaaatattttcccatgctgccatcttgccattcttttgtcaaaactggaaatcactctacatttctgtcaagcctgtaacaagtttcaacttgttatcacagtcaagaaaaagagaaaaaacgtatatcctctacgagtaaatctctcaataaagaaaagagaagaaatgagcaaaacagaccaatgagctctcttgtcttcgcctccatctcccccagcagagtctcagggttggcactggtcttctcttcctccacacagtaggtttctaaaaacttcttatattctggatctagacattaaaaagtaggaagaaaataaatataatctttcccaactacgggagaattacatttgctcagtgttcttaatttggcagcttcataacgtagcacttggaaagggctcaccatcttcgatgcttccagtcttggcatctttttttctcagcttctttttggctatcttctggaatggagcaaactctaccactgcaggatattctaggccttttaacaggaaacatgttccagaagccattctgaaattctactacattcatttcggaaaataatga

SEQ ID NO: 3792 - DNA, 443 bp, Homo sapiens
  SIMILAR (162)..(443): 981254mologous to Homo sapiens hUPF3A,accession number AY013250,Smith-Waterman Score=474.
ccgtccgagataaaaagatgccaagactggaagcatcgaagatggtgagccctttccaagtgctacgttatgaagctgccaaattaagaacactgagcaaatgtaattctcccgtagttgggaaagattatatttattttcttcctactttttaatgtctagatccagaatataagaagtttttagaaacctactgtgtggaggaagagaagaccagtgccaaccctgagactctgctgggggagatggaggcgaagacaagagagctcattgctagaagaaccacacctcttttggaatatattaaaaatagaaaattagaaaagcagagaattcgagaagagaagcgagaagaacggaggaggagagagttagaaaagaaacgtttgcgggaagaggaaaaaagaagaagaagagaagaagaaagatgcaaaaaaaaaaaa

SEQ ID NO: 3793 - DNA, 572 bp, Homo sapiens
  SIMILAR (548)..(306): 871254mologous to Homo sapiens hUPF3A,accession number AY013250,Smith-Waterman Score=372.
  misc_feature (1)...(572): n = a,t,c or g
aagaagcttaatccttacatctatctcggcaattttcttctgttatcagtctcntttatnagcatcaatcatcttctcttcttcttcttttttcctcttcccgcaaacgtttcttttctaactctctcctcctccgttcttctcgcttctcttctcgaattctctgcttttctaattttctatttttaatatattcccaaaagaggtgtggttcttctagcaatgagctctcttgtcttcgcctccatctcccccagcagagtctcagggttggcactggtcttctcttcctccacacagtaggtttctaaaaacttcttatattctggatctttgctgtcaaggaagatatatccctcaaaacgatctctaaaaagaaggatgtcctcaggattcctaaaattaatgtatgctcttgagtagagatgaggataaagactcaggtcggcggcgaagaactagaagtagtcgtgtgctggcagcgggcgcagctgctcctccagctgctccttggtgaggcccggaggcaggcggcgtatgaccacctgcggggagcgcgcggccgttcccac

SEQ ID NO: 3794 - DNA, 1357 bp, Homo sapiens
  SIMILAR (1205)..(1354): 411254mologous to Homo sapiens hUPF3A,accession number AY013250,Smith-Waterman Score=84.
tgatgacctcgtgacccgccggaatcccggtcgacgatttcgaaaggagggggccggaggccttcgggcgtgtcgttgccgcgcggggcccgagcgggagggagaagctgtcggccctagaagtgcagttccaccgcgactcgcagcagcaggaggctgagacgccgccaacttcgtcctccggttgcgggggcggtgcgggcaaacctcgcgaggagaagaggacggccctgagcaaggtggtcatccgccgcctgcctccgggcctgaccaaggagcagctggaggagcagctgcgcccgctgccagcacacgactacttcgagttcttcgccgccgacctgagtctttatcctcatctctactcaagagcatacatttatttttaggaatccttgacgacatcccttttttttaggagaatcgctttgatgggatatatcttccttgacagcaaaggcctagaatatcctgcagtggtagagtttgctccattccagaagatagccaaaaagaagctgagaaaaaaagatgccaagactggaagcatcgaagatgatccagaatataagaagtttttagaaacctactgtgtggaggaagagaagaccagtgccaaccctgagactctgctgggggagatggaggcgaagacaagagagctcattgctagaagaaccacacctcttttggaatatattaaaaatagaaaattagaaaagcagagaattcgagaagagaagcgagaagaacggaggaggagagagttagaaaagaaacgtttgcgggaagaggaaaaaagaagaagaagagaagaagaaagatgcaaaaaaataagagacagatgaacagatgaaaattgcagagaaagaagtaaggattaagcttcttatgaaaccagaaaagggagaggaaccaaccacagagaaaccacaagaaagaggagaggagattgatacttggaggttggcaagcaggaatcctgtgcccccggttgcagtcgtaaaagccaggcccatggaaggctcccttggaggagcccccaggagacgtcacacagccggcagttgattaagagccccagggatgtggagagatctcaagaacaagaatctgaagcacaaagataccatgtggatgacggcaggaggcacagagctcaccacgagcctgaacggctttccagaaggagtgaggatgagcagagatggaggcgaagacaagagagctcattgagaattcgagaagagaagcgagaagaacggaggaggagagagttagaaaagaaacgtttgcgggaagaggaaaaaagaagaagaagagaagaagaaagatgcaaaaaaaaagagacagataa

SEQ ID NO: 3795 - DNA, 1863 bp, Homo sapiens
  SIMILAR (817)..(1860): 911254mologous to Homo sapiens putative p150,accession number U93563,Smith-Waterman Score=1638.
atggcagaaagctggggccttactaacttgcggtgtcagaggactgagctcatggctggcacggcaactgaaaggatagggaagaaacacacaaaggaaaaagaggtaagggccataattttagtaccaactttgccagaatccttggcgatagctaactacacagaaacaggtgtccctaagggcaagaatactgtgaatgctgttgttcctctgggtctagatgcccagtgtggctgccatactctaggctgctgcttggaatgcctgcaaggaatccagagatatggcctgtcctcaagtctcccagcagtgggtaccagtaccagctctgatgggggtggcaggaaagtgacacagactgaacgcagctcctcaccagcaatggaacaaagctggaaggagaatgactttgacgtgttgagagaagaaggcttcagaagatcaaactactctgagctaaaggagaaagttcgaaccaatggcaaagaagttaaaaaccttgaaaaaaaagtagacgaatggctaactagaataaccaatgcagagaagtccttaaaggagctgagaccaagtctacgtctgattggtgtacctgaaagtgatggggagaatggaaccaagttggaaaacactctgcaggatattatccaggagaacttccccaatctagcaaggcaggccaacattcagattcaggaaatacagagaacgccacaaagatgctcctcgagaagagcaactccaacacacgtaattgtcagattcaccaaagttgaaatgaaggacaaaatgttaagggcagccagagagaaagaccacagtgcaatcaaactagaactcaggattaagaaactcactcaaaaccgctccactacatggaaactgaacaacctgctccagaatgactactgggtacataacgaaatgaaggcagaaataaagatgttctctgaaaccaacggaaacaaagacacaacataccagtatctctggcacacattcaaagcagtgtgtagagggaaatttatagcactaaatgcccacaagagaaagcaggaaagatccaaaattgacaccctaacgtcacaattaaaagaactagaaaagcaagagcaaacacattcaaaagctagcagaaggcaagaaataactaaaatcagagcagaactgaaggaaatagagacacaaaataccgttcaaaaaattaatgaatccaggagctggttttttgaaaagatcaacaaaactgatagactgctagcaagactaataaagaagaaaagagagaagaatcaaatagatgcaataaaaaatgataaaggggatatcaccaccgatcccacagaaatacaaactaccatcacagaatactacaaacacctctacgcaaataaactagacaatctagaagaaatggataaattcctcgacacatacaccatcccaagactaaaacaggaagaagttgaatctctgaatagaccaataacagactctgaaattgtggcaataatcaatagcttaccaaccaaaaaaagtccaggagcagatggattcacagccaaattctaccagacgtacaaggaggagctggtaccattccttctgaaactattccaatcaatagaaaaagagggaatcctccctaactcactttatgaggccagcatcatcctgataccaaagcctggcagagacacaacaaaaaaagagagttttagaccaatatccttgatgaacgctgatgcaaaaatcctcaatacaatactggcaaaccgaatccagcagcacatcaaaaagcttatctaccatgatcaagtgggcttcatccctgggatgcaaggctggtttaacatatga

SEQ ID NO: 3796 - DNA, 1989 bp, Homo sapiens
  SIMILAR (334)..(981): 881254mologous to Homo sapiens putative p150,accession number U93565,Smith-Waterman Score=978.
atgaagcgagaagagaagtttagagaaaaaagagtaaaaagaaatgaacaaagcctccaagaaatatgggactatgagaaaagaccaagtctgcctctgattggtgtacctgaaagtgacggggagaatggaaccaagttggaaaacactcttcaggatattatccaggacaacttccccaatctaggaaggcaggccaacattcaaattcaggaaatacagataatgccacaaagatactcctcaaggagagcaactccaagacacataattgtcagattcaccaaagttaaaatgaaggaaaaaatattaagggcagccagagagaaagaaatacagactaccatcagcgaatactataaacatctctacgcaaataaactagaaaatctagaagaaatgggtaaattactggacacatacaccctcccaagacaaaaccaggaagaagttgaatccctgaatagaccaatagcaggctctgaaattgaggcaataattaatagcctgccaaccaaaaaaagtccaggaccagacggattcacagccaaattctaccagaggcacaaagaggagctggtaccattccttctgaaacaattccaatcaatggaaaaagaggtaatcctcccaaactcattttatgaagccagcatcatcctgataccaaagcctggcagagacacaacagaaaaagagaattttacaccgatatccctgatgatcattgatgcaaaaatcctcaataaaatactggcaaaccgaatccagcagcacatcaaaaagcttatccaccaagatcaagttggcttcatctctgggatgcaaggctggttcaacgaacacaaatcagtaaacgtaattcatcatataaacagaaccaaagacagaaaccacatgattatctcagtagatgcagaaaaggccttcaacaaaattcagcagcccttcatgctaaaaactctcaataaactaggaatccaacttacaagggatgtgaaggaccccttcaaggagaactacaaaccactgctcaatgaaataaaagaggatacaaacaaatggaagaacattccatactcatggataggaagaatcaatatcgtggaaatagccatactgcccaaggtttccctagaaagagaacgacaacatgatcaaacacatgttcagagccaacttgaaaaattggatcttcttgaacaggagtataacaaacttaccacaatgcaggcccttgcagaaaaaaaaatgcaagagttggaagcaaaactccatgaagaagaacaggaaaggaaacgcatgcaagctaaggcagctgagcatccacgtttgtgtttgtatttggcagccatattttctgctcttaagaatcttcaagataagattcgacgcttggaacttgagaggattcaggcagaagaaagtgtgaaaaccttgtctagagaaacaattgaatataagaaagtactggatgaacagatacaagaaagggagaattcaaagaatgaggaatcaaagcacaatcaagaactgacatctcagttgttagctgcagaaaataaatgcaatctattagaaaaacaattggaatacatgcgaaatatgataaagcatgccgaaatggagaggacatctgtcttagagaaacaaactccgctgctgatacccaggcaaagagggtctagagtggacctccagcaaactccaacagacctgcagctgagggtcctgactgttagaaggaaaactaacaaacagaaaggacatccacaccaaaaccccatctgtatgtcaccatcatcaaagaccaaagaggaacgcagctcctcaccaacaacggaacgaagctggacagagaatgactttgacgagttgagagaagaaggcttcagacgatcaaactactctgagctaaaggaggaacttcaaacccatggcaaagaagttaaaaaccttgaaaaaaaaattagacgaatggctaactag

SEQ ID NO: 3797 - DNA, 1119 bp, Homo sapiens
  SIMILAR (1)..(711): 851254mologous to Homo sapiens p40,accession number U93570,Smith-Waterman Score=1041.
atggggagaagacagagcagaaaaaccggaaactctaaaaatcagagcggctctcctcctccaaaggaacgcagctcctcaccagcaatggaacaaagctggacggagaatgacttcaatgagttgagagacgaaggcttcagaagatcaaactactctgagctaaaggaggaagttcaaacccatggcaaagaagttaaaaactgtgaaaaaaaattagacaaatggttaactggaataatcaatgcagagaagtccttaaaggacctgatggagctgaaaaccaaggcacgagaactacgtgatgaatgcacaagcctcggtaaccgatgtgatcaactggaagaaagggtatcagtgatggaagacgaaatgaatgagatgaagcgtgaagagaagtttagagaaaaaagaataaaaagaaatgaacaaagcctccaagaaatatgggactatgtgaaaagaccaaatctacgtctaattggtgtacgtgaaagtgacgaggagaatggaaccaagttggaaaacactctgcaggatattatcgaggagaactttcccaatctagcaaggcaggccaacattcaaattcaggaaatacagagaacgccacaaagatactcctcgagaagagcaactccaagacacataattgtcagattcaccaaaggtgaaatgaaggaaaaaatgttaagggcagccagagagaaagtgttggaagttctggccagggcaatcaggcaggagaaggaaataaagggcattcaattaggaaaagaggaagtcaaattgtccctgtttgcagatgacatgattgtatatctagaaaaccccatcatctcagccaaaaatctcctcaagctgataagcaacttcagcaaagtctcaggatacaaaatcaatgtacaaaaatcacaagcattcttatacactaataatggacaaacagacagccaaatcatgagtgaactaccattcacaattgcttcaaagagaataaaatacctaggaatccaccttacaagggatgtgaaggacctctttaaggagaactacaaaccactgctcaatgaaataaaggaggatacaaacaaatggaagaacattccacgctcatag

SEQ ID NO: 3798 - DNA, 583 bp, Homo sapiens
  SIMILAR (283)..(504): 951254mologous to Homo sapiens putative p150,accession number U93563,Smith-Waterman Score=356.
gaacgcagctcctcaccagcagcggaacaaagctggatggagaatgactttgatgagttgagagaagaaggcttcagacgatcaaacttctccgagctaaaggaggaagttcgaacccatggcaaagaagtcaaaaaccttgaaaaaagattagacaaatggctaactagaataactaatacacagaagtccttaaaggacctgatggagctgaaaaccacggcacgagaactacatgatgaatgcacaagcctcactaaccaattcgatcaactggaagaaaggctgataagcaacttcagcaaagtctcaggatacaaaatcaatgtgcaaaaatcacaagcattcttatacaccaataacagacaaacagagagccaaatcatgagtgaactcccattcacaattgcttcaaagagaataaaatacctgggaatccaacttacaatggatgtgaaggacctcttcaaggaaaactacaaaccactgctcaaggaaataagaggatacaaacaaatgggagaacattccatgctcatgggtaggaagaatcaatatagtgaaaatggccatactgcccaag

SEQ ID NO: 3799 - DNA, 990 bp, Homo sapiens
  SIMILAR (1)..(726): 721254mologous to Homo sapiens p40,accession number U93567,Smith-Waterman Score=870.
atggggagaaaccagatcagaaaagctgaaaattctaaaaaccagagcacctcttctcctccaaaggattgcagctcctcactagcaatgaaacaaagctggatggagaatgactttgacgagttgacaggagcaggttttagaaggttggtaattacagacttctcagagctaaaggaggatgttcaaacccatcacaaggaagctaaaaaccttgaaaaaagattagaaaaatgggtaactagaataaacagtgaagagaagaccttaaattacctgatggagctgaaaaccatggcacaagaactatgtgatgcatgcacaagcttcagtagccaatttgatcaagtggaagaaagggtatcagtgattgaagatcaaattaacaaaatgaagctagtagagaagttcagagaaaaaagagtaaaaagaaacgaacaaagcctccaagaaatacagaactatgtgaaaagaccaaatctacatttgattggtgtacctgaaagtgatggggagaatcaaaccaagctggaaaacactctgcaggatattatccaggagaacttccccaacctagcaaggcaggccaacattcaaattcaggaaatacagagaacaccacaaagatgctcctcaagaagagcaactccaagacacataattatcaggttcaccaaggttgaaatgaaggaaaaaatgttaagggcagccagagagaaaggtcgggaacgcagctcctcaccagcaatggaacaaagctcgacggagaatgactttgacaagttgagagaagaaggcttcagacgatcaaactactctgagctaaaggaggaagtgcgaacccatggcaaagaagataaaaaccttgaaaaaagattagatgaatggcgaactacaacaaccaatgcagagaagtccttaaaggacctgatggagctgaaaaccatggcacaagaactatgtgacgaatgcacaagccttagtagctga

SEQ ID NO: 3800 - DNA, 1593 bp, Homo sapiens; identical to SEQ ID NO: 1381
  SIMILAR (1102)..(1527): 731254mologous to Homo sapiens p40,accession number U93571,Smith-Waterman Score=538.

SEQ ID NO: 3801 - DNA, 1479 bp, Homo sapiens
  SIMILAR (256)..(717): 691254mologous to Homo sapiens NAALADase II protein,accession number AJ012370,Smith-Waterman Score=515.
atgggggaaaaacagagcagaaaaactggaaactctaaaaatcagagcgcctctcctcctccaaaggaacgcagctcctcaccagcaagggaacaaagctggacagagaatgactttgatgagttgagagaagaaggcttcagacgatcaaactactccgagctaaaggaggaagttcgaacccatggcagagaagttaaaaaccttgaaaaaaaattagacgaatggctaactagaataaccaatgctgagaattcttttacaaagcttcctcatctggcaggaacagaacaaaatttcttgcttgccaagaaaatccaaacccagtggaagaaatttggactagattcagccaagttggttcattatgatgtcctcttatcttaccccaatgagacaaatgccaactatatatcgattgtggatgaacatgaaactgagattttcaaaacatcataccttgaaccaccaccagatggctatgagaatgttacaaatattgtgccaccatataatgctttctcagcccaaggcatgccagaggttaaaaatgccatgttagcaggagccataggaatcatcttgtactcagatccagctgactactttgctcctgaggtacagccatatcccaaaggatggaatcttcctggaactgcagcccagagaggaaatgtgttaaatttgaatggtgctggtgacccactcactccaggctatccagcaaaagccggtagccgcctcagtcgtcagaccggtgctagcgacacgggagtggcaaacgcatcctcttgccgttcccggtgtttgggccttgcctgtgacggtgggaaaagaaaatggccttgctgtgctacaaccggggctgcggtcagcgcttcgatcctgagaccaattccgacgggctgtacaaaaggtagacataatagtgagaagccacctgagccagtcaaacctgaagtcaagactactgagaagaaggagctatgtgaattaaaacccaaatttcaggaacacatcattcaagcccctaagccagtagaagcaataaaaagaccaaggaaggttagaatgcatgtttataacatcaataaaattacaaggatttacaatgtagttggaactatcagaggatctgtggaacctgacaggtatgttattctgggaggtcaccgggactcctgggtatttggagctattgacccaaccagtggggttgctgttttgcaagaaattgcccggagttttggaaaactgatgagtaaaggctggagacctagaagaactatcatttttgccagctgggatgcagaagaatttggacttctgggttccacagaatgggctgaggcatttcttctgcctccaggatggaggtacagaatcttggccttgggccacgcactggggaccatgctgggctgccgtggtcagcgacagactcaggttctcaccaggagccccaggataagcccctga

SEQ ID NO: 3802 - DNA, 651 bp, Homo sapiens
  SIMILAR (469)..(2): 591254mologous to Homo sapiens p40,accession number U93570,Smith-Waterman Score=429.
ctttctctctggctgcccttaacattttgtccttcatttcaactttggtgaatctgacaattacgtgtgttggagttgctcttctcgaggagcatctttgtggcgttctctgtatttcctgaatctgaatgttggcctgccttgctagattggggaagttctcctggataatatcctgcagagtgttttccaacttggttccattctccccatcactttcaggtacaccaatcagacgtagacttggtctcagctcctttaaggacttctctgcattggttattctagttagccattcgtctacttttttttcaaggtttttaacttctttgccattggttcgaactttctcctttagctcagagtagtttgatcttctgaagccttcttctctcaacacgtcaaagtcattctccttccagctttgttccattgctggtgaggagctgcgttcagtctgtgtcactttcctgccacccccatcagagctggtactggtacccactgctgggagacttgaggacaggccatatctctggattccttgcaggcattccaagcagcagcctagagtatggcagccacactgggcatctagacccagaggaacaacagcattcacagtattcttgcccttagggacacctgttt

SEQ ID NO: 3803 - DNA, 1884 bp, Homo sapiens
  SIMILAR (868)..(1881): 821254mologous to Homo sapiens p40,accession number U93569,Smith-Waterman Score=1438.
atggatgaagctggaaaccacattctcagcaaactaacacagaacagaaaaccaaacaccacatgttctcactcggatggccctatatttgtcactgagagcagaagggttgagaacttagatcctgacaggaggcccacctttattggagaaatggctctgcaacttaggccacagaacttcttaccacttggaagcaaaatagttgctttaatggtaaccaaatgccctccttcaagacagtatttcaagaaggaggagtatacgtatattatacaaacatatccaatccctttagaagataattatcaatatcatgcagggaagctggaacacacacacaaaatcgagtactatctagaagatcaagccacaaatctcaagagaagcaagacttttgttggaaaacaaaacaaaatcttgagacatgaaggatctgtaatggacacctgtcgattgtgtctgttcagcagctcctctcccacctgtcttccagtacaacaccttatttcattggagagaaaggttctacctcttctccttaaggttttagtggacagccaaaccagtcttcagtctacagggggcagactgacacctcacacggccgggtacccctctgagacgaaacttccagaggaacgatcagacagcaacatttgctgttcagcaatattcgctgttctgcagcctctgctgctgatacccaggcaaacagagtctggagtagacctccagcaaactccaacagacctgcagctgagggtcctgactgttagaaggaaaacaaacagaaaggacatccacaccaaaaccccatctgtacgtcaccatcatcaaagaccaaaggtagataaaaccacaaagatggggaaaaaacagagcagaaaaactgaaaattctaaaaatcagagcgcctctcctcctccaaaggaacgcagctcctcaccagcaatggaacaaagctggacggagaatgactttgacgagttgagagaagaaggcttcagacgatcaaacttctctgagctaaaggaggaagttcgaacccattgcaaagaagctgaaaaccttgataaaaaattagacgaatggctaactagaataaccaatgtagagaaggccttaaatgacctgatggagctaaaaaccatggcacgagaactatgtgacgaatgcacaagcttcagtagccaattcgatcagctggaagaaacggtatcagtgattgaagatcaaatgaatgaaattaagcgagaagagaagtttagagaaaaaagaatgaaaacaaatgaacaacgcctccaagaaatatgggactatgtgaaaagaccaaatctacgtctgattggtgtacctgaaagtgacagggagaatggaaccaagttggaaaacactctgcaggatattatccaggagaacttccccaacctagcaaggcaggccaacattcaaatacaggaaatacagagaatgccacaaagatactcctcgagaagagcaactccaagacacataactgtcacattcactaaagttgaaatgaaggaaaacatgtcaagggcacccagagagaaaggtcaggttacccacaaagggaagcccatcagactaacagctgatctctcagcagaaactctaaaagccagaagagagtgggggccaatattcagtattcttaaagaaaagaattttcaacccagaatttcatatccagccaaactaagcttcataagtgatggagaaataaaatcctttacagacaagcaaatgctgagagattttgtcaccaccaggcctgccctacaagagctcctgaaggaagcactaaacatggaaaggaacaaccggtaccagccactgcaaaaacatgccaaattgtaa

SEQ ID NO: 3804 - DNA, 471 bp, Homo sapiens
  SIMILAR (4)..(435): 791254mologous to Homo sapiens calsyntenin-2,accession number AJ278018,Smith-Waterman Score=611.
atgatttgtgacaaagagtggcactactatgtcatcaatgtggagtttcctgtggtaaccttatacatggatggagcaacatatgaaccatacctggtgaccaacgactggcccattcatccatctcacatagccatgcaactcacagtcggcgcttgttggcaaggaggagaagtcaccaaaccacagtttgctcagttctttcatggaagcctggccagtctcaccatccgccctggcaaaatggaaagccagaaggtgatctcctgcctgcaggcctgcaaggaagggctggacattaattccttggaaagccttggccaaggaataaagtgttattacaactataaagctacttggaagcccttaagagggaaagctctggatgctgacatacatcacttaattcactacatgcaaagatgtacacacgtgcccaatggtttcatcagtgcccttgctggatactag

SEQ ID NO: 3805 - DNA, 675 bp, Homo sapiens
  SIMILAR (1)..(672): 951254mologous to Homo sapiens calsyntenin-2,accession number AJ278018,Smith-Waterman Score=1094.
atgagccgctatgagcaggtgctacatcacatccgctaccgcaactggcgtccggcttcccttgaggcccggcgtttccggattaagtgctcagaactcaatgggcgctacactagcaatgagttcaacttggaggtcagcatccttcatgaagaccaagtctcagataaggagcatgtcaatcatctgattgtgcagcctcccttcctccagtctgtccatcatcctgagtcccggagtagcatccagcacagttcagtggtcccaagcattgccacagtggtcatcatcatctccgtgtgcatgcttgtgtttgtcgtggccatgggtgtgtaccgggtccggatcgcccaccagcacttcatccaggagactgaggctgccaaggaatctgagatggactgggacgattctgcgctgactatcacagtcaaccccatggaggtgatcctcatgcacggctgggagttctggaaacatgaaggaccagggcatggggaagatgagactgagggagaagaggaggaagaagccgaggaagaaatgagctccagcagtggctctgacgacagcgaagaggaggaggaggaggaagggatgggcagaggcagacatgggcagaatggagccaggcaagcccagctggagtgggatgactccaccctcccctactag

SEQ ID NO: 3806 - DNA, 980 bp, Homo sapiens
  SIMILAR (335)..(979): 711254mologous to Homo sapiens NAG13,accession number AF194537,Smith-Waterman Score=745.
atggccgggtacttctctgagataaaacttccagaggaacgatcaggcagcaacatttgctgttcaccaatatctactgttctgcagactccgctgctgatacccaggcaaagagggtctagagtggacctccagcaaactccaacagacctgcagctgagggtcctgactgttagaaggaaaactaacaaacagaaaggacatccacaccaaaaccccatctgtatgtcaccatcatcaaagaccaaagaggaacgcagctcctcaccaacaacggaacgaagctggacagagaatgactttgacgagttgagagaagaaggcttcagacgatcaaactactctgagctaaaggaggaacttcaaacccatggcaaagaagttaaaaaccttgaaaaaaaaattagatgaatggctaactagaataaccaatgcagagaagtccttaaaggacctgatggagctgaaaaccacagcaagagaaatatgtgacgaatgcacaagtctcagtagccgatgtgatcaacttccacgaccagatggattcacagccgaattctacgagaggtacaaggaggagatggtaccattccttctgaaactattccaatcaatagaaaaagagggaatcctccctaactcactttatgaggccagcatcatcctgataccaaagcctggcagagacacaacaaaaaaagagaattttagaccaatatccctgatgaacattgatgcaaaaatcctcaataaaatactggcaaaccgaatccagcagcacatcaaaaagcttatccaccataatcaagtgggcttcatccctgggatgcaaggctggttcaacatatgcaaatcaataaacataatccagcatataaacagaaacaacggcaaaaaccacatgattacctcaatagatgcagaaaaggcctttgacaaaattcaacaacgcttcatgctaaaaactctcaataaattag

SEQ ID NO: 3807 - DNA, 1035 bp, Homo sapiens
  SIMILAR (250)..(798): 971254mologous to Homo sapiens calsyntenin-2,accession number AJ278018,Smith-Waterman Score=915.
  misc_feature (1)...(1035): n = a,t,c or g
gtgtggtctcttggcacaggtgtgggctccatgagccgctatgagcaggtgctacatcacatccgctaccgcaactggcgtccggcttcccttgaggcccggcgtttccggattaagtgctcagaactcaatgggcgctacactagcaatgagttcaacttggaggtcagcatccttcatgaagaccaagtctcagataaggagcatgtcaatcatctgaaaaagcagcctccttctaacatgttnngaggagaagtcaccaaaccacagtttgctcagttctttcatggaagcctggccagtctcaccatccgccctggcaaaatggaaagccagaaggtgatctcctgcctgcaggcctgcaaggaagggctggacattaattccttggaaagccttggccaaggaataaagtatcacttcaacccctcgcagtccatcctggtgatggaaggagacgacattgggaacattaaccgtgctcttcagaaagtcttctacatcaactccaggcagttcccaacggcgggtgtgcggcgcctcaaagtatcctccaaagtccagtgctttggggaagacgtatgcatcagtatccctgaggtagatgcctatgtgatggtcctccaggccatcgagccccggatcaccctccggggcacagaccacttctggagacctgctgcccagtttgaaagtgccaggggagtgaccctcttccctgatatcaagattgtgagcaccttcgccaaaaccgaagcccccggggacgtgaaaaccacaggtccaaaactcagaattttctctctaggctttcgagaatcctgtttcatgccaaataagcaactctggacatgtgcccaacttccaattcagggtttgaaggaacacagctcctcaccagcaatggaacaaagctggacggagaatgattttgatgagttcagaggagaaggcttcagacgatcaaactactctgagctaaaggaggaagttcgaacccatggcaaagaagttaaaaaccttgaaaaaaaataa

SEQ ID NO: 3808 - DNA, 4891 bp, Homo sapiens
  SIMILAR (1262)..(4153): 951254mologous to Homo sapiens putative p150,accession number U93569,Smith-Waterman Score=4794.
atgctcatgaaactcccggcgaccattctgctgctgcagttgcaactcaaggctggtgctgcaaacagcaaactagaagattgtatcccacctggctcggagggtcctacgcccatggagcctcgctcattgctagcacagcagtctgagatcaaactgcaaggcagcagcaaggctgggggaggggagcccaccattcctctgctgctgatacccaggcaaaaagggtctggagtggacctccagaaaactccaatagacctgcagctgagggtcctgactgttagaaggaaaactaacaaacagaaaggacatccacaccaaaaccccatctgtacgtcactatcatcaaagaccaaaggtagataaaaccacaaagatggggaaaaaaacagagcagaaaaactgaaaattcttaaaaatccagagtgcttctcctcctccaaaaggaacacagctcctcaccagcaacagaacaaacctggacggagaatgacatttgacgagttgagagaagaaggcttcagaagatcaaactactccgagctaaaggaggaagttcgaacccatggcaaagaagttaaaaaccttgaaaaaagattagatgaatggctaactagaatggatgaatggctaactagaataaccaatgcagagaagtccttaaaggacctgatggagctgaaaaccaaggcacgagaactacatgacgaatgcacaagcctcaggagccgattcgatcaactggaagaaagggtatcagtgatggaagatgaaatgaatgaaatgaagcgagaagagaagtttagagaaaaaagaataaaaagaaacgaacaaagcctccaagaaatatgggactatgtgaaaagaccaaatctacgtcggataggcgtacctgaaagtaacggggagaagggaaccaagttggaaaacactctgcaggatattatccaggagaacttccccaaatctagcaaggcaggccaacattcaaattcaggaaatacagagaacaccacaaagatactccttgagaggagcaactccaagacacctaattgtcagattcaacaaagttgaaatgaaggaaaaaatgttaagagcagccagagagaaaggtcgggttacccacaaagggaagcccatcagactaacagctgatctcttggcagaaactctaaaagccagaagagagtgggggccaatattcaacattcttaaagaaaagaattttcaacccagaatttcatatccagccaaaataagcttcatagacagatcaacgagacagaaagttaacaaggatacccaggaattgaactcagctctgcaccaagcggacctaatagacatctacagaactctccaccccaaatcaacagaatatacattcttttcagcaccacaccacacctattccaaaattgaccacatagttggaagtaaagcactcctcagcaaatgtaaaagaacagaaattataacaaactgtctctcagaccacagcgcaatcaaactagaactcaggattaagaaactcactcgaaaccactcaactacatggaaactgaacaacctgcttctgaatgactactgggtacataatgaaatgaaggcagaaataaagatgttctttgaaaccaacgagaacaaagacaaaacataccagaatctctgggacacattcaaaacagtgtgtagagggaaatttatagcactaaatgcccacaagagaaagcaggaaagatctaaaattgacaccctaacatcacaattaaaaggacttgagaagcaagagcaaacacattcaaaagctagcagaaggcaagaaataactaagatcagagcagaactgaaggaaatagagacacaaaaaacccttcaaaaaatcaacgaatccaggagctggttttttgaaaagatcaacaaaattgatagaccgctagcaagactaataaagaataaaagagaggagaatcaaatagacgcaataaaaaatgataaaggggatatcaccactgatcccacagaaatacaaactgccatcagcgaatactataaacacctctacgcaaataaactggaaaatctagaagaaatggataaattcctcgacacctacaccctcccaagactaaaccaggaagaagttgaatctctgaatagaccaataacaggctctgaaattgaggcaataattaatagcttaccaaccaaaaaaagtccaggaccagatggattcatggccgaattctaccagagggacaaggaggagctggtaccattccttctgaaactgttccaatcaatagaaaaagagggaatcctccctaactcattttatgaggccagcatcatgctgataccaaagcctggcagagacacaacaaaaaaagagaattttagaccaatatccctgatgaacatcgatgcaaaaatcctcaataaaatactggcaaaccgaatccagcagcacatcaaaaagcttatccaccatgatcaagtgggcttcatccctgggatgcaaggctggttcaacttacgcaaatcactaaacgtaatccagcatataaacagaaccaatgacaaaaaccacatgattatctcaatagatgcagaaaaggcctttgacaaaattcaacagcccttcatgctaaaaactctcaataaattaggtattgatgggatgtatctcaaaataataagagctatctatgacagacccacagccaatatcatactgaatgggcaaaaactggaagcattccctttgaaaactggcacaagacagggatgccctctctcaccactcctattcaatatagtgttggaagttctggccagggcaatcaggcaggagaaggaaataaagggtattcaattaggaaaagaggaagtcaaattgtccctgtttgcagatgacatgactgtatatttagaaaacgccatcgtctcagccccaaatctccttaagctgataggcaacttcagcaaagtctcaggatacaaaatcaatgtgcaaaaatcacaagcattcttatacactaataacagacaaacagagagccaaatcatgagtgaactcccattcagaattgcttcaaagagaataaaatacctaggaatccaacttacaagggatgtgaaggacctcttcaagcagaactacaaaccactgctcaatgaaataaaagaggatacaaacaaatggaagaacattccatgctcatgggtaggaagaatcaatatcgtgaaaatggccatactgcccaaggtaatttacagattcaatgccatccccatcaagctaccaatgactttcttcacagaattggaaaaaactactttaaagttcatatggaaccaaaaaagagcccgcatcgccaagtcaatcctaagccaaaagaacaaagctggaggcatcacactacctgacttcaaactatattacaaggctacagtaaccaaaacagcatggtactggtaccaaaacagagatatagatgaatggaacagaacagagccctcagaaataatgccgcatatctacaactatctgatctttgacaaacctgagaaaaacaagcaatggggaaaggattccctatttaataaatggtgctgggaaaactggctagccatatgtagaaagctgaaactggatccctttcttacaccttatacaaaaatcaattcaagatggattaaagatttaaacgttagacctaaaaccataaaaaccctagaagaaaacctagacattaccattcaggacataggcgtgggcaaggacttcatgtccaaaacaccaaaagcaatggcaacaaaagacaaaattgacaaatgggatctaattaaactaaagagcttctgcacagcaaaagaaactaccatcagagtgaacaggcaacctacaacatgggagaaaattttcgcaacctactcatctgacaaagggctaatatccagaatctacaatgaactcaaacaaatttacaagaaaaaaacaaacaaccccatcaaaaagtgggtgaaggacatgaacagacacttctcaagagaagacatttatgcagccaaaaaacacatgaaaaaatgctcatcatcactggccatcagagaaatgcaaatcaaaaccactatgaggttttactgggatttaataatgcttataatgatggttggaaatctagtcatcataccagttggaatcacattctttacagagcaaacaacaacaccatggattattttcaatgtggcatcagatacagttttcctattggacctgatcatgaattttaggactgggactgtcaatgaagacagttctgaaatcatcctggaccccaaagtgatcaagatgaattatttaaaaagctggtttgtggttgacttcatctcatccatcccagtggattatatctttcttattgtagaaaaaggaatggattctgaagtttacaagacagccagggcacttcgcattgtgaggtttacaaaaattctcagtctcttgcgtttattacgactttcaaggttaattagatacatacatcaatgggaagaggaacgcagctcctcaccagcaacagaacaaagctggacggagaatgactttgataagttgagagaaggcttcagacgatcaaactactctgagctaaaggaggaagttcgaacccttggcaaagaagttaaaaaccttgaaaaaaaattagacgaatggctaactagaataatcaatgcagagaagtccttaaaggacctgatggagctgaaaaccatggcacgagaactacatgaccaatgcacaagcctcagtagccgatttgatgaactggaagaaagagtatcagtgatggaagatcaaatgaatgaaatgaagtga

SEQ ID NO: 3809 - DNA, 1516 bp, Homo sapiens
  SIMILAR (314)..(757): 321254mologous to Zea mays arabinogalactan protein,accession number AF134579,Smith-Waterman Score=127.
atgtatgcacagcccccaaattgtaagagagaaaaagcgagcggtgatgtctccctctactggtggaagttagcaaagggatgtttgcaaatggaagtctccgaaggtgcacccaactctgcatcaaccccaacagggaacacagtctctcaggagcttaaccgaccactgccgacagccaccttatccgagaaggttctcgtgggtgtgcaggagctctttgcaggcttaggtggcagagagtgcgaccaagaccagtgcattcagagcaccaaattcgttttgcaggctgcagccacgcccctgctgcagagcgagcccagcctcaccagcgacgagctgcacctgcccgggaagcctggcctgggcacgccctgcgccagcctcacactgggcccgcccacaccgcccgcctccatgcccaacctcgccgaggccacgctcgcggacgtgatgccccggaaagatgagcacatgggccaccagttcctgacgcccgatgaggcgccctcgccccccaggctactggcggcgggcagccccctggcgcacagccgcaccatgcacgtgctgggcctggccagcccaggactcccctgcatgaggactctgtgcgcggcctggtgaacctcagctccgtgtgaccccacatggcccccaggccgggggaacacccagaggctccctcccatgggcaagccaggagtgagcggaggggtgtgtccccacagcgactttccccagccaatgcccacggtggagatgacaggccccaggtctggggtacagagacccacttaggatggcacagggtggctggccccggatgctgagagcttggtttcatttgaattttcttccccaacctgagtgctttgacaacaatggaaatagagaagtggctgctttcttttggtgaccctccaggggtggaatcggagtgtgtctgcccgcccttgtgacagacacacggaaggcttctgaccgcttgtggccagaactgcaattgcacttatgtgttatgctactaatatttgaaaccagacctgcccattccatttgttaattaaaaaaaaaaaaaaaatcctaaaagggaaaaaaaccgaccaggtgtggatctgccatgcccacgctgccgtcctgtgttacagtggtgttgcctaatttcccaaggaagtgcctgctttctttttctttttttaattttgtgaattttcaagtgctgttttgttggaagacagtgcaacgatactgagacttaatggacagtgtcatcactcagcttactgggctgaggcgtctgtggagaggtggcaccggggctgcagagggcaggctggggttccgtcgtgtcgggtgtcacttcaccttctgtttggccgctcgatgaggtctcgtgttgagatattgtgtgccacaacccccacagttttcacctccgtgtgtgatgaaacttcccgtggacagccaataaaatgacgtcctctgttattttggaaaaaaaaaaaaaaaaaaa

SEQ ID NO: 3810 - DNA, 447 bp, Homo sapiens
  SIMILAR (224)..(358): 621254mologous to Homo sapiens C/EBP-induced protein,accession number AF123073,Smith-Waterman Score=156.
  misc_feature (1)...(447): n = a,t,c or g
aaatcccgcgtcgacccacgcgtgcggtgatacaggcctaggttattggaattgtaagtggaagtgaaatagagattttatttgtgtgtgcatttatttaacaaacattaattatctccttgattaataaagcactgttcctgccctcaagtagttcatggggggctagtccaagaacaattaaatatagtatgactatacatttatgtaggaatctaatgtgtcatttcttgcagagaatgggaacaattctcctttgcccaaatatgcaacctcaccaaaacctaacaacagttatatgttcaaaagggaacctcctgagggctgtgaaagggtcaaagtctttgaggaatgctcgtaagtatcccttccaccatccgcccnnggnggaaccccccaatggggggcaaacaaggnnggggggggcgcggtttaaacaacccacga

SEQ ID NO: 3811 - DNA, 909 bp, Homo sapiens
  SIMILAR (172)..(708): 461254mologous to Homo sapiens C/EBP-induced protein,accession number AF123073,Smith-Waterman Score=340.
atggtggaaggcaaagggggaaagacacaggtcacatggccaagcaggagcaagagagagaagtgggaggcgctacacacctttaaacaaccagatttcgctcctgttccaaagagtgcacttattcctgtaattcccatcaccaaatcaacaggctcccggttccggaatagcgtggaaggattgaatcaggagattgaaataataattaaagagactggggaaaaggaagagcaacttataccgcaagatattccagatggccatcgtgctccacccccccttgtacagagaagtagcagcacgcgcagcattgacacacagacgcctggtggggcagacaggggaagcaacaacagcagccgttcccagtccgtgtccccaacatcgttcctcaccatttccaatgaaggtagcgaggagagtccttgctcagcggatgacctgcttgttgatcccagagataaagagaatgggaacaattctcctttgcccaaatatgcaacctcaccaaaacctaacaacagttatatgttcaaaagggaacctcctgagggctgtgaaagggtcaaagtctttgaggaatgctcgccaaaacagcttcatgaaatcccagccttttattgtcctgacaaaaacaaggtgaatttcattcctaaaagtggatctgctttctgcctcgtcagcatcctcaagccactccttcctaccccggatcttacactcaagggctctggccacagcctgacagtcaccactggcatgacaaccactctgctgcagcctattgctgtggcctccctgtctacaaacacagagcaagaccgagtctctcgaggaacaagtacagtcatgccatcagcttctctactcccaccaccagaaccaattgaggaagctgaaggatag

SEQ ID NO: 3812 - DNA, 454 bp, Homo sapiens
  SIMILAR (246)..(431): 301254mologous to Mus musculus autosomal dominant polycystic kidney disease type 2 protein,accession number AF242389,Smith- Waterman Score=68.
acggccttgagatgggccctatcgaggtgttgccatggtcgtgtacctcggtaaactaagcaaaaataagtcagttgtacactattagtctgtaaaagggctctccaaatggctcaaggttcaggcctcacaaaccctgcattcgcccgtgccagtccactctggtagaggtaaaaggagaaaaatagctatggaagcgctttaactcgtggacctctttgcgacacccctatcaaccctatcaggcagaacaaattgctccgcaaacctgcggctcgcagagcgatggtggactaccgagctcatcgggtccggcacctcttcaccacgcaggcctcgggtacggaactgaagggagtcctggtgctcggaggagggtggaaggccaagatccctaggtcctggagcaggcagccgggcccacgccgccgaggtatcttgtccgtccacgaaa

SEQ ID NO: 3813 - DNA, 561 bp, Homo sapiens
  SIMILAR (78)..(350): 361254mologous to Mus musculus alpha 1 (X) collagen chain,accession number X67348,Smith-Waterman Score=101.
tcaattaatgaattgaattcccggaagctggcgccagaagatgccggttccgccagctgctcgccgcgcatgcgcaggggagacccggggccttgcagtcaccgggctcaagcacgccggcgcagccaggctcgcgatgggaggtgggggggccggcagccccgtggggctcattgcgacacccttaacaaccctatcaggcagaacaaattgctccgcaaacctgcggcttgcagagcgatggtggactcccgagctcatcgggtccggcacctcttcaccacggaggcctcgggtacggaactggagggagtcctggtgctcggaggagggtggaaggccaagatccctaggtcctggagcagggagccgggcccacgccgccgaggtatcttttccgtccgggccaccgtcgcgggggctcactggcagcggcttctgcgcatgctcggaagagcgggcagggttcccacgtgagctcatggtgataaagaatacagtgactccaacacgtgaggccactaccttgattcttacaaaggcaccagcaattttacccat

SEQ ID NO: 3814 - DNA, 540 bp, Homo sapiens
  SIMILAR (10)..(246): 351254mologous to porcine adenovirus 3 163R*,accession number AF247039,Smith-Waterman Score=102.
tttttccagcccatcttttgggggaaagaccctcaaagtgggaccccgccccacccccacctggccccgccccctctggtccggagccttccatctccatggttacgcggcggtggctgcgagcgcccaactgctccgaccgtcgcggtgagggccccaggacagaagcagacagacacggctcctgctgtcgattccgatccagagctggaacagcggtccattcctgccggaggcgccaccccagggctgcagggctgccctctagcctttgcgcggaagccggacctcgggagacttagtaattggagggtgggtgcagggaaggtgctgagccgcgtccctagcgacccggcagcggcgcgcatgcgcacacagatccggagcgcgcacacagatccggagcgcgcacacagatccggagcgcgcacacagatccggagcgcgcacacagatccggagcgcgcacacagatccggagcgcgcacacagatccggagcgcgcacacagatccggagcgcgacggactctcccactga

SEQ ID NO: 3815 - DNA, 2412 bp, Homo sapiens
  SIMILAR (1390)..(1914): 861254mologous to Rattus norvegicus putative,accession number X74226,Smith-Waterman Score=760.
atggggtttcaccatgttggccaggctggtctcgaactcctgacctcagcagaatcagaaagtctggtaaatgggaaccacaccccacagactgcaacacggggaccctctgcctgtgccagccacagttccctggtgagctctattgagaaggacctgcaagagatcatggactcactggtgctagaggagcctggagctgctggcaagaagcctgccgcaacctctccactgtcaccgatggctaatggtgggcgctacctgctgtctcccccaaccagccccggcgccatgtctgtgggctccagctatgagaacacctctccagccttctctccactctcttcaccagccagcagtggaagctgtgccagtcactcacccagtgggcaagagccaggaccttctgtgcccccgctggtacctgcccgttcctccagctaccatctggccctacagcccccacagtcccgcccaagtggtgctcgctccgagagtcctcggctgagcaggaaagggggccatgagaggcctcccagccctggcctccggggtctgctgacagacagccctgcagctactgtcttggcggaggcccggagagccactgagagcccccggctgggtgggcagctgcctgtggtggccatcagcctgagtgaatacccagcttctggtgctctcagtcaacccaccagcattcctggcagccccaagtttcagcctccagtccctgctccccgaaacaagattggcacactccaggaccgccctcccagccctttccgtgagcctccaggcagtgagcgggtgctaacaaccagcccctcacgccaactggtgggccgaacattttcagatgggttagccacccgtaccctgcagcctcctgagagtccccgcctgggccggcggggcctggacagtatgcgagaactaccccccttaagtccatctctgtcccggcgagctctctccccgctgcccacccggaccaccccagatcccaagctaaacagggaagtggcagagagtcctcggccccggcgctgggcagcccatggggcttcaccagaggacttctccctgacgctgggggcacggggccgtaggacacggagcccctcacccacactgggtgagtctctggcaccccacaagggcagcttcagtggcaggctgagcccagcctacagtctgggctctcttactggggcttcaccctgccagagtccctgtgtccagaggaagctctccagcggggacttgcgggtgcctgtcacaagggagcggaaaaatagcatcacagagatcagtgacaatgaggacgacctcctggagtaccaccggcgacagcgccaagagcggctccgggagcaggagatggagaggctggaacgccagcgcctggagaccatcctgaacctgtgtgccgaatacagccgggctgatgggggacctgaggctggggagcttcccagcattggggaggccaccgcagcattggcactggcaggccggaggccctcacgaggccttgcaggggcctctgggcggagcagcgaggagcctggcgttgccacccaacgcctatgggagagtatggagcgctcagatgaggaaaatctcaaggaggagtgcagcagcactgagagcacccagcaggaggtgctagccctggaagaagagcgggctcaggtgctggggcacgtggagcagctcaaggtccgtgtgaaggagctagagcagcagctgcaggagtcagcccgagaggccgaaatggagcgggcactgctgcagggagagagggaggcagagcgggcactgctgcagaaggagcagaaggcagtggatcagctgcaggagaagctggtggccttggagacaggcatccagaaggagagggacaaggacctccagcgtcaatgttgtgggatgatgggtgacagagccaaagcatcgccatcttggacaagcacggtcattctgaagttccccttgatcaaaaactgcctaaacccaaaggatatcagcctgatggctaaggagctctggagccttaggaccatggacgctctcaataggaaccaaataggccctggatgccagacccagaccatggtgcagaaaggacccttggacctgatcgagacaggcaaagggctgaaagtgcaaacggacaaaccccacctggtgagcctgggcagtgggcgactcagcacagccatcaccctcctgccgctggaggaagactgcctgccttccttggtagatgatctggttccacgactgggcttaaagatcagcttagaaacaaggaggagaggccagttgatgttatgcacaccaaagtttgagaaccagtggcctacaactgataagatgcctgaaacctccacgggctcccactga

SEQ ID NO: 3816 - DNA, 642 bp, Homo sapiens
  SIMILAR (355)..(567): 1001254mologous to Homo sapiens Human secreted protein, SEQ ID NO: 5538,accession number G01457,Smith-Waterman Score=372.
  misc_feature (1)...(642): n = a,t,c or g
atgggccctgtggtcccactccnggtgttcacnnnnctgtgtaacctcctcccctggagcgcnngaaaacatcctactaaagccctgggaaaagagacaaatggtgaagaggagaatgaaaggttgcaggagggagctcctgttttagccctgccacctacctgggggccctctggctaccagtgtccttggaggggcttccttgctgcttctcccactaaggagctctggagccttaggaccatggacgctctcaataggaaccaaataggccctggatgccagacccagaccatggtgcagaaaggacccttggacctgatcgagacaggcaaagggctgaaagtgcaaacggacaaaccccacctggtgagcctgggcagtgggcgactcagcacagccatcaccctcctgccgctggaggaagggaggacggtgattggctctgcagccagagacatctcactacagggcccaggcctggctccagagcactgctacatcgagaacctgcggggcaccctcaccctctacccctgtggcaatgcctgcactattgatgggctccctgtccggcagcctacccggctcactcagggcctttcaatgtcacttccttcacagctgatccaggagacctga

SEQ ID NO: 3817 - DNA, 1761 bp, Homo sapiens
  SIMILAR (729)..(791): 421254mologous to Rattus norvegicus MEGF6,accession number AB011532,Smith-Waterman Score=41.
atggccctgctccccactgttttgtgtctatgggcacaggcacaggtgggtgtccagagacataatcacatcttctggaatgagaaggagcatggccatgggaagagcgggagctgccacaacggggcgagctgcagcgccgaggacggggcctgccactgcacccctggctggactggactcttctgcacacagcgtaagccccacctcctggcctcccagccacttagaataccatgctgcggcctactggccactgtgggcattgtccagaccagcagggagggaggaatgcaggcagccccaggactggtggtacctgactcctgccccacgagaactgaggagctctgcaggggcagctccagacctgactggattcaggggattgacaagcccaaagtcctgcaaggctgcccagcagcattttttgggaaggactgtgggcgcgtatgccagtgtcagaatggcgccagctgtgaccacatcagtggcaagtgcacctgccgcacaggcttcaccgggcaacactgtgaacagagatgtgccccaggaacctttggctatgggtgtcagcagctatgtgagtgcatgaacaactccacctgtgaccatgtcaccggcacctgttactgcagccctggcttcaaaggaatcaggtgtgaccaaggcatcatgctcctgttattcctcattgtggtgctgctgggcctatttgcctggcatcggcggcggcagaaagagaagggccgagacctggctccccgtgtctcctacacacctgccatgaggatgaccagcaccgactactccctctcaggatctaacagatcactatctccgtttttcaatgcccatcatggtcctcacctcctccaaggagcctttcctggttccccagggagacacagggtgaacttgggctcctctttgtggcatgaatgtaaaccgccctggaacgcagagttgggctgcgacagcgaccactgggggccccactgcagcaaccggtgccagtgccagaacggcgccctgtgtaaccccatcacaggcgcctgcgtgtgcgccgccggcttccgtggatggcgctgcgaggagctctgcgcacctggcacccacggcaagggatgccagctgccgtgccagtgccgacacggtgccagctgcgacccccgcgccggcgagtgcctctgcgcacctggctacaccggcgtctactgccacccagtaactggagcttgtacctgccagccaggctggtctggtcaccactgcaatgaatcctgccctgttggctactatggcgatggctgccagctgccttgcacctgtcagaatggcgccgactgccacagcatcactgggggctgcacttgtgctccgggcttcatgggagaggtctgtgccgtttcctgtgcagcagggacctatggccccaactgctcgtccatctgtagctgtaacaatggtggcacctgctccccaatagatggctcctgtacctgcaaggaaggtaatgtgccctctctcccaagcccatccctgacatatgagcacattccccaggtggtgctgccagctgaggggtctcaggatggcacatttgggctgaactgcagtgaacactgtgactgcagccatgctgatggatgtgaccccgtcacaggccactgctgctgcctggccggatggacagacatccaagaaggcttcctggagaaggagggccctaaacggaccctgaaggatatgggctgctga

SEQ ID NO: 3818 - DNA, 2416 bp, Homo sapiens
  SIMILAR (1295)..(2413): 411254mologous to Caenorhabditis elegans similar to spoob- associated GTP-binding protein in the first 4 exons (5' end); similar to trithorax protein in the final 3 exons,accession number U13875,Smith-Waterman Score=641.
tgagtttgagtcaagctccgagtcctcgccctcatcctcggaggatgaggaggaggtagtggccagggaagaggaggaagaagaggaggaggaggagatggtggccgaggaaagcatggcttctgcaggccctgaggactttgagcaggacggggaggaagcggctctggccccgggggcacctgcagtggactcgttgggcatggaagaggaggtggacatcgagactgaggctgtggcccctgaggagcggccctccatgctggacgagccccccttgcctgtgggtgttgaagagccagcggactccagggagccgcctgaggaaccaggcctgagccaggaaggggccatgttgctgtctccagagccccctgccaaggaggtggaggctcgacccccattgtcccctgagcgagctccagaacatgacctggaagtggagccggagccccctatgatgctccccttgccgctgcaaccaccattgccgcccccacgaccaccccggccacccagcccaccgccggagcctgagaccacagatgcctcacacccatctgtccctccggagccccttgccgaggaccaccccccgcatactccaggcctctgtggcagcctggccaagtcgcagagcacagagacggtgccagccacaccaggcggggagcccccgctatcagggggcagcagtggcctgtccctgagctctccgcaagtgcccggcagccccttctcctacccagccccgtcccctagcttgagcagtgggggcctccctcggacacctggccgggacttcagcttcacacccaccttctccgagcccagcgggcccttgctcctgcccgtctgcccactccccactggccgacgcgatgaacgctccgggcccctggcctccccggtgctcctggagacgggcctgcccctccctctgccccttcccctgcccttgcccttggcattgcccgccgtcttgcgggcccaggctcgtgcgcccaccccgctgccacccctgctgcccgcccccctggcctcttgccctcccccaatgaagaggaagccgggccggccccggcgatccccaccatctatgctctccttggatgggcccttggtccgaccaccagcaggggccgcccttggaagggaactcctgctcctgccgggccagccacagacccccgtcttccccagcacccatgacccccggacggtgaccctggacttccggaacgcggggatcccagcccctccaccaccccttcccccccagccacccccacccccacctcccccacctgtagagcccaccaagctgccctttaaggagctagacaaccagtggccctccgaggccattcctccgggcccccgtgggcgcgatgaggtcactgaggaatacatggagttggccaagagccgggggccgtggcgccggccacctaagaagcgccatgaggacctggtgccacctgcaggctcgcccgaactctcgccaccccagcccctcttccggccccgctcggagtttgaggagatgaccatcctgtatgacatctggaacggtggcatcgatgaggaggacatccgcttcctgtgtgtcacctacgagcgactgctacagcaggacaatggcatggactggcttaacgacacgctctgggtctaccatccctccaccagcctctcttcagctaagaagaagaaacgggacgatggcatccgcgagcacgtgacgggctgtgcccgcagtgagggcttctacaccatcgacaagaaggacaagctcagatacctcaacagcagccgtgccagcaccgatgagccccccgcagacacccagggcatgagcatcccagcacagccccacgcctccacccgggcaggctcggagcggcgttcggagcagcgccgcctgctgtcctccttcactggcagctgtgacagtgacctgctcaagttcaaccagctcaagttccggaagaaaaagctcaagttctgcaagagccacattcacgactggggcttgttcgccatggagcccatcgcggctgacgagatggtcatcgagtacgtgggccagaatatccgtcaggtgatcgcagacatgcgggagaagcgttatgaggacgagggcatcgggagcagctacatgttccgggtggaccatgacaccatcatcgacgccaccaagtgcggcaacttcgcgcgcttcatcaaccacagctgcaaccccaactgctatgccaaggtgatcacggtggagtcacagaagaagatagtcatctactcgaagcagcacattaacgtcaatgaggagattacctatgactataagttccccatcgaggacgtcaagatcccctgcctctgtggctccgagaactgccgggggaccctcaactag

SEQ ID NO: 3819 - DNA, 852 bp, Homo sapiens
  SIMILAR (326)..(3): 391254mologous to Leishmania major probable proteophosphoglycan,accession number AL390114,Smith-Waterman Score= 155.
gatgaggaggaggtagtggccagggaagaggaggaagaagaggaggaggaggagatggtgcccgaggaaagcatggcttctgcaggccctgaggactttgagcaggacggggaggaagcggctctggcccggggggcacctgcagtggactcgttgggcatggaagaggaggtggacatcgagactgagcctgtggcccatgagaagcggccctccatgctggacgagccccccttgcctgtgggtgttgaagagccagcggactccagggagccgcctgaggaaccaggcctgagccaggaaggggccatgttgctgtctccagagccccctgccaaggggttggcccaccccaatggatcgcagaaagttatattccgtgtgcccctgcgtgtcatccacggcccaaaagcggtggaactgcaggtttttccaggactccataaacaaccaaccaaccaaccaaaaaagaaccatgtgacccgcattcctggtttaagtcttgctaccacctacttttcattccagtgggaatcagcagacctcccccaacccaaccattacagctaccatcttcgcttccactgcttctgtgctttggctgtcttagatacttgcatgtcatctaattctgggtatttcaaggctgtgttggaatcatacagctctaaggtcttgtcagtaacacagtatggaaatccgagggccacggggtcggcggggcttcgaggccgccccgggtcccaccggctcctccggaagccgcggaccggcctggccctgaccccaggccgccccccgctgcccacccagctctgggcgcccaggtccgacctcccagtcgccctctga

SEQ ID NO: 3820 - DNA, 1999 bp, Homo sapiens
  SIMILAR (1793)..(1981): 821254mologous to Rattus norvegicus matrin cyclophilin,accession number AF043642,Smith-Waterman Score=281.
gagcacagggatcagttgtccctggtttattttgggcttttcttcaattggaggtaaactgcttattggagtccccaatcattcaggggaaattccatttccgtttggagcgtatatccgttgtggagcctcaagaaagaaaaagactaagcttcaggaaatcagagatttagccctagaaataatctctggtcaagaagttgtaagagagattgaaaaccagaaaacagatgcagctagcaaaccgtttgcggaggtacggatactcagttgtggagagctgattcccaaatctaaaggtgagctcatctgtatcgacaactccaactaccacttatataccaatgactcacaaagccatcttcagctcatacttcctctgggatggcagatcagcatttctgaccatctacaagatgatgtcctcacacccacaggaagaggaagaagaggaagaagaagaaggaggagaaggagaagagaggaagaggaggaaaaaggaagaagaaagaggaaagaggaggaagaggaggaggaggatgaagtagagaaggaggaggacgaggaagagaaggaagaggaggaagatgaagtagagaaggaggaggaggagaaggaacatgaggaagaagaggaaagaaggaaaaaatatgaagaaaaagatgctgaggaaataaagcgacagaatgcattatatgaaattgaaatgagaaaaaaactagaaaagaaaagagaagagatgcatgaaagcaggagacggtttcttgcgcctctcttctctagcccgaccgccaactgcagcacctcccttgttcctcggctacggctggcgtcacttccggcggcgttgccaagcaaccgcgtggtacgagtaacaactccaccggctggcgtccgcggcgcttggcgccacagtcacttttccagatctaggagcatcatggacacctcgtcagagatgctggtacggtttggacggcgctgtggacgggcgaaggaaagtacaggcagagattggaacagtttgaagagctcagaagaagacaggaaaatgtgggaaagtttggaacttcctagagacttgttgaatgcctttgaccaaaatgctgatagcgacatggacaataaaatgcaggctgagatggtctcagatggagatgaggaactttctggaaactggagtaaaggtgattcttgctatgttttagcaaaaagactagcgtcattttacctctgccctagagatttgtggaactttgagaaagatgatttagggtacctcgcagaagaaatttctaagcagcaaagcattcaagaggcccagagatccaggaggaaaaaatggttttatgggccaggaccagggtccctgtgctgtgtgcagcctatagacttggtgccctgtgtcccagctgctccagccatggctgaaaggggccaatgtagagctcatgctgtggcttcagagggtggaagccccaagccttggcagcttccacatggtgttgagcctgtaggtgcacagaagtcaagaattgaggtttgggaacctccacctagatttcagaagatgtatggaaatgcctggatgtccaggcaaaagtttgctgcagaggcagggcctcatggagaacctctgctagggcaatgcagaagggaattgtggggccggagctcccacgtagagtccctaatggggcattatctagtggagctattaagtattggagccatgggaataaaggttcaacgtcctcgatgtttttttgacattgccattaacaatcaacctggtgaaaaggggaccgggaaatcaactcagaaaccattacattataagagttgtctctttcacagagttgtcaaggattttatggttcaaggtggtgacttcagtgaaggaaatggacgaggaggggaatctatctatggaggattttttgaaggtcctgcaatgggtcccaatgctacaaacaattttacaaagctagcaggatga

SEQ ID NO: 3821 - DNA, 1238 bp, Homo sapiens
  SIMILAR (53)..(349): 271254mologous to Homo sapiens Human follicle stimulating hormone GPR N-terminal sequence,accession number W03627,Smith- Waterman Score=102.
ggcacgaggaagttgggaagcactatggattaggaacctttctgtaaaataatgtcaccatttcttcttactgtcatcccattaactggttctttctaaaggaaaagaacacttacttggaataaaggaacatgaggaagaagaggaaagaaggaaaaaatatgaataaaaagacgctgaggaaataaagcgacagaatgcattatatgaaattgaaatgagaataaaactagaaaagaaaagagaagagatgcatgaaagcaggagacggtttcttgaacatatgcaggataaacatattatcaaagctgtagaacagcagcagcagccagaggaagaagatgaaaagatgagaaaattcatcaaagcaaaaaaagcgtcttatacaaatggggaaagaaaaagaggctgaaacacacaggcttatggagaaacgaagagaaagaatacataacttcctgagtgaactgttgaaagagaaacttgacaatgaagatatgattattgctagagatattgcagaagctgaggctgaatgggaaaaaagagaaagagaaaaagatgaaaaaaaccaagccgaattaaaaacaattgcagaatatcgagccattgtgatgaaaaataaagaggaagaagaaagacaaagaaaaatagaggctaaagaacaattgctggctgtcatgaaagcagatcagattttctgggaacatgaaaaggagaaaaaatgcaaagctgataaagaacatcaagaggttcaagatgcccatattcagcaaatggccaaaaataagtttaatgcaaagcaagcaaaacaagcagaattagattattgcagacttactgaagctcttgtggctgaaaaggagaaagaatttcaggactatgccagagaggtaattgaacttgaatcggaaacaccaaataaatatatttaccctcttgtaaaagctgtacaggaaggacctggaggtggccgtggaccagtgtttgtggacagaggtggattaagacccagctatcaggcaaatgatgttactggagtccagctccctttttataactctcagggaccaaaatataattttcaaaagtcaaagagaaggctaggttttacatggtagaaaaaaattatttttaacattgagaagactaagttgtagcatatatgagcttcaaatataaatggatttcagttaataaagctgttcttcatttaagtaaaaaaaaaaaaaaaaaaa

SEQ ID NO: 3822 - DNA, 2808 bp, Homo sapiens
  SIMILAR (298)..(570): 1001254mologous to Homo sapiens Human secreted protein, SEQ ID NO: 6318,accession number G02237,Smith-Waterman Score=487.
atggagtactattcagccatcaaaaagaatgagatcccatcatttgcaaggacatggatggcactggaggccattatgttaagtgaaataagccagaatctcaagcaatatttccaggcacgtttcctgcatttcatagatgaagaaacaggctccaagaagtcaagcaacaaaaggattctgcagtccagaaacacacaggacaccttcaagaactcagtgaataagactattgagagacacacaaaacagcaagctatttctctcttcaaacatgatgccacgggctggctcctcatggaccccgttggcctccagctcggcaacaagaacctgtggagctgtcttgtgaggctgctcaccaaagacccagaatggctgaacgccaagatgaagttcttcctccccaacacggacctggattccaggaacgagaccttggaccctgaacagagagtcatcctgcaactcaacaagctgcatgtccagggttcggacacctggcagtctttcattcattgtgtgtgcatgcagctggaggtgcctctggacctggaggtgctgctgctgagtacttttggctatgatgatgggttcaccagccagctgggagctgaggggaaaagccaacctgaatctcagctccaccatggcctgaagcgcccacatcagagctgtgggtcctcaccccgccggaagcagtgcaagaagcagcagctagagttggccaagaagtacctgcagctcctgcggacctctgcccagcagcgctacaggagccaaatccctgggtcagggcagccccacgccttccaccaggtctatgtccctccaatcctgcgccgggccacagcatccttagacactccggagggggccattatgggggacgtcaaggtggaagatggtgctgacgtgagcatctcggacctcttcaacaccagggttaacaagggcccgagggtgaccgtgcttttggggaaggctggcatgggcaagaccacgctggcccaccggctctgccagaagtgggcagagggccatctgaactgtttccaggccctgttcctttttgaattccgccagctcaacttgatcacgaggttcctgacaccgtccgagctcctttttgatctgtacctgagccctgaatcggaccacgacactgtcttccagtacctggagaagaacgctgaccaagtcctgctgatctttgatgggctagatgaggccctccagcctatgggtcctgatggcccaggcccagtcctcacccttttctcccatctctgcaatgggaccctcctgcctggctgccgggtgatggctacctcccgtccagggaagctgcctgcctgcctgcctgcagaggcagccatggtccacatgttgggctttgatgggccacgggtggaagaatatgtgaatcacttcttcagcgcccagccatcgcgggagggggccctggtggagttacagacaaatggacgtctccgaagcctgtgtgcggtgcccgcactgtgccaagtcgcctgtctctgcctccaccatctgcttcctgaccacgccccaggccagtctgtggccctcctgcccaacatgactcagctctatatgcagatggtgctcgccctcagcccccctgggcacttgcccacctcgtccctactggacctgggggaggtggccctgaggggcctggagacagggaaggttatcttctatgcaaaagatattgctccacccttgatagcttttggggccactcacagcctgctgacttccttctgcgtctgcacaggccctgggcaccagcagacaggctatgctttcacccacctcagcctgcaggagtttcttgctgccctgcacctgatggccagccccaaggtgaacaaagacacacttacccagtatgttaccctccattcccgctgggtacagcggaccaaagctagactgggcctctcagaccacctccccaccttcctggcgggcctggcatcctgcacctgccgccccttccttagccacctggcgcagggcaatgaggactgtgtgggtgccaagcaggctgctgtagtgcaggtgttgaagaagttggccacccgcaagctcacagggccaaaggttgtagagctgtgtcactgtgtggatgagacacaggagcctgagctggccagtctcaccgcacaaagcctcccctatcaactgcccttccacaatttcccactgacctgcaccgacctggccaccctgaccaacatcctagagcacagggaggcccccatccacctggattttgatggctgtcccctggagccccactgccctgaggctctggtaggctgtgggcagatagagaatctcagctttaagagcaggaagtgtggggatgcctttgcagaagccctctccaggagcttgccgacaatggggaggctgcagatgctggggttagcaggaagtaaaatcactgcccgaggcatcagccacctggtgaaagctttgcctctctgtccacagctgaaagaagtcagttttcgggacaaccagctcagtgaccaggtggtgctgaacattgtggaggttctccctcacctaccacggctccggaagcttgagcaaggaaggtctggggcccctggggtaggggattccactcctgacacctttgccacaatcttgcagcctgagcagcaacagcatctgcgtgtcaaccctactctgcttggcaagggtggcagtcacgtgtcctaccgtcaggatgcttcaggccagggcaaaggtctctttctggacagctag

SEQ ID NO: 3823 - DNA, 2787 bp, Homo sapiens
  SIMILAR (229)..(2277): 831254mologous to Homo sapiens putative p150,accession number U93564,Smith-Waterman Score=2972.
atgcaaactaccatcagagaatactataagcaactctatgcaaataaactagaaaatctagaagaaatggataaattcctcgacacatacaccctcccaagactaaaccaggaagaagttgaatctctgaatagaccaataacaggctctgaaattgtggcaataatcaatagcttaccaaccaaaaaaagtccagcaccagatggattcacaaccaaattctaccagagaaccgaagacaaaaaccacatgattatctcaatagatgcagaaaagacctttgacaaaattcaacaactcatgctaaaaactctcaataaattaggtattgatgggatgtatctcaaaataataagagctatctatgacaaacccacagccaatatcatactgaatgggcaaatactggaagcattctctttgaaaactggcacaagacagggatgccctctctcaccactcctattcaacatagtgttggaagttctggccagggcaatcaggcaggagaaggaaataaagggtgttcaattaggaaaagaggaagtcaaattgtccctgtttgcagatgacatgattacatatctagaaaaccccattgtctcagcccaaaatctccttaagctgataagcaacttcagcaaagtctcaggatacaaaatcaatgtacaaaaatcacaagcattcttatacaccaataacagagaaacagagaaccaaatcatgagtgaactcccattcacaattgcttcaaagagaatacaatacctaggaatccaacttacaagggatgtgaaggacctcttcaaggagaactacaaaccactgctcaatgaaataaaagaggatacaaacaaatggaataacattccatgctcatggataggaagaatcaatatcatgaaaatggccatactgcccaaggtaatttatagattcaatgacatccccatcaagctaccattgactttcttcacagaattggaaaaaactattttaaagttcatatggaaacaaaaaagagcccgcatagccaagtcaatcctaagcaaaaagaacaaagctggaggcatcatggtacctgacttcaaactatactacaagactacagtaaccaaaacagcatggtactggtaccaaaacagagatataaaccaatggaacagaacagagccctcagaaataatgccacatatctgtaactatctgatctttgacaaacctgacaaaaacaagaaatggggaaaggattccctatttaataaatggtgctgggaaaactggctagctacatgtagaaagctgaaactggatcccttctttacaccttatacaaaaattaattcaaggtggattaaagacttaaatgttacatctaaaaccataaaaaccctagaagaaaacctaggcaataccattgaggacataggcatgggcaaggacttcatgtttaaaacaccaaaagcaatggcaacaaaagccaaaattgacaaatgggatctaattaaactaaagagcttctgcacagcaaaagaaactaccatcagagtgaacaggcaacctacagaatgggagaaaatttttgcaacctactcatctgacaaagggctaatatccagaatctacaatgaactcaaacaaatttacaagaaaaaaacaaagaaccccatcaaaaagtgggcgaaggacatgaacagacacttctctaaagaagacatttatgcagccaaaggacacgtgaaaaaatgctcatcatcaatggcaatcagagaaatgcaaatcaaacccacaatgagataccatctcacaccagttagaatggcaatcattaaaaagtcaggaaaccacaggtgctggagaggatgtggagaaatgggaacatttttacactgttggtgtgactgtaaactagttcaaccattgtggaagtcagtgtggcgattcctcaaggatctagaactagaaataccatttgacccagccatcccattgctgagtatatacccaaaggactataaatcatgctgctataaagacacatgcacacgtagcccaggcaggcagtacctgctagagctgcaggcacagtggtattgcttctgtgtgaactcacctgcagagtgcatcttcctgttgtccctggaaacttggaaacacctggacagcaggatctttgcaaccctcagatcaagagatcccctcatgagcccacaccaccagggccttgagcctgagacagagctgtgtggaatctcagcagagcagctgctcaggcatgcagagacccaggagctttacataccctggccccgatatccccagcaaggtgggagccattccagcctgcaggctttggagagtccaagcagtccagatgaggaagggtcccccaagctcagcacagctgctttgccagaatgtgtccagattgcttctttaaacgagaccccatccattcctcctcactgggtaaataatgaaattaaggcacaaatcaagaagttctttgaaactaatgagagcaaagatacaatgtgccagaatctccaggatgcagctaaagcagtgttaagagggaaatttataccactaaatgcccacatcaaaaagctagaaagatctgaagttaacaacctaacgttgcaacaaaaagaactagagaaccaagagcaaacaaactccaaagctagcagaagacaagaaataaccaagattagagctgaactgaaagagatggggacacataaaccccttcaaaaatcaatgaatgtaggagctgttttctga

SEQ ID NO: 3824 - DNA, 1787 bp, Homo sapiens
  SIMILAR (1525)..(1692): 891254mologous to Homo sapiens putative p150,accession number U93569,Smith-Waterman Score=260.
aaccactgattacgcctagcttggcacgagggcaggtgctggcactttcctccatccaagtttagttttttttcacgtaaattagttggtatcacgcattgtttgtgttggggtgggagttttgattgagaatttttgtcatgatcttttgttggggacgaagactgacctgtaaattaagaacagaaaagaaggcacagagccagtgtcacaacttgcctgcaggagcctgagcctacccctctccactaggtataccacaggttttttgtaatccatcaccttgattcttatctcctgtttcctgacttggctttcttgcatattatttcaattccctttagcagatttgctgcttttaaactcgttagcttaaaagcagcagcctggactcacattcctaatttctgttttataaaggccattgcttttgatattctcactctcaggctgtggcccaactacgggtctcttcagcaccccagctctgtagaaaggaaatgagacttgtttctgacaaggtcacccataacgacataagaatcctcaagtttggaagtgtaaaaaaaatcgactcaaaggatgagaaagagctgaaatacatgtgtacaaatagcattaggacacctgaagctaatcagatctgcacctggtattcagcaaactctagtgatggtgagcatggaagtgcttttataaataaggaaagtcttcctgagaaagtgatatttgagcaaaggcttgaaggaggtgagggaaggaagcctgcagatacctggggaaatcattccgggaagaaagaagctgatgcaaatgctctcagaaaagacactgtaaagccaacaccactattgaaaaggatttctacaaagacagatacatcagaaaatgatagctcatttggtggagcagagaaacaaggattgcatgtttctgcaaataatgccagcagccacaagctgaaagaaatacaagctaccatcagagactactataaacacctctatgcaaatgaactagaaaatccagaagaaatggataaattcctcgacacatacaccctccaaagactaaaccaggaagaagttgaatctctgaatagaccaataacaggctctgaagttgaggcaataattaatagcctaccaaccaaaaaaagtccaggaccagacggactcacagccgaattctatcagaggtacaaggaggagctgcaaagccttgcagggatacaacaaaaaaaagagaattttagaccaatatccctgatgaacatcgatgcaaaaatcctcaataaaatactggcaaaccgaatccagcagcacatcaaaaagcttatccaccatgatcaagtgggcttcatccctgggatgcaaggctggttcaacatatgcaaatcaataaacgtaatccagcatataaacagaaccaaagacaaaaaccacgtgattttctcaatagatgcagaaaaggcctttgacaaaattcaacagcccttcatgctaaaaactctcaataaattagagaataaaatacccaggaatccaacttacaagggatgtgaaggacctcttcaaggagaactacaaaccactgctaagcaaaataaaagaagatacaaagaaatggaagaccattctatgctcatgggtaggaagaatcaatatcgtgaaaatggccatactgcccaaggctccacttccccttccgccatgattgtaactttcctggaaccctcatcagaagcagatgctggagccatgcttgtgcagcctgcagaaccatga

SEQ ID NO: 3825 - DNA, 2400 bp, Homo sapiens
  SIMILAR (1040)..(1081): 1001254mologous to Homo sapiens putative p150,accession number U93572,Smith-Waterman Score=72.
atgggagactttaacaccccactgtcaacattagacagatcaacgagacagaaagtcaacaaggatacccaggaattgaactcagctctgcaccaagcggacctaatagacatctacagaactctccaccccaaatcaacagaatatacattttttgcagcaccacaccacacctattccaaaattgaccacatacttggaagtaaagctctcctcagcaaatgtaaaataacagagattataacaaactatctctcagaccacagtgtaatcaaactagaactcagaattaagaatctcactcaaaaccgctcaactacatggaaactgaacaacctgctcctgaatgactactggatacataacgaaatgaatgcagaaataaagatgttctttgaaaccaacgagaacaaagacacaacataccagaatctctgggacacatttaaagcagtgtgtagagggaaatttatagcactaaatgcccacaagagaaagcaggaaagatccaaaattgacaccctaacatcacaattaaaagaactagaaaagcaagagcaaacacattcaaaagctagcagaaggcaagaaataactaaaatcagaacagaactaaaggaaatagagacacaaaaaacccttcaaaaaattaatgaatccaggagctggttttttgaaaggatcaacaaaagtgatagaatgctagcaagactaataaagaaaaaaagagagaagaatcaaatagacacaataaaaaatgataaaggggatatcaccaccgatcccacagaaatacagactaccatcagagaatactacaaacacctctacgcaaataaactagaaaatctagaagaaatggataaattcctcgacacatacactctcccaagactaaaccaggaagaagttgaatctctgaatagaccaataacaggagctgaaattgtggcaataatcaatagtttaccaaccaaaaagagtccaggaccagatggattcacagccgaattctaccagaggtacaaggaggaactgcatcattctgataccaaagccgggcagagacacaaccaaaaaaagaattttagaccaatatccttgatgaacattgatgcaaaaatcctcaataaaatactggcaaaacgaatccagcagcacatcaaaaagctcatccaccatgatcaagtgggcttcatccctgggatgcaagtctggttcaatatacacaaatcaataaatgtaatccagcatataaacagagccaaagacaaaaaccacatgattatctcaatagatgcagaaaaggcctttgacaaaattcaacagcccttcatgctaaaaactctcaataaattagtgttggaagttctggccagggcaattaggcaggagaaggaaataaagggtattcaattaggaaaagaggaagtcaaattgtccctgtttgcagacgacatgattgtatatctagaaaaccccatcgtctcagcccaaaatctccttaagctgataagcaacttcagcaaagtctcaggatacaaaatcaatgtacaaaagtcacaagcattcttatacaccaacaacagacaaacagagagccaaatcatgagtgaactcccattcacaattgcttcaaagagaataaaatacctaggaatccaacttacaagggatgtgaaggacctcttcaaggagaactacaaaccactgctcaaggaaataaaagaggatacaaacaaatggaagaacattccatgctcatgggtaggaagaatcaatatcgtgaaaatggccatacttgcccaaggtaatttacagattcaatgccatccccatcaagctaccaatgactttcttcacagaattggaaaaaaactactttaaagttcatatggaaccaaaaaagagcccgcattgccaagtcaatcctaagacaaaagaacaaagctggaggcatcacactacctgacttcaaactatactacaaggctacagtaaccaaaacagcatcggtactggtaccaaaacagagatatagaccaatggaacagaacagaggcctcagaaataatgccgcatatctacactattctgatcctttggacaaacctgagaaaaacaagcatgggggaaaggcatccctaatttataaaatggctgctggggaaaactggctagcccatatgcagaaaactgaaactggaccccttccttacagaaacttatataaatattaactcaagatggattaaagacttaaatgtaagatttaaaatcataaaaaccctagaagaaaacctaggcaataccattcagaacataggcatgggaaaagacttcatggctaaaacaccaaaagcaatggcaacaaaagccaaattgacaaatgggatctaa

SEQ ID NO: 3826 - DNA, 1658 bp, Homo sapiens
  SIMILAR (525)..(1655): 861254mologous to Homo sapiens putative p150,accession number U93563,Smith-Waterman Score=1711.
agaatactataaacacctctacgcaaataaactagacaatctagaagaaatggataaattccaggacacatacaccctcccaagactaaaccaggaagaagttgaatctctaaatagaccaatatcaggctctgaaattgaggcaataattaatagcctaccaaccaaaaaaagtccaggatcagacacattcacagccgaattctaccagaggtacaaagaggagctggtaccattccttctgaaactattccaatcaatagaaaaacagggaatcctccctaactcattttatgaggccagcatcatcctgataccaaagcctggcagaggcacaacaaaaaaaaagagaattttagaccaatatccctgatgaacatcgatgcaaaaatcctcaataaaatgctggcaaaccggaatccagcagcacatcaaaaagcttatccaccatggatcaagtgggcttcatccctggggatgcaaggcttgttcaacatatgcaaatcaataaacgtaatccatcatataaacagaaccaaagacaaaaactacatgattatctccaataggatgcagaaaaggcctttgacaaaattcaacagcccttcatgctaaaaactctcaataaattaggaataaaatacctaggaatccaacttacaagggatgtgaaggacctcttcaaggagaactacaaaccactgctcaaggaaataaaagaggatacaaacaaatggaataacattccatgctcatgggtaggaagaatcaatatcgtgaaaacggccatactgcccaaggtaatttatagattcaatgccatccccatcaagctaccaatgcctttcttcacagaattggaaaaaactactttaaagttcatatggaaccaaaaaagagcctgcatcaccaactcaatcctaagccaaaagaacaaagctggaggcatcacactacctgacttcaaactatactacaaggctacagtaaccaaaacagcatggtactggtaccaaaacagaaatatagatcaatggaacagaacagagccctcagaaataacgccgcatatctacaactatgtgatctttgacaaacctgacaaaaacaagaaatggggaaaggattccctatttaataaatggtgctgggaaaactggctagccatatgtagaaagctgaaactagatcccttccttacaccttatacaaaaatcaattcaagatggattaaagacttaaacgttagacctaaaaccataaaaaccctagaagaaaacccaggcagtaccattcaggacataggcatgggcaaggacttcatgtctaaaacaccaaaagcaatggcaacaaaagacaaaattgacaaatgggatctaattaaactaaagagcttctgtacagcaaaagaaactaccatcagagtgaacaggcaacctacagaatgggagaaaatttttgcaacctactcatctgacaaagggctaataatatccagaacctacaatgaactcaaacaaatttacaagaaagaaacaaacaactccatcaaaaagtgggtgaaggatatgaacagacacttctcaaaagaagacatttatgcagccaaaaaacacatgaaaaatttctcatcatcactggccatcagagaaatgtaa

SEQ ID NO: 3827 - DNA, 475 bp, Homo sapiens
  SIMILAR (205)..(56): 341254mologous to Galleria mellonella sericin-1,accession number AF095241,Smith-Waterman Score=82.
gggaattccctcagcgcggctcacgtttcggaacacgtctgcctttcatgcctcccgaagagcctccccgcatcccgtgccccctgctcgctgctgccgctgacccttgggcgctgcgctggtccagagcgtgttgtcctctgacgccgtcagaacctgagctccctgcgagctgggactccgccgtgtcttcattgcctccagtgcaaagcaactgcttgcaagagaacaaaagtgtgttcaggtgcacagagtagaaaattcaaggagcctgaaagggtatttggtgaagacttgatgtgtttttcccagtcctaacctccaaggcccagttctcccctggggcagagggaaacccgtttcttacgggtctgcaaagaaagtctatgcaggaacatctacgtgcgtttctgcaaaagggcagttactttacttggggctcttatacttaacgtagctcggagagcgccccatg

SEQ ID NO: 3828 - DNA, 978 bp, Homo sapiens
  SIMILAR (35)..(436): 271254mologous to Caenorhabditis elegans weak similarity to collagens; glycine- and proline-rich,accession number AF000298,Smith-Waterman Score=83.
ttattcacggatgacctttgccaacctgtggaagccacctccggacaggccatggtccagtccaggggggccaccacgcacggtggggggcgggggggcagctgcaagctcctgggggacagaggacaaggttccaccagccaggtgggaaggtggggcagcagctgccaccctccaaccggaggacacagcgaggtcaccctgctggccgactgcaaggaagcccctgcgtggggtcctgcagggagcatctctggggtccacggcatccatgctaggagctgcttcagggacaccaaggcctcctccatcctggctggtgtctgtcccgtcacccagggccccgtgctggggtgtaccaggagcaggtgacacagggtggaccagagactcagcccccaggcgcccgtgaatatccacagcccgcagggagggaggggcggccccaaatacttcgatttccaaaatcctcttcatcacagtgtcttgtggaattttgttctcttgcaagcagttgctttgcactggaggcaatgaagacacggcggagtcccagctcgcagggagctcaggttctgacggcgtcagaggacaacacgctctggaccagcgcagcgcccaagggtcagcggcagcagcgagcagggggcacgggatgcggggaggctcttcgggaggcatgaaaggcagacgtgttccgaaacgtgagccgcgcaccgaggccgcctcttcgtccacagcctgacgccagccaccgccgccgccgtctccactgccgcacgcacgccgccacttccgcttccgtccgtgctgcggccccgcacgtgacgcagcgccttctcgcgcccagactgaagcaccgccccccctcaggacccagagtgcgctgtcctggcccctctgcagtaggactgacgggaagctgtcgagggggcagtcccgcgatggcagcagggcccccacgcctggcgtcctcat

SEQ ID NO: 3829 - DNA, 2132 bp, Homo sapiens
  SIMILAR (905)..(1405): 251254mologous to Phytophthora infestans cyst germination specific acidic repeat protein precursor,accession number AF061185,Smith-Waterman Score=120.
acgccggtcagcgacgaggaggaaggaagcctccatcacacgacctggcggaacctgagaattggcgtgagaatcgcctgccccgcgggagaaaatgcccagtcctccgagagtccagtgagggcttgccagccagggaccaagacccagtatggcctaaaccaggcctggtcaccaggggtcaggcgggaccttatacagggctcagcagagagacctgcccgctaccctgctccaggggagatgggggtgggggccttcatcccactcgggcatgacaagaggagagcagccagccagcatctgcacgtctcaggcagggaagggcctgaagccctgggaagcagaggctccgccctcaggaaacaggtcccggcctggctccctcacagccttcggacttgccccgtggaccgaaacccccaggcaccttgcgccaggactggcctgatggtggagacgccacaccatgagcagtgggtccgaggagagcactacaggtacaagttcagccgtcctgggggaaggcacgccgccgagggcaagtggtgggtgcggaagaggatcggagcctacttccctccgctcagcctggaggagctgaggccctacttcagggacccccacactctgatgctggggcagcgggtgaccgagcgggagcttgatggagagcctcgggggcctgtcactgtggaaggcaggtctgctaccacctctgggtaccccaccaaggtcacaaaaataggggggcccctggacccagctgggggcctcgagggcccactccatggagcccttggctctgaccccttggaggtctcagactgcccaggtcctcatctgagcaggaaggtttgggagaatggcagctttggagcttcagatcagcaacacacaagaataccacagacggcagcagctggcccacagtggcagaaaagaaagctccctcgtcaaaacagtatcacagcagcatggagacctagagataaacggggcacagtaaccacccgagaaatcgtcccacatgcggccaggtaccgcccaatgagaacaacacgagaaatcgtcccacacacacggccaggtaccttccgacaagaacaacccgagaaatcattccacacatgcaaccaggtaccttctgacaacaacaaccacagaaatcatcccccacgcggccaggtaccgtccaacgagaacgaccaggtaccttccgacaagaacaaccaggtaccttccgacgaaaatgacccgagaaattgtcccacatgcagccacgtaccttccaatgagaacaacccgagaaatcatcccacacacggccacataccttccaacgagaacaaccagtaccttccgatgagaacaaccagccaggtaccttccaacgaggacaacccagggtgtcttccgacaagaacaaccaggcaccttccaacgagaacaaccaggtaccttccgacgagaatgacccaagaaattgtcccacacgtggcctggtaccttccgacaaaggctctgagaccattcaatgggaagaggacagccttttcagcaaatgccgcaaagaggagcgaggccccgacgctcagatgagccttgagaacctgatgcccagtgaacccgccagacacagagggcaccggtcctgcgatgccgtctctggaatgtccagaacagggaaacccacagagacgctgggcagggagaagaaggtccagtggggctcaggatgccgggcagggaacgcgcttcactccttctctgtggcgtgcatggggctggagccgcttaagaccaaggctcagtgcacctggatgctggttaacccgaaagtgccgtacggagccaccagtggtcccacaagctctgatgatggccgcagtcacggacatgcaaactttgattcactgaggaccacgcgagcaaatgacaggtggggccatctcctctgcctcatctttttcctaacctggaagttgttccttaaacacctgcccacggtgggctactgtgaagcccttcacccgcagccatgtggacatgctggaggaacatcaacagactctcatctgaacaacaaaaaagaggaaagaacactcagcaaaggaaagaagaggcactga

SEQ ID NO: 3830 - DNA, 457 bp, Homo sapiens
tctaataactaaaagcttattgttattaattttattgtgctatttagaacctgaaagaagcataattctggaccctgtgcttcttgcaaggtttaggggatgaaggggtggtttttacctggccttggtgtctctgagaaccgggttggcatggaggaatcattaatcagccagtggggatgagaaagctggtccagtctgttagcatatttaaaagcctctccggtgtaaaatccctttcttgtaaataaaatcgccaaaacgtccccacatgggggtatcaagatgccgtgaaccccgttcttgctttcagggcttgtacagcctataaatcagactttaatcatctccgtttcatttcagtgtagtccttcttatagggcggcgtttgggagcaaaatatatctggacaagactttctccagagggtcatattataccaaggaaatgaattccc

SEQ ID NO: 3831 - DNA, 1268 bp, Homo sapiens
  SIMILAR (1220)..(852): 291254mologous to Homo sapiens dJ118B18.1 (forkhead box C1),accession number AL034344,Smith-Waterman Score=105.
tcagccagtggggatagaaagctggtccagtctgttagcatatttaaaagcctctccggtgtaaatccctttcttgtaaataaaatcgccaaaacgtccccacatgggggtataagatgccgtgaaccccgttcttgctttcagggcttgtacagcccgggcatgtgggattccaaggaactgaacattccgccagtgctctggggtttggtgaagagggaaagtcgagggacaaatcttgggtaagcacagtgttcggtgagcttcctccttcccacgaccaacatacagatagggtaatgaagttaaaatgccagcaagagaaacaacaccgcacagagttcctactggggcacaacctagtgaagctggagaaaaaggccaccatcctccagaccgcagaatggtagatccactgacgcttgcactgtgcacctggaaaagctgcagacactcaatgccagattgtaaggcagccgggagagaggctgtaccttgcaaagtcacaggggcagagcgcccaagacctcgggcacctacttcagcatgacccagtggtaaactggaagggctaagtttgtggtgcacacagtcttgcagctgcatgctccatagggcaggggtcatatctgtcttctttaccatggaagatgtggcacccacacgtggccttttacactgaagagctgctataggtatcattagtccaataactatttcggtaacaaagaccagcaacaactgcaggtggtgcagggtcgggggctgtgctaactgacttaggggagcattagaggcaggtggaggctccagaaccaaaaaggccgggatgccttcaacaagaggttgaggggagggatggacaagcctggagcgggtggaacctgcggcagcggacgcagaaaccggccgctgagagaccgaagcgaccggaagtgaagggcgggaccggaaccggctgaaaaaccggaagtggtggtttgaaacggaaatatgttggggacggaacaactgcttcctttgaatctcttcgggtgctaatcaaatggccgctgtaagggatctccacaaagccacgaagaagccaggcctttccgagactgtaaccgctgtgcagatagcgcgatccctgggtggccgctctctcgttctgcgcgtgcgctcgttgagatctgatggtttaaaggggcaggttcccctgtgtgcacgctctctctctctcctgctgccattaagacatgccttgcttcctcttcaccttcttccat

SEQ ID NO: 3832 - DNA, 961 bp, Homo sapiens
  SIMILAR (3)..(704): 371254mologous to Nephila madagascariensis flagelliform silk protein,accession number AF218624,Smith-Waterman Score=230.
atggcggcgcggactctggcgagcgccttggtcctcacgctctgggtttgggcgctggctccggcgggggccgtggacgctatgggccctcacgcagccgtccgtctggccgagctgctgaccccggaggagtgcggccatttccggtcgctcctagaggcgcccgagcccgacgtggaggccgagttgtcccggctttctgaagaccggctggcgcggcctgagccgctcaacaccacgtcgttgtctccgagccggcggcggcggcgagaggcggcggaggacccggcgggcagggtagccgggcctggagaggtgtccgacggctgccgggaggcgctggcggcctggctggccccccaggccgcgtccctgtcctgggaccgcctggctcgggccctgcggcgcagcggccgcccggacgtggccagggagctgggcaagaacctccaccagcaggcgacgctgcagctgcgcaagttcgggcagcgcttcctgccgcggcccggcgccgccgcccgcgtgccctttgccccggccccgcgcccccggcgcgccgcggtccccgcgccggactgggacgccctgcagctgatcgtggagcgcctgccgcagcccctgtacgagcggagccccatgggttgggcggggccgctggcgctcggcctcctcaccggcttcgtgggggcgctgggcacccggggccctggtcgtcctgctcacgctatggatcactggcggcggcggcgacggcgaccgggcgtcgcccggcagccccggcccgctcgccacagtgcagggctggtgggaaacaaagctgctccttcctaaagagcggcgcgcgcccccgggggcctgggctgcagatgggccagattctccctcacctcacagtgcccttgccctcagctgtaaaatgggagcacagtcttggggcagtggtgctttggacggtttataa

SEQ ID NO: 3833 - DNA, 485 bp, Homo sapiens
  SIMILAR (149)..(382): 981254mologous to Homo sapiens Similar to CG15084 gene product,accession number BC002905,Smith-Waterman Score=413.
tactccatggaggagaaagagcacagagtagcccacacttggtgttagaaggcccgtacccagaaatgccatgcctcatcactgttcatttttcactggacggacggtgccctccatggctacacctggctacaatgaaggctgggacaagttccggatgaaatgccacctctgtgtcaactacatcgagatgcagacggaccccgccaactgcgactacgtgatcgtgagtggcgcccagcgcaaggaggagcgctgggacatggcggacaatgagcaggtgctgaccacagagcatgagaagaagcagaagctggagacggacgccatgttccggctggagcatggcgaggccgaccgcagcacactcaagaaggcgctggcgcacactgagccacatccaggaggcccagagcgcctggaaggacgacttcgccctcaacagcatgctgcggagaaggttccgggtaccatccaagccctag

SEQ ID NO: 3834 - DNA, 534 bp, Homo sapiens
  SIMILAR (346)..(531): 801254mologous to Oryctolagus cuniculus elongation factor 1 gamma,accession number X68142,Smith-Waterman Score=250.
atggaagaaaaagaagtaagaggatggaaaagggagagcgtggagaaccctactcgctttctctgcgaaatcaccaaggcagctgggagcctgaacacatgtcctgaaaaccggagggcgggtgttctagcatttaagggtgatgatggattctctgtgtgggagagcaatgctattgccacctatgtgagcaatgaggagctgtggggaagtgctccagaggcagcagcccaggctgtgcagtgggtgaactttgctgatgatagccagtaccagggtgttcccaccttgggcaaaatgcaccatgacaaacaggccacccaggatgcaggggaagaggtgagccccagttccaggctgtcttgggtggaaatgaaactgtgtgagaacatggcccactttgatgctaaaatatttgcagagagccagcctaaaaaggacactccacggaaagagaaaggttcacgggaagagaagcagaagccccaggctgagcggaaggaggagaaaaaggtggccacccctgctccttaa

SEQ ID NO: 3835 - DNA, 1388 bp, Homo sapiens
  SIMILAR (557)..(1324): 651254mologous to Homo sapiens homologue to elongation factor 1-gamma from A.salina,accession number X63526,Smith-Waterman Score =773.
caccatggcggctgggaccctgtacacgtatcctgaaaactggagggccttcaaggctctcatcgctgctcagtacagcggggctcaggtccgcgtgctctccgcaccaccccacttccattttggccaaaccaaccgcacccctgaatttctccgcaaatttcctgccggcaaggtcccagcatttgagggtgatgatggattctgtgtgtttgagagcaacgccattgcctactatgtgagcaatgaggagctgcggggaagtactccagaggcagcagcccagtgtggtgcagtgggtgagctttgctgattccgatatagtgcccccagccagtacctgggtgttccccaccttgggcatcatgcaccacaaacaaacaggccactgagaatgcaaaggaggaagtgaggcgaattctggggctgctggatgcttacttgaagacgaggacttttctggtgggcgaacgagtgacattggctgacatcacagttgtctgcaccctgttgtggctctataagcaggttctagagccttctttccgccaggcctttcccaataccaccccgctggttcctcacctgcattaaccagccccagttccgggcgtgtcttgggcgaagtgaaactgtgtgagaagatggcccagtttgatgctaaaaagtttgcagagacccagcctaaaaagggcacaccacggaaagagaagggttcacgggaagagaagcagaagccccaggctgagcggaaggaggagaaaaaaggcggctgcccctgctcctgaggaggagatggatgaatgtgagcaggcgctggctgcttgagcccaaggccaaggaccccttcgctcacctgcccaagagtacctttgtgttggatgaatttaagcgcaagtactccaatgaggacacactctctgtggcactgcccatatttctgggagcactttgataaggacggctggtccctgktggtactcagagtatcgcttccctgaggaacctcactcagcccttcatgagctgcaatctcatcactggaatgctccagcgactggacaagctgaggaagaatgccttcgccagtgtcatcctttttggaaccaacaatagcagctccatttctggagtctgggtcttccgaggccaggagcttgcctttccgctgagtccagattggcaggtggactacgagtcatacacatggcggaaactggatcctggcagagaggagacccagacgctggttcgagagtacttttcctgggagggggccttccagcatgtgggcaaagccttcaatcacggcaagatcttcaagtgaacatctcttgccatcacctagctgcctgcacctgcccttcagggagatgggggtcattaaa

SEQ ID NO: 3836 - DNA, 489 bp, Homo sapiens
  SIMILAR (92)..(283): 691254mologous to Homo sapiens transformation-related protein,accession number L24521,Smith-Waterman Score=241.
  misc_feature (1)...(489): n = a,t,c or g
ttttttttttttttttttttnagatggagtctcactctgtggccaggctggagtgcaatggcncagtcttggctcactgcaacctctgcctcctgggttcaagcgattctcctgcctcagcctcccaagcagctgggactacaggcgtgcaccaccacgccagctaatctttgtatatttattagagacggggtttcaccatgttggccaggatggtcttgatctcttgatcttgtgatctgtctgcctcagcctcccaaagtgctgggattacaggcgtgacatccngcacctggccggtagactgaattttattccctcatctggtttgcaggtgggaccattgcaaacgtggtccccagagactcagctaatgagcttctgtcctttcaagtctgcacctttcctttgaaactggggccaaaggtgatgtcctaacccatggcagaccttactcccattaaaatcctggaattccaccacactgga

SEQ ID NO: 3837 - DNA, 547 bp, Homo sapiens
  SIMILAR (161)..(544): 1001254mologous to Cloning vector pSacBII SacB,accession number U09128,Smith-Waterman Score=679.
aatgatctctcgcagcacccaagtctgcaccctgcttcactcactcagcaatctgtccaggagctccttcaatgtcaagacatccagaaagatctgtcttcctccttttccaggcccctgtgcaggaaccccctgcacctggtcccccgtgatgggtgctcagaacgttcagcagtttatcgatgaaggcaattatacatccggcgacaaccatacgctgagagaccctcactacgttgaagacaaaggccataaataccttgtattcgaagccaacacgggaacagaaaacggataccaaggcgaagaatctttatttaacaaagcgtactacggcggcggcacgaacttcttccgtaaagaaagccagaagcttcagcagagcgctaaaaaacgcgatgctgagttagcgaacggcgccctcggtatcatagagttaaataatgattacacattgaaaaaagtaatgaagccgctgatcacttcaaacacggtaactgatgaaatcgagcgcgcgaatgttttcaaaatgaacggcaaatggtag

SEQ ID NO: 3838 - DNA, 900 bp, Homo sapiens
  SIMILAR (53)..(136): 531254mologous to Chlamydomonas reinhardtii vegetative cell wall protein gp1,accession number AF309494,Smith-Waterman Score=72.
atgtcccccatgggagctgatattggatcagttcaggaaaagcctcggaatctctccagcaaacactggaccactctgcccggctcctcccagctgcatgtatccacccagcccccagatgccagcaaaggctccactgaccaccccccagaggggcggccaggaaccacacctgagccatttccaagggtgacatgtgtcacagaactgtggggaaggggctatccagagattcccagtaggagacacggggagacctgcaggaatgatctctcgcagcacccaagtctgcaccctgcttcactcactcagcaatctgtccaggagctccttcaatgtcaagacatccagaaagatctgtcttcctccttttccaggcccctgtgcaggaaccccctgcacctggtcccccgtgatgggtgctcagggagcctgattttggcactggtgtatttccagaaccaagctggtgaaaggccgcagacttcgaacctctgggcctttgtccaggacgttccctcagcgctcagtgcccttcctggtggcctcctacatcttcagatcccggctgagctctgcttaaatccgggaccggaacaccgacagtcgctcccaggcaaccagcacctgctgcgccccgtttccagcgacctccccaaccgcgtggactcgcatccacgtgcccggcggggccgcagcagaaaggctcggaccccccaggacgatcggccggatctgaagcagtgtttccggaaagtctctcaaaccctgtttgtcctctcctctcataccaccaccacaatcatcaacacagaagaaagcttctgtggccaaatttgtggagttttccccatacaccaagcagaagagccagttgagcgtcccctagtccagttctga

SEQ ID NO: 3839 - DNA, 399 bp, Homo sapiens
  SIMILAR (154)..(249): 1001254mologous to Mesocricetus auratus Gal(beta)1,3/4-GlcNAc (alpha)2,3-sialyltransferase,accession number AJ245699,Smith- Waterman Score=168.
atggcaaaagctgtagagaaacctgagtctacattggaagccacaaagagcaaagagtcagtgatgtctagggtagaatggattggcacagcccacatgtgggtagatgatgaaactggtgacaatgcaagcaagacccagcagaccttggagcctgctgaattagccaccaagtacgcaaacttttcagagggagcttgcaagcctggctatgcttcagccttgatgacggccatcttcccccggtttttgcaagcctatacgactcagtccttagcccagacacttggcacactggtgcaagaagtgggcccccaagatcttgggcagctccgcccctgtggctttgcagggtgcagcccctgtggctgctctcatgggctggcgttgagtgcctga

SEQ ID NO: 3840 - DNA, 478 bp, Homo sapiens
  SIMILAR (1)..(258): 951254mologous to Homo sapiens putative p150,accession number U93563,Smith-Waterman Score=429.
  misc_feature (1)...(478): n = a,t,c or g
caaaaatcacaagcattcttatacaccagtaacagacaaacagagagccaaatcatgagtgaactcccattcacaattgcttcaaacagaataaaatacctaggaatccaacttacaagggacgtgaaggacctcttcaaggagaactacaaaccactggtcaaggaaataaaagaggatacaaacaaatggaagaacattccatgctcatggctaggaagaatcaatatcgtgaaaatggccatactgcccaaggtaaggcagaaaccctacaagccagaagagagtgggggccaatattcaacattcttaaagaaaagaattttcaacccagaatttcatatccangccaaacttaagcttcataagtganggagnaataaaatcctttacacacaagctaatgcttgagagntttttgtcaccagcaggcctgcccctaaaaagangctccctggtngggangcacttngacatt

SEQ ID NO: 3841 - DNA, 474 bp, Homo sapiens
  SIMILAR (270)..(377): 881254mologous to Homo sapiens line-1 reverse transcriptase,accession number U83303,Smith-Waterman Score=160.
gcattctgaagagtgggcctaaaagtactttaccatctcatagagaagagttctttcctagcagggtgtattgccaagccctctctgctttgtccttccctccatggtttgttaaccagcaggaatgcttttttttattattatactttaagttttagggcacatgtgcacaatgtaccggttagttacatatgtatacctgtgcaatgctggtgtgctgcacccattaactcgtcatttagcattaggtatatctcctaattgttttagcagtcttatacaccaataacagacaaacagagagccaaatcatgagtgaactcccgttcacaattgcttcaaagagaataaaatacctaggaatccaacttaacaagggatgtgaaggacctcttcaaggacaactacataccactgctcaaggaaatatgagaggacacaagcaaatggaagagcattccatgctcatggata

SEQ ID NO: 3842 - DNA, 479 bp, Homo sapiens
  SIMILAR (124)..(300): 1001254mologous to Homo sapiens FN5 protein,accession number AF197137,Smith-Waterman Score=284.
cgcccgctctgtgccaagccctgagttatacagcttcctattccatcctcaccacggtcctgcgaaggagggtccagccttggcaagaggagtgtggcccttcctggaatccctctaggaaagatgcggcagctcaaagggaagcccaagaaggagacctccaaggacaagaaggagcggaagcaagccatgcaggaggcccggcagcagatcactacagtggtgctgcccacactggccgtggtcgtgctcttgatcgtggtgtttgtgtacgtggccacgcgccccaccatcaccgagtgagccccgcagccggccgcggaccccatcggcagggagaggaggcgcgggagggggacgcaaacaaaaaatggctttcatattcagagatgttcatgttgctgagctgtaagcaggagcaccctgtcttctctggtctttgacttgattaaagtatctccgctttcttgggagggaaa

SEQ ID NO: 3843 - DNA, 2238 bp, Homo sapiens
  SIMILAR (829)..(2232): 941254mologous to Homo sapiens putative p150,accession number U93572,Smith-Waterman Score=2306.
atggggaaaaaacagaacagaaaaactgaaaactctaaaacgcagagcgcctctcctcctccaaaggaacacagttcctcaccagcaacggaacaaagctggatggagaatgactttgacgagctgagagaagaaggcttcagacggtcaaattactctgagctacaggaggacattcaaaccaaaggcaaagaagttgaaaactttgaaaaaaatttagaagaatgtataactagaataaccaatagagagaagtgcttaaaggagctgatggagctgaaaaccaaggctcgagaactacgtgaagaatgcagaagcctcaggagccgatgcgatcaactggaagaaagggtatcagcaatggaagatgaaatgaatgaaatgaaaccaaatctacgtctgattggtgtacctgaaagtgatgtggagaatggaaccaagttggaaaacactctgcaggatattatccaggagaacttccccaatctagcaaggaaggccaacattcagattcaggaaatacagagaacgccacaaagatactccttgagaagagcaactccaagacacataattgccagattcaccaaagttgaaatgaaggaaaaaatgttaagggcagccagagagaaagaaatacaaactaccatcagagaatactacaaacacctctatgcaaataaactagaaaatctagaagaaatggataaattcctcgacacatacactctcccaagactaaaccaggaaaaagttgaatctctgaatagaccaataacaggagctgaaattgtggcaataatcaatagcttaccaaccaaaaagggtccaggaccagatggattcacagccgaattctaccagaggtacaaggaggaactgtatataaacagagccaaagacaaaaaccacatgattatctcaatagatgcagaaaaagcctttgacaaaattcaacaacccttcatgctaaaaactctcaataaattaggtattgatgggacgtatttcaaaataataagagctatctatgacaaacccacagccaatatcatactgaatgggcaaaaactggaagcattccctttgaaaactggcacaagacagggataccctctctcaccactcctattcaacatagtgttggaagttctggccagggcaatcaggcaggagaaggaaataaagggtattcaattaggaaaagaggaagtcagattgtccctgtttgcagacgacatgattgtatatctagaaaaccccattgtctcagcccgaaatctccttaagctgataagcaacttcagcaaagtctcaggatacaaaatcaacgtacaaaaatcacaagcattcttatacaccaacaacagacaaacagagagccaaatcatgagtgaactcccattcacaattgcttcaaagagaataaaatacctaggaatccaacttacaagggatgtgaaggacctcttcaaggagaactacaaaccactgctcaaggaaataaaagaggatacaaacaaatggaagaacattccatgctcatgggtaggaagaatcaatattgtgaaaatggccatactgcccaaggtaatttatagattcaatgccatccccatcaagctaccaatgcctttcttcacagaattggaaaaaactactttaaagttcatatggaaccaaaaaagagcccgcatcaccaagtcaatcctaagccaaaagaacaaagctggaggcatcacactacctgacttcaaactatactacaaggctacagtaaccaaaacagcatggtactggtaccaaaacagagatatagatcaatggaacagaacagagccctcagaaataacaccgcatatctacaactatctgatctttgacaaacctgagaaaaacaagcaatggggaaaggattccctattcaataaatggtgctgggaaaactggctagccatatgtagaaagctgaaactggatcccttccttacaccttatacaaaaatgaattcaagatggattaaagacttaaacgttagacctaaaaccataaaaaccctagaagaaaacctaggcattaccattcaggacataggcatgggcaaggacttcatgtctaaaacaccaaaagcaatggcaacaaaagccaaaattgacaaatgggatctaattaaactaaagagcttctgcacagcaaaagaaactaccatcagagtgaacaggcaacctacaaaatga

SEQ ID NO: 3844 - DNA, 2724 bp, Homo sapiens
  SIMILAR (1159)..(2127): 701254mologous to Homo sapiens putative p150,accession number U93572,Smith-Waterman Score=1068.
atgggtggaatggtggaaagcagcagacataattggagtgggttggataagcaaagtgatattcaaaatttaaatgaagagagaatcttagctttacagctttgtgggtggataaagaaaggaacggatgtagacgtggggccatttttgaactcccttgtacaagaaggggaatgggaaagagctgctgctgtggcattgttcaacttggatattcgccgagcaatccaaatcctgaatgaaggggcatcttctgaaaaaggagatctgaatctcaatgtggtagcaatggctttatcgggttatacggatgagaagaactccctttggagagaaatgtgtagcacactgcgattacagctaaataacccgtatttgtgtgtcatgtttgcatttctgacaagtgaaacaggatcttacgatggagttttgtatgaaaacaaagttgcagtacgtgacagagtggcatttgcttgtaaattccttagtgatactcagttaaatagatacatcgaaaagttgaccaatgaaatgaaagaggctggaaatttggaaggaattttgcttacaggccttactaaagatggagtggacttaatggagagttatgttgatagaactggagatgttcaaacagcaagttactgtatgttacagggttcacctttagatgttcttaaagatgaaagggttcagtactggattgagaattatagaaatttattagatgcctggaggttttggcataaacgagctgaatttgatattcacaggagtaagttggatcccagttccaagcctttagcacaagtttttgtgagttgcaatttctgtggcaagtcaatctcctacagctgttcagctgtgcctcatcagggcagaggttttagtcagtatggtgtgagtggctcaccaacgaaatctaaagtcacaagttgtcctggctgtcgaaaaccacttcctcgatgtgcgctttgtctcattaatatgggaacaccagtttctagctgtcctgacagatcaacgaggcagaaagtgaacaaggatatccaggaattgaactccgctctgcaccaagcggacctaatagacatctacagaactctccaccccaaatcaacagcatatacattcttttcagcaccacaccacaccttttccaaaattgaccacatagttggaagtaaagcactcctcagcaaatgtaaaagaacagaaattataacaaactgtctctcagaccacagtgcaatcaaactagaactcaggattaagacattcactccaaaccgctcaactacatggaaactgaacaacgtgctcctgaatgactactgggtacataacgaaatgaaggcagaaataaagatgttctttgaaaccaacgagaacaaagacacaacataccagaatctctgggacacattcaaagcagtgtttagagggaaatttatagcactaaatgcccacgagaaaatacaaactaccatcagagaataccataaacacctctatgcaaataaactagaaaatctagaagaaatggataaattcctggacacatacaccctcccaagactaaaccaggaagaagttgaatctctgaatagaccaataacaggatctgaaattgaggcaatccttaatagcttaccaaccaaaaaaagtccaggaccagatggattcacagccgaactctaccagaggtacaaggaggagctggtaccattccttctgaaactattccaatcaatagaaaaagagggaatcctccccaactcattttatgaggccagcatcatcctgataccaaagactggcagagacacaacaaaaaaagagaattttaggccaatatccttgatgaacattgatgcaaaaatcctcaataaaatactggcaaaccaaatccagcaacacatcaaaaagcttatccaccatgatcaagtgggcttcatccctgggatgcaaggctggttcaacatacgaaaatcaataaatgtaatccagcacataaacagaaccaaagacaaaaaccacatgattatctcaatagatgcagaaaaggcctttgacaaaattcaacaacccttcatgctaaaaactctcaataaattagtgttggaagttctggccagggcaatcagacaggagaaggaaataaagggcattcatttaggaaaagaggaagtcaaattgtccctgtttgcagatgacatgattgtatacctagaaatccccattgtctcagcccaaaatctccttaagctgataagcaacttcagcaaagtctcaggatacaaaatcaatgtgcagaaatcacaagcattcttatacaccaataacagacaaacagagagccaaatcatgagtgaactcccattcacaattgcttcaaagagaataaaatacctaggaatccaacttacaagggatgtgaaggacctcttcaaggagaactacaaactactgctcaaggaaataaaagaggatacaaacaaatggaagaacattccatgctcatgggtgggaagaatcaatatcatgaaaatggccatactgcccaaggtaatttatagattcagtgccatccccatcaagctaccaatgactttcttcacagaattgaaaaaaactaaagttcatatggaaccaaaaaagagcccgcattgccaagtcaatcccaagccaaaagaacaaagccggaggcatcacactacctga

SEQ ID NO: 3845 - DNA, 1971 bp, Homo sapiens
  SIMILAR (634)..(1932): 631254mologous to Homo sapiens putative p150,accession number U93563,Smith-Waterman Score=1294.
atgggtggtttcagcagccacgtcgccacccacccagcctccatccctaccctggaaatctatcgtgtaactctgctgctaaagccctttctctcctatcctctcttgcccactgccactggaccacccctgtatcctccagctttgggacttccaaattacactaaaccttttaccttgtttgtccatgaatgtaacaatcaggaattaggagctcttatccaagaacgtagaggaaaacataggcccattgcatattatagccctcaattagacctagtagtgaagcctccactgctgatacccaggcaaacagggtctggagtggacctccagcaaactccaacagacctgcagctgagggtcctgactattagaaagaaaactaacaaacagaaaggacatccaccccaaaatccaatctgtacatcaccatcatcaaagaccaaagttggaagtaaagctctcctcagcaaatgtaaaagaagagaaattataacaaactatctctcagaccacagtgcaatcaaactagaactcaggattaagaaactcactcaaaaccgctcaactacatggaaactgaacaacctgctcctgaatgactactgggtacataacgaaatgaaggcagaaataaagatgttctttgaaaccaaggagaacagagacacaacataccagaatctctgggacaccttcaaagcagtgtgtagagggaaatttatagcactaaatgcccacaagagaaagcaggaaagatctaaaattgacaccctaacatcacaattaaaagaacttgaaaagcaagagcaaacacattcaaaagctagcagaaggagctggttttttgaaaagatcaacaaaattgatagactgctagcaagacgaataaagaagaaaagagagaagaatccaatagatgcaataaaaagtgataaaggagatatcaccactgatcccacagaaatacaaactaccatcagagaatactataaatgcctctccgcaaataaactagaaaatctagaggaaatggataaattccttgacacatacaccctcccaagactaaaccaggaagaatttgaatctctgtatagaccaataacaggctctgaaattgaggcaataattaatggcttacccaccaaaaaaaggttggaagttctggccagggcaatcaggcaggagaaggaaataaagggtattcaattaggaaaagaggaagtcaaattgtccctgtttgcagatgacatgattgtatatctagaaaaccccatcatctcagcccaaaatctccttaagctgataggcaacttcagcaaagtctcaggatacaaaatcaatgtgcaaaaatcacaagcattcttatacaccaataacagacaaacagagagccaaatcatgagtgaactcccattcacaattgcttcaaagagaataaaatacctaagaatccaacttacaagggacgtgaaggacctcttcaaggagaactacaaaccattgctcaatgaaataaaagaggatacaaacaaatggaagaatattccatgctcatgggtaggaagaatcaatattgtgaaaatggccatactgcccaaggtagtttatagattcaatgccatccccatcaagctacaaatgactttcttcacagaattggaaaaaactactttaaagttcatatggaaccaaaaaagagtccacatcgccaagtcaatcctaagccaaaagaacaaagctggaggcatcacgctacctgacttcaaactatactacaagcctacagtaaccaaaacagcatggtactggtaccaaaacagagatatagaccaatggaacagaacagagccctcagaaataatgccacatatctacaactatctgaactttgacaaacctgacaaaaacaagcaatggggaaggattccctatttaataaatggtgctgggaaaactggctag

SEQ ID NO: 3846 - DNA, 1149 bp, Homo sapiens
  SIMILAR (647)..(796): 841254mologous to Homo sapiens putative p150,accession number U93563,Smith-Waterman Score=210.
atggagacacgtcccagtaggggcccactgacacctcacacagccaggtgccagtctgagactaagcttccagaggaaggatcaggcagcaatatttgctgttctgcaatatttgctattctgcagcctccactggtgatacctaggcaaacagggtctggagtggacctccagcaaactccaacagacctggagctgagggacctgactgttagaaggaaaactaacaaatggaaaggaatagcatcaacatcaacaaaaaggacatccacaccaaaacgccatctgagctggttttttgaaaagatcaacaaaattgatagaccgctagcaaaactaataaagaagaaaagagagaagaatcaaatagacacaataaaaaatgataaaggagatatcaccaccaatcccacagaaatacaaaccaccatcagagaatactataaacacctctatgcaaataaactagaaaatctagaagaaatggataaattcctggacacatataccctcacaagactaaaccaggaagaagttgaatctctgaatataccaataacagtctctgaaattgaggcaataattaagagcttaccaaccaaaaaaagtccaggaccagatggattcacagccgaattctaccagagccagtatcatactgaatgggcaaaaactggaagaattccctttgaaaactggtacaagacagggatgccctctctcaccactcctattcaacacagtgttggaacttctgaccaggacaatcaggcaagagaaagaaacaaagggtattcattaggaaaagaggaggtcaaattgtccctgtttgcagatgacatgattgtatatttagaaaaccccattgtctcagccctaaatcttcttaagctgataagcaacttcagcaaaatctcaggatacaaaatcaatgtgcaaaaatcacacgcattcctagaaaccaataacagacaaacagagagccaaattgtgagtgaactcccattcacaattactacaaagagaataaaatacctaggaatccaacttacaagggatttgaaggacctcttcaaggagaactacaaaccactgctcaatgaaataaaagaggacacaaacaaatggaagaacattctatgctcatag

SEQ ID NO: 3847 - DNA, 1392 bp, Homo sapiens
  SIMILAR (348)..(1391): 941254mologous to Homo sapiens putative p150,accession number U93563,Smith-Waterman Score=1680.
atgtatattaacatgtgtgtgcatgtgtgtgtacatgcatgcacacatctgtactgctctcctgacaggtactgctgtcctttggcacacctctagtgctgaccacaaaaagagagaagaatcaaatagatgcaataaaaaatgataaaggggatatcaccaccgatcccacagaaatacaaattaccagcatagaatactataaacacctctacgcaaataaactagaaaatctagaagaaatggataaactcctcgacacatacaccctcccaagactaaaccaggaaggagttgaatctctgaatagaccaataacaggatctgaaattgaggcaataattaatagcttacgaccaatatccctgatgaacatccatgcaaaaattctcaataaaatactgggaaactgaatccagcagcacatcaaaaagcttatccaccatgatcaagtgggcttcatccctgggatgcaaggctggttcaacatacgcaaatcaataaacgtaatcgagcatataaacagaaccaaggacaaaaaccacatgattatcttaatagatgcagaaaaggcctttgacaaaattcaacaacccttcatgctaaaaactctcaataaattaggtattgatgggacgtatctcaaaataataagagctatctatggcaaacccacagtcaatatcatactgaataggcaaaaactggaagcattccctttgaaaactggcacaagacagggatgccctctctcaccactcctattcaacatagtgttggaagttctggccaaggcaattaggcaggagaaggaaataaagggtattcaattaggaaaagaggaagtcaaattgtccctgtttgcggacgacatgattgtatatctagaaaaccccatcatctcagcccaaaatctccttaagctgacaggcaacttcagcaaagtctcaggatacaaaatcaatgtgcaaaaatcacaagcattcttatacaccaataacagacaaacagagagccaaatcatgagtgaactcccattcacaattgcttcaaagagaataaaatacctaggaatccaacttacaagggatgtgaaggacctcgtaaaggagaactacaaaccactgctcaaggaaataaaagaggatacaaacaaatggaagaacattccatgctcatgggtaggaagaatcaatatcctgaaaatggccatactgcccaaggtaatttatagattcaatgccatccccatcaagctaccaatgactttcttcacagaattggaaaaaactactttaaagttcatatggaaccaaaaaagagcctgcattgccaagtcaatcctaagccaaaagaacaaagctggaggcatcacgctacctgacttcaagc

SEQ ID NO: 3848 - DNA, 2868 bp, Homo sapiens
  SIMILAR (1297)..(2838): 941254mologous to Homo sapiens putative p150,accession number U93574,Smith-Waterman Score=2555.
atgagcgacgcagaagacgaacgatttctgcagttccaactgaggtaccgggtgtatctcactggggattgtcggacagtgggtgcaggacagtgggtccagcgcaccgagcgtgagccgaagcagggcgaggcattgcctcacccaggaagtgcaaggggttggggagttccctttcctagggatgacggatggcacctggaaaatcgggtcactcccaccctaatactgcgcttttctcacagtcttagcaaacagcacaccaggagaccatattccgcgcctggctcagagggtcctacacccacggagccgtgctcattgctagcacagcagtctgagatcaaactgcaagatggcagcgaggctgggggagggcctctgctgctgatacccaggcaaacagggtctggagtggacctccggcaaactccaacagacatgcagctgagggtcctgactgttagaaggaaaactaacaaacagaaaggacagccacaccaaaaccccatctgtacgtcaccatcatcaaagaccaaagcaccacaccacacctattccaaaactgaccacatagttggaagtaaagcactcctcagcaaatgtaaaagatcagaaattataaccaactgcctctcagaccacagtgcaatcaaactagaactcaggattaagaaacgcattcaaaaccgctcaactacatggaaactgaacaacctgctcctgaatgactactgtgtacataacgaaataaaggcagaaataaagatgttctttgaaaccaacgagaacaaagacacaacataccagaatctctgggacacattcaaagcagtgtgtagagggaaatttagagcactaagggcccacaagagaaagcaggaaagatctaaaattgacaccctaacatcacaattaaaagaactagagaagcaagagcaaacacattcaaaagctagcagaaggcaagaagtaactaagatcagagcagaactgaaggaaacagagacacaaaaaaaaaccttcaaaaaatcaatgaatccaggagctgaaatacaaactaccatcagagaatactataaacacctctatgcaaataaactagaaaatctggaagaaatggataaattcctcgacatatacactctcccaagactaaaccaggaagaagttgaatctctgaatagtccaataacaggctctgaaattgaggcaataattaatagcttaacaaccaaaaagattccaggaccagatggattcacagccgaattctaccagaggtacaaggaggagcagcagcacatcaacaagcttatccaccatgatcaagtgggcttcatccctgggatgcaagactggttcaacatacgcaaatcaataaatgcaatccagcatataaacagaaccaatgacaaaaaccacatgattatctcaatagatgcagaaaaggcctttgacaaaattcaacaacccttcatgctaaaacctctcaataaattaggtattgatgggacgtatctcaaaataataagagctatttatgacaaacgcacagccaatatcatactgaatgggcaaaaactggaagcattccctttgaaaactggcacaagacagggatgccctctctcaccactcctattcaacatagtgttggaagttctggccagggcaattaggcaggagaaggaaataaagggtattcaattaggaaaagaggaagtcaaattgtccctgtttgcagacgacatgattgtatatctagaaaaccccactgtctcagcccaaaatctccttaagctgataagcaacttcagcaaagtctcaggatacaaaatcaatgtacaaaaatcacaagcattcttatacaccaacaacagacaaagagagagccaaatcatgagtgaactcccattcacaactgcttcaaagagaataaaatacttaggaatccaacttacaagggatgtgaaggacctcttcaaggcgaactacaaaccactgctcaaggaaataaaagaggatacaaacaaatggaagaacattccatgctcatgggtaggaagaatcaatattgtgaaaatggccatactgcccaaggtaatttatagattcagtgccatccccatcaagctaccaatgactttcttcacagaattggaaaaaactactttaaagttcatatggaaccaaaaaagagcccgcatcgccaagtcaatcctaagccaaaagaacaaagctggaggtgtcacactacctgacttcaaactatactacaaggctacagtaaccaaaacagcatggtactggtaccaaaacagagatacagaccaatggaacagaacagagccctcagaaataatgccacatatctacaactatctgatctttgacaaatctgacaaaaacaagcaatggggaaaggattccctatttaataaatggtgctgggaaaactggctagccatatgtagaaagctgaaactggatcccttccttacaccttatacaaaaatcaattcaagatggattaaagatttaaacgttagacctaaaaccataaaaatcctagaagaaaacctaggcaataccattcaggacatagtcgtgggcaaggacttcatgtctaaaacaccaaaagcaatggcagcaaaagccaaaattgacaaatgggatctaatgaaactaaagagcttctgcacagccaaagaaattaccatcagagtgaacaggcaacctacaaaatgggagaaaatttttgcaatctactcatctgacaaagggctaatatccagaatctacaatgaactcaaacaaatttacaagaaaaaaacaaccccatcaacaagtgggcgaaggatatga

SEQ ID NO: 3849 - DNA, 1221 bp, Homo sapiens
  SIMILAR (397)..(1218): 901254mologous to Homo sapiens putative p150,accession number U93570,Smith-Waterman Score=1250.
ttcccttacaaggtccctgaccttgaagtaagtaaagaatctcacttttggacagacccaggaacctcaatgtattttgaggaccttgagaagaaaggtattcaccgaagttttcgtacagacataataaaaaatgatgaaggggatatcagcactgattccacagagatacaaactaccatcagagaatactataaagacctctacacaaataaactagaaaacctagaagaaatggataaattcctggacacatacatcctcccaagactaaaccaggaagaagttgaatccctgaatagaccaaaaacaggctctgatattgatgcaataattaatagcctaccaaccaaaaaaagtccaggaccagagagattcacagccgaattctaccagagagccaaagacaaaaaccacatgattatctcaatagatgcagaagaggctttcaacaaaattcaacagcccttcatgctaaaaactctcaaactaggtattgatgtgacatatctcaaaataataagagctatttatgacaaacccacagccaatatcatactgaatgggcaaaaactggaagcattccctttgaaaactggcacaagaaagggatgccctctctcaccactcctattcaacataatgctggaagttctggccggggcaatcaggcaggagaaagaaataaagggtattcaattaggaaaagaggaagtcaaattgtccctgtttacagatgacatgattgtatatctagaaaaccccatcgtctcagcccaaaatccctgtaagctgataagcaacttcagcaaagtctcaggatacaaattcaatgtgcaaaaatcacaagcattcctctacaccaataacagacaaacagagagccaaatgatgagtgaactcccattcacaattgcttcaaagagaatgaaatacatagaaatccaatttacaagggatgtgaaggacctcttcaagcagaattacaaaccactgctcaatgaaatacaagaggacacaaacaaatggaagaacattccatgctcatcagtaggaagaatcaacatcgtgaaaatggccatactgcccaaggtaatttatagattcaatgccatccccatcaagctaccaatgactttctttacagaattggaaaaaactactttaaagttcatatggaaccaaaaaagagcccgcattgccaagtcaatcctaagctaa

SEQ ID NO: 3850 - DNA, 1896 bp, Homo sapiens
  SIMILAR (680)..(733): 1001254mologous to Homo sapiens putative p150,accession number U93569,Smith-Waterman Score=82.
atgaaggagatagagacacaaaaaacccttcaaaaaatcaatgaatccaggagctggttttttgaaaagatcaacaaagttgatagaccgctagcaagactaataaagaagaaaagagagaagaatcaaatagatgcaataaaaaatgataaaagggatgtcagcactgatcccgcagtaatacaaactaccatcagagaatactataaacatctctatgcaaataaactagaaaatctagaagaaatggataaattcctggacacatacaccctcccaagactaaacaaggaagaagtagaatctctgaatagaccaataacaggctctgaaattgaggcaataattaatagcttaccaatcaaaaaaagtccaggaccagacggattcacagctgatttctaccagaggtacaagcaagagctggtaccattccttctaaaactattccaatccatagaaaaagagggaatcctccctggctcagtttatgaggccagcatcatcctgataccaaagcctggcagagacacaaccaaaaaagagaattttagaccaatatccctgaccaacattgatgcaaaaatcctcaataaaatactggcaaaccgaatccagcagcacatcaaaaagctaatcccccacgatcaagtgggcttcatccctaggatgcaaagctgtgttggaagttctggccagggcaatcaggcaggagaaagaaataaagggtatcaattaggaaaagaggaagtcaaattgtccctgtttgcagatgacatgattatatatctagaaaaccccatcatctcagcccaaaatctccttaagctgataagcaacttcagcaaagtctcaggttacaaaatcaatgtgcaaaaatcacaagcattcttatacatcaataacagacaaaaagagagccaaatcatgagtgaactcccattcacaattgcttcaaagagaataaaatacctaggaatccaacttacaaggcatgtgaaggagcacttcaaggagaactacaagccactggtcaacaaaataaaagaggatacaaacaaatggaagaacatgccatgctcatgggtaggaagaatcaatatcgtgaaaatgaccatactgcccaagatagaaagaatagggaagaccaaaggtacagagacacaaagaggaaaatcctgtaagccaacccatcctgtctctgtcatcagcttggctgagagcatcgccagggatttctgcttacaacttaacagagcaaggtcatgtgaccaatccagctataatgaagtcttagaagctgacaatagagctttcagcctctgcaaaggaatgccttttgacagactttcccccatatctcaaactccaggtccatcctggtaccagtccagcccctatcaacccatgtttctggctgctcctatagacataggctccaggcctgcctccatggacccaatacacagcagaacttggcattatgtcactgttgtcattttagccagatccaggaaacaccaggaattgatattgtctgaatccaaacagtttgaagaggcccctccagagctaagatccagagctccaggaggattttcaaagcctgctgcaggtcagataaaggtgggcctcagagaaaacctgacggcatcaatgcagatttcccctgcagatgcaaatctcatcctgcaagacagctttttggctatctttttattccaagcccttatcgttacaatttataaagaaaatgagaaggaagaaggacaggaacgaagagaggaagctcttcgaagcacagggaaaaataacgtatggaaaaacacagatatagacaggccagaatcaatatctgattccgaatctgcagggtgtgactatggagaccgttag

SEQ ID NO: 3851 - DNA, 1964 bp, Homo sapiens
  SIMILAR (782)..(862): 921254mologous to Homo sapiens putative p150,accession number U93563,Smith-Waterman Score=144.
  misc_feature (1)...(1964): n = a,t,c or g
atggggagaaatcagagcagaaaagctgaaaattccaaaaactggagcacctcttttcctccaaaggattgcagctcctcgccagcaaaggaacaaaactggacagagaatgagtttgacaagttgacagaagtaggcttcagaaggtcggtaataacaaacttctccaagctaaaggagcatgttctaacccactgcaaggaagttaaaaaccttgaaaaaagagcactagcaaaactaataaagaagaaaagagagaagaatcaaatagatgcaataaaaaatgataaaagggatatcaccaccgatcccacagaaatacaaactaccatcagagaatactataaacacctctacgcaaataaactagaaactctagaagaaatggataaattcctggacacatacaccctcccaagactaaaccaggaagaagttgaatctctgaatagaccaataacaggttctgaaattgaggaaataattaatagcctaccaaccaaaaaaagtccgggaccagacggattcacagctgaattctaccagaggtataaagaggagctgctgataagcaacttcagcaaagtctcaggatacaaaatcaatgtgcaaaaatcacaagcattcctatacaccagtaacagacaaacagagagccaaatcatgagtgaactcccattcccaattactacaaagagaatgaaatacctaggaatccaacttacaagggatgtgaaggacctcttcaaggagaactacaaaccactgctcaacgaaataagaggacacaaacaaatggaagaacattccatgctcatggataggaagaagcaatattgtgaaaatggccatactgcccaagggagcactgattttggtgaagtccagagattaagactctggcaggaagatgatgtggctgaagaagtttcaggcttctttgaagaggataacctgaaaagtgtggcccaagaccctttctgggagtcccgccaggtcaaaactatcttcaactgtgttgacacttacattgctggtgcaaaagcaatagcaggaataactcaagtcacctgtactggaaatcagtttgctgaaattaatcaacgattcttgaagttgaagaaaagttggtctctctacaggaggttccagccttggcaagaggagtgtggcccttcctggaatccctcgtggacacacccgtccgtagcatcctctaggaaagatgcggcagctcaaagggaagcccaagaaggagacctccaaggacaagaaggagcggaagcaagccatgcaggaggcccggcagcagatcactacagtggtactgcccacgctggccgtggtcgtgctcttgatcgtggtgtttgtgtacgaggccacgcgcccccacccatcaccgagttgagccgcccagccggctgcggaccccatcggcagggagaggaagcgcgggagggggacgcaaacaaaaaaaatggctttcatattcagagatgttcatgttgcctgagctgtaagcaggagcaccctgttcttcctctggtctttggacttgattaaaagtatctccgcctttccttgggagggaatagggggatgttttatcagtgaatgtgcccatacatcttatggtccaacttcatgtgcctttcagacttcagaagcgcgcgcgcatgtgtgtgtgtgtgtgtgtgtgtgtgtgtgtgtgtgtgtgtgtgcttctttttctctcctaaaaatcgataagtagctccacctgaagagggatggaacctctggggtncagggaaacagctggaatccacactcacctcgattcccattgtttggatcatgcctctttccaacacgtgttcacaatctccaaagggactgtatttcttctctgtgcttaatgtgatttgaaatatgttgaatcaaagtgaaatatttattttttgaataaaggagatnatagcctt

SEQ ID NO: 3852 - DNA, 6110 bp, Homo sapiens
  SIMILAR (3490)..(4836): 891254mologous to Homo sapiens putative p150,accession number U93572,Smith-Waterman Score=2031.
atgagacagaaagtcaacaaggatacccaggaattgaactcagctctgcaccaagcagacctaatagacatctacagaactctccacccgaaatcaacagaatatacatttttttcagcaccacaccacacctattccaaaattgaccacatagttggaagtaaagctctcctcagcaaatgtaaaataacagaaattataacaaactatctctcagaccacagtgcaatcaaactagaactcaggattaagaatcccactcaaagccgctcaactacatggaaactgaacaacctgcccctgaatgactactgggtacataacgaaatgaaggcagaaataaagatgttctttgaaaccaacgagaacaaagacacaacataccagaatctctgggacacattcaaagcagtgtgtagagggaaatttatagcactaaatgcccacaagagaaagcaggaaagatccaaaattgacaccctagcatcacaattaaaagaactagaaaagcaagagcaaacacattcaaaagctagcaggaggcaagaaataactaaaatcagagcagaactgaaggaaatagagacacaaagaccccttcaaaacaatcagtgaatcctggagctggttttttgaaaggatcaacaaaattgatagactgctagcaagactaataaagaagaaaagagagaataatcaaatagatgcaataaaaaacgataaattgggatatcaccactgatcccacagaaatacaaactaccatcagagaatactataaacacctctatgcaaataaactagaaaatctagaagaaatggataaattcctggacacatacaccctcccaagactaaaccaggaagaagttgaatcccttcagtagactaataacaggctctgaaattgaggcaataattaatagcttaccaaccaaaaaaaagtccaggaccagacggatttcacagccaaattctagcagaggtacaaggaggagctggtcccattccttctgaaactattccaatcaatagaaaaagagggagtcctccctaactcattttatgcagaaaaagtatcatcctggataccaaagtctagcagagacacaacaaaaaaagagaattttagaccaatatccctcatgaacatcgatgcagaaatcctcaataaaatactgggaaaccaagtccagcaacacatcaaaaagtttatccaccatgatcaagtgggcatcatcccagggatgcaaggctggttcaacatatgcaaatcaaaaaaactgttggaagccagggcaattaggcaggagaaggaaataaagggtattcaattaggaaaagaggaagtcaaattgtccctgtttgcagatgacatgattgtatatctagaaaaccccatcgtctcagcccaaaatgtccttaagctgataagcaacttcagcaaagtctcaggatacaaaatcaatgtacaaaaatcacaagcattcttatacatcagtaacagacaaacagagagccaaatcatgagtgaactcccattcacaattgcttcaaagagaataaaatatctaggaatccaacttacaagggacgtgaaggacctcttcaaggagaactacaaactactcactgatcaaggaaataagagaggacacaaacaaatggaaaaacattccatgctcatgggtaggaggaagaatcaatatcgtgcaaaatggaccatactgcccaaggtaatttttagattcaatgccatccccatcaagctaccaatgaccctttcttcacagaattggaaaaaaactactttaaagttcatatggaaccaaaaaagagcccgcattgccaagtcaatcctaagcaaaaagaacaaagctggaagcatcatgctacctgacttcaaactatactacaaggctacagtaaccaaaacatcatggtactggtaccaaaacagagatatagatcaatggaacagaacagagccctcagaaataatgccacatatctacaactatctgatctttgacaaacctgacaaaaacaagcaatggggaaaggattccctatttaataaatggtgctgggaaaactggctagccatatgtagaaagccaaaactggatcccttccttacaccttatacaaagattaattcaagatggattaaagacttacacgttagacctaaaaccataaaaaccctagaagaaaacctaggcattagcattcaggacataggcatgggcaaggacttcatgtctaaaacaccaaaagcaatgacaacaaaagccaaaattgacaaatgggatctaattcaactaaagagcttctgcacagcaaaagaaactaccatcagagtgaacaggcaacctacaaaatgggagaaaattttcacaacctactcatctgacaaagggctaatatccagaatctacaatgaactcaaacaaatttacaagaaaaaaatcaaacaaccccatcaaaaaatgtcaacaggcctcacagctgaaggctttacccacccaatcctgctccccctcttctaacagctatgaaaccttcctagtttcaccccttcacccgttccagttttacataagttttcctcactacacagagatggttcctcccttgacacctgaggattacaattcgagaggagattttggtggggacacagagacaaaccatattatttcaaagttccacaggtctctagagcaggtgcaaaatgctgccagtcggaggagccaagatggccgaataggaacagctccggtctacagctcccagcgtgagcgacgcagaagacgggtgatttctgcatttccatctgaggaacgcagttcctcaccagcaatggaacaaagctggatggagaatgactttgaggagctgagagaagaaggcttcagacgatcaaattactctgagctacgggaggacattcaaaccaaaggcaaagaagttgaaaactttgaacaaaatttagaagaatgtataactagaataaccaatacagagaagtgcttaaaggagctgatggagctgaaaaccaaggctcgagaactacgtgaagaatgcagaagcctcaggagccgatgtgatcaactggaagaaaggatatcagtgatggaagatgaaatgaatgaaatgaagcgagaagggaagtttagagaaaaaagaataaaaagaaatgagcaaagcctccaagaaatatgggactatgtgaaaagaccaaatctacgtctgattggtgtacctgaaagtgatggggagaatggaaccaagttggaaaacactctgcagcatattatccaggagaacttccccaatctagcaaggcaggccaacgttcagattcaggaaattcagagaacgccacaaagatactcctcgagaatagcaattccaagacacataattgtcagattcaccaaagttgaaatgaaggaaaaaatgttaagggcagccagagagaaagaaatacaaactaccatcagagaatactacaaacacctctacgcaaataaactagaaaatctagaagaaatggatacattcctcgacacatacactctcccaagactaaaccaggaagaagttgaatctctgaatagaccaataacaggagctgaaattgtggcaataatcaatagcttaccaaccaaaaagagtccaggaccagatggattcacagccgaattctaccagaggtacaaggaggaactaataccattccttctgaaactattccaatcaatagaaaaagagggaatcctccctaactcattttgtgaggccagcatcatcctgataccaaagccgggcagagacacaaccaaaaaagagaattttagaccaatatccttgatgaacattgatgcaaaaatcctcaataaaatactggcaaaccaaatccagcagcacatcaaaaagcttatccaccatgatcaagtgggcttcatccctgggatgcaaggctggttcaatatatgcaaatcaataaatgtaatccagcagataaacagaactaaagacaaaaaccacatgattatctcaatagatgcagaaaaggcctttgacaaaattcaacaacccttcatgctaaaaactctcaataaattaggtattgatgggacatatctcaaaataataagagctatctatgacaaacccacagccaatatcatactgaatgggcaaaaactggaagcattccccttgaaaactggcaaaagacagggatgccctctctcaccactcctattcaacatagtgttggaagttctggccaaggcaattaggcaggagaaggaaataaagggtattcaattaggaaaagaggaagtcaaattgtccctgtttgcagacgacatgattgtatatctagaaaaccccattgtctcagcccaaaatctccttaagctgataagcaagttcagcaaagtctcaagatacaaaatcaatgtacaaaaatcacaagcattgttatacaccagtaacagacaaacagagagccaaatcatgagtgaactcccattcacaattgcttcaaagagaataaaatacttaggaatccaacttacaagggatgtgaaggacctcttcaaagagaactacaaaccactgctcaatgaaataaaagaggatacaaacaaatggaagaacattccatgctcatggataggaagaatcaatattgtgaaaatggccatacttgcccaaggtaatttacagattcaatgccatccccatcaagctaccaatgactttcttcacagaattggaaaaaactactttaaagttcatatggaaccaaaaaagagcccgcatcgccaagtcaatcctaagccaaaagaacaaagctggaggcatcacactacctgacttcaaactatactacaaggctacagtaaccaaaacagcatcggtactggtaccaaaacagagatacacatcagtggaacagaacagagccctcagaaattacaccacatatctacactattctgatcctttggacaaacctgagaaaaacaagcatgggggaaaggcatccctaatttataaaatggctgctggggaaaactggctagcccatatgtaggaagctgaaactggatcccttccttacaccttatacaaaaatcaattcaagatggattaaagatttaaacgttaaacctaaaaccataaaaaccctagaagaaaacctaggcattaccattcaggacataggcgtgggcaaggacttcatgtccaaaacaccaaaagcaatggcaacaaaagacaaaattgacaaatgggatctaattaaactaaagagcttctgcacagcaaaagaaactaccatcagagtgaacaggcaacctacaacatgggagaaaattttcgcaacctactcatctgacaaagggctaatatccagaatctacaatgaactcaaacaaatttacaagaaaaaaacaaacaaccccatcaaaaagtgggcgaaggacatgaacagacacttctcaaaagaagacatttatgcagccaaaaaacacatgaagaaatgctcatcatcactggccatcagagaaatgcaaatcaaaaccactatgagatatcatctcacaccagttagaatggcaatcattaaaaagtcaggaaacaacaggtgctggagaggatgtggagaaataggaacacttttacactgttggtgggactgtaaactagttcaaccattgtggaagtcagtgtggcgattcctcagggatctagaactagaaataccatttgacccagccatcccattactgggtatatacccaaatgactataaatcatgctgctataaagacacatgcacacgtatgtttattgcggcactattcacaatagcaaagacttggaaccaacccaaatgtccaacaatgatagactggattaagaaaatgtggcacatatacaccatggaatactatgcagccataaaaaatgatgagttcatgtcctttgtagggacatggatgaaattggaaaccatcattctcagtaaactatcgcaagaacaaaaaaccaaacaccgcatattctcactcataggtgggaattga

SEQ ID NO: 3853 - DNA, 391 bp, Homo sapiens
  SIMILAR (382)..(143): 401254mologous to Homo sapiens translated region (AA 1- 264),accession number X07495,Smith-Waterman Score=108.
  misc_feature (1)...(391): n = a,t,c or g
gacagcaaggagatgccacctaaaaacaagatggcgactannnnnnnnnnnnnnnnnnnnnnnnnnnnnnnnnnnnnnnnnnnnnnnnnnnnnnacagcaaggagatgccacctaaaaacaaagaaaaagggaagaaatctggggcacagaagaagaaaaagaactggggtgcagatgtggtggccgagtccaggcacaggctggtggtgctggagaaggagctgctccgagaccacttggaggcatgccaaagggaggctgcagctgcccgggaagaggctgaacaagctctcggagagcgggaccaggccctggctcagcttcgggcccacatggcagacatggaggcgaagtatgaggaaatcttacacgacagtctggacaggctct

SEQ ID NO: 3854 - DNA, 738 bp, Homo sapiens
  SIMILAR (667)..(32): 271254mologous to Cyprinus carpio ovarian fibroin-like substance-3,accession number AF309416,Smith-Waterman Score=128.
ctagagactaggggctgtgggcttcaaagatccagggggagtgagtccaaactggcgttgctgatcctggtgcctggcgtgaagtctcagtgctgccccatcccactgctgcttgatggctctcagcttggccaagagcctgtccagactgtcgtgtaagatttcctcatacttcgcctccatgtctgccatgtgggcccgaagctgagccagggcctggtcccgctctccgagagcttgttcagcctcttcccgggcagctgcagcctccctttggcatgcctctgcctttggttcctgcaggatccttcctgatttgtactgtttgggaaagaccaagaccaggcctggcagtcggaagccctccttgttttccttccttgcatcaactgtccctgttggttgtcctcctccaagcccctgtctcctgccctcctgcttaaccgaccacacacctgcatatatggccttcccttctcttcgggccccttccagctctacctccaccccttgctgcctctgcctctgctggtcttcggaagccttggctcgacgggcttcatccctccgtagagccaagtggtctcggagcagctccttctccagcaccaccagcctgtgcctggactcgcccaccacatctgcaccccagttctttttcttcttgtgtgccccagatttcttccctttttctttgtttttaggtggcatctccttgctgtccatgttgtccagcat

SEQ ID NO: 3855 - DNA, 1185 bp, Homo sapiens
  SIMILAR (740)..(1183): 771254mologous to Homo sapiens FLJ00096 protein,accession number AK024492,Smith-Waterman Score=575.
tcagcagcttcttctgtattgtacgttcacaatgaaccccaggtccatggcgctcaccagaaaatccatcccattcaccccagcctgcactactgtcttgcacatattatcagtcaagacctccacacttccatgaatgcccttgggctgtttggagtaggctaagaacaggggctgcaggaaaaatcgaatttgagttccacgcaccacgagcccggccatggcggccaggacgctgcgggcgcgcgggacggagcgcgggggcgcggcggcagcagcggggagcgcggcaggggagcgcggcgggcgcacagttccgcactgggcagtcagccggcggaagccggaggcgcgggctagcctcggggacctcagctccgccgctcgccgccgccgctcttccaccacgggctggaagttccgcaaacacgcggaattcagttttgctttgattcttctgagctgtgtgtctctgggctgatcactaccctctctgaaccttgatttcctcatcctaaatggctggcaggtggcgctcggtacccggaatcccgacttctccgacgaaacacccccgccgccgcccccgccaccgccaccgcctccaccgccgcctcccggctccttcttatccgagccgggtttggagtacggcttgaaactcgacttgtcctccacgccgatgtcgctcagcttcagggggcccgatttggtgtccttgtcgcccgcagcaccgccgccggcaccgcccgcgccgcccccgttggaggcaaccgaggagagtttggaggagggcgaggggtcgggcttcccgatctgcgaacatgtttgcgccaacagcgccagcgggctcttcttggcatcgagctcgatggggctgaccggcgtggaaggcaggggctgcaggtactcggggtgcaaaatgtggccagttcgtgccgtcagcatcttcagcaccttgattggcaggcggttggcctggcgcagggggtcagaggggggcacggcgtgcacaaaaggcttggtgctgccggccggggacgagcctgggccggggccggagctatttccagagagcgcgctggtccaggcagggtctgcaccgccgcctccgcctccgccgccgccgccgccgctgtgcttactgcttcttagggcagaaagcgagggcgctgtgctcatgac

SEQ ID NO: 3856 - DNA, 477 bp, Homo sapiens
  SIMILAR (214)..(477): 861254mologous to Mus musculus leukemia/lymphoma related factor LRF,accession number AF086830,Smith-Waterman Score=428.
tcagagaggcatagcgttttcccaaggccacacagcactcagggtccgaggccctctttagatgttcagaatgcgaaatcgcccccactcgtctcgtttttcgagggaccgtccccatcggggcaccgaaacctctggtgcacggtccgtgttctgcaagggtgatgatccagggcctgccgtgtccgtgagggtccctgggcggggatcgggggtccccggccccactgaccgtgcccgcaccgttgcccagtccacaggcaggacaagctgaaggtgcacatgcggaagcacacgggcgagaagccgtacctgtgccagcagtgcggcgccgcctttgcccacaactacgacctgaagaaccacatgcgcgtgcacacgggcctgcgcccctaccagtgcgacagctgctgcaagaccttcgtccgctccgaccacctgcacagacacctcaagaaagacggctgcaacggcgtc

SEQ ID NO: 3857 - DNA, 1782 bp, Homo sapiens
  SIMILAR (866)..(1129): 291254mologous to Homo sapiens HIV-1 inducer of short transcripts binding protein,accession number AF097916,Smith- Waterman Score=47.
acgcgccgcagcgcggaaggagcaccagggcagcgcgacgcggcagagcgagcgcccggaccccgaaggcgagcgcgccgaggggagcccagtcccaacttcgggcacagtcaccgcgcgcaccggcacggcccctcgaggtctcagcgcggaagatggccggcggcgtggacggccccatcgggatcccgttcaccgaccacagcagcgacatcctgagtgggctgaacgagcagcggacgcagggcctgctgtgcgacgtggtgatcctggtggagggccgcgagttccccaacgcaccgctcggtgctggccgcctgcagccagtacttcaagaagctgttcacgtcgggcgccgtggtggaccagcagaacgtgtacgagatcgacttcgtcagcgccgaggcgctcaccgcgctcatggacttcgcctacacggccacgctcaccgtcagcacagccaacgtgggtgacatcctcagcgccgcccgcctgctggagatccccgccgtgagccacgtgtgcgccgacctcctggaccggcagatcctggcggccgacgcgggcgccgacgccgggcagctggaccttgtagatcaaattgatcagcgcaacctcctccgcgccaaggagtacctcgagttctataccagagcaaccccatgaacagcctgccccccgcggccgccgccgccgctgccagcttcccgtggtccgcctttggggcgtccgatgatgacctggatgccaccaaggaggccgtggccgccgcctgtggccgccgtggccgcgggcgactgcaacggcttagacttctatgggccgggccccccggccgagtcggcccccgacgggggacggggcacgagggcgacagcaacccgggtctgtggccagagcgggatgaggacgcccccaccgggggtctctttccgccgccggtggccccgccggccgccacgcagaacggccactacggccgcggcggagaggaggaggccgcctcgctgtcggaggcggcccccgagccgggcgactctccgggcttcctgtcgggagcggccgagggcgaggacggggacgggcccgacgtggacgggctggcggccagcacgctgctgcagcagatgatgtcatcggtgggccgggcgggggcccgcggcgggggacagcgacgaggagtcgcgggccgacgacaagggcgtcatggactactacctgaagtacttcagcggcgcccacgacggcgacgtctacccggcctggtcgcagaaggtggagaagaagatccgagccaaggccttccagaagtgccccatctgcgagaaggtcatccagggcgccggcaagctgccgcgacacatccgcacccacacgggcgagaagccctacgagtgcaacatctgcaaggtccgcttcaccaggacaccagcacctccaccctccaaaagcctgggagcccgaggcccctctgagtcacagcagggcgttgagcaggacaagctgaaggtgcacatgcggaagcacacgggcgagaagccgtacctgtgccagcagtgcggcgccgcctttgcccacaactacgacctgaagaaccacatgcgcgtgcacacgggcctgcgcccctaccagtgcgacagctgctgcaagaccttcgtccgctccgaccacctgcacagacacctcaagaaagacggctgcaacggcgtcccctcgcgcctgctgtgcctgcaagcccctgcgtcctgtgggctggtggctgccctgacccccagccctggg

SEQ ID NO: 3858 - DNA, 588 bp, Homo sapiens
  SIMILAR (120)..(299): 391254mologous to Homo sapiens retinoblastoma-interacting protein,accession number AF043431,Smith-Waterman Score=106.
  misc_feature (1)...(588): n = a,t,c or g
gnctgcagganttcggcacgagagcntgggggactccgcgcagagntcgacagaggttgaggcagggccaggagccatgatggacacagaggggcagtagaggctgcaggcttctccacaaccccagcgcagaggggcccgggccagggccacagggagccatggagagcttcatggagtcgctgaacaggctgaaggagatccacgagaaggaagtcctgggcctncagaacaagcttntggaactnaactcagagaggtgccgggacgnccagaggatcgaggagctntttttncaagaaccancancttcgggtacagcagangncantttaggagaacttnggtttcnttgagaacanngtttngggnncggtctttttnngancnctttnaatgtttaaccnangtgntttgncnanntngnngtanaanntngttttttannttcnttcntttaaaancttaangtgatttttattttnacntnggggttnnccgnttttcaaaannnnnnnnnnnnnnnnnnnnnnnnnnnnnnnnnnnnnnnnnnnnnnnnnnnnnnnnnnnnnnnnnnnnnnnnnnnnn

SEQ ID NO: 3859 - DNA, 2292 bp, Homo sapiens
  SIMILAR (979)..(1371): 1001254mologous to Homo sapiens dJ908M14.3 (novel protein),accession number AL121832,Smith-Waterman Score=687.
atggagagcttcatggagtcgctgaacaggctgaaggagatccacgagaaggaagtcctgggcctgcagaacaagcttctggaactgaactcagagaggtgccgggaccacactggccacttcatccccctgaagccccagtgtgccagcactaccaccgtcctatggtgcagaagggaaactgaggctcagtgtgggggcggggggagtcacttgtccaaggtcacacggacagacatcacagaggagcgtgcagatgactggggggggtgcgtggacgggacagacgtcacagaggagcgtgcagatgactggggggggtgggacgcccagaggatcgaggagctcttctccaagaaccaccagctccgggaacagcagaagacactgaaggagaacctgcgggtgctggagaacaggctgcgggccggcctgtgcgaccgctgcatggtcacccaggagctggccaggaagcggcagcaggagttcgagagctcccacctgcagaacctgcagcgcatcttcatcctcagccggcactgctcattcaacagcatccaatcagccatgcacgcagccagcatccacggcgcccctgctgcctgccaggccctgggctacgtgctgggggcactgctgaggggcttccctgtgccttttgcagccaacgagatgaacgggctgaaggaagagaacgagaccttgaaggaggaggtgaagcggcttcggggcctgggagacaggcccaagccccgggccaaggagggcacctcggaccccccctcacccctgctgctcccctcccctggtggctggaaggccatcacagagaagccaccgggaggccacgaggaggctgaggaagaccaccagggcgtgggcctacggggagaagaaaagccagcagggcacaggacatctccagtggccaaaatctccccaggggccaccctgcctgagtcgcgagccccagacatgagcccccagcgcatctccaaccagctgcacgggaccattgccgtggtgcggcctgggtcccaggcttgccctgccgaccgaggccccgccaatgggacgcccccaccactgcccgccaggagcagcccacccagcccagcgtatgagcgtggcctctccctggacagcttcctgcgggcctcccggccctccgccatgacccatgaggccccgaagctctccccgaaggtggaccggctctgcctcctaaaccgccccctgtccctgcaccttcagagcccccacagcagccccctggcccctgctgcagcccccagcgacccccggctccaggacctgaaggccagagaagcagaggcctgggaggagcccacagaactgctggggctgcccagtgccctggcgggcatgcaggaccttcgcctggagggggcactgcacctgctcctggcccagcagcagctgcgggctagggccagggcaggcagtgtcaggccaaggggccagcccacacccggggagatgctgccctccctaccagtcggctcagactctgagggccctgagaatgaggggaccagggcagctctggccgcagcaggcctgtctggagggcggcacacacagcctgcaggcccgggccgcgcccagaggacagaggctgcagccacgcaggactgtgccctagacaagcccctggacctctcggagtggggccgggcccggggccaggacactcccaagccggccggccagcatgggtcactcagccctgccgctgcccacactgccagccccgagccacccacccagtccggacccctgactcgcagtccccaggcactcagcaatggcaccaaggggaccagagtgccagagcaggaggaggcttccactcccatgccgcctgacctggacggccacccagagcccagcaaggctgaagtgctgagaccagagtccgacgaactggatgagacagacaccccaggcagcgaggtgggcctgagctcccaggcggaggccactacgagcacgaccggggaggggcctgagtgcatctgcacccaggagcacgggcagggtccaccacggaagaggaagcgggcctcggagcctggggacaaaggcagtgcccacgctctgggaggcaacggaccactcggacccccacccctgcccgccaagctccaagcacaatcttggacgccccctcgtgggctgacagcaaacagatgtctggcagtgagggtggagggagacagtgggcggcagcaccctcgaagaccgggtcccctgagtgacggagaataa

SEQ ID NO: 3860 - DNA, 3531 bp, Homo sapiens
  SIMILAR (498)..(3146): 231254mologous to Saccharomyces cerevisiae mal5, sta1, len: 1367, CAI: 0.3, AMYH_YEAST P08640 GLUCOAMYLASE S1 (EC 3.2.1.3),accession number Z38061,Smith-Waterman Score=266.
gagcaagtcagttggtgctaactttggcctaccaggcaaactgtgtttctgtctcttatactgacctgctaggaaaacctgggggaagttatttcacctttctgtatgtccttaatattcgcagcaggagccgcctgaagaaagactatgatgatttcagaagacaacctgatcatgatacatttaatagagaactatggaccactgatgaaggtgaaggagatcttggaaaagactctcctaagggagaaatcagtaagtctatagactcaacagaacctctggatatcctggagaaagatcactttgattcagatgatatgaagttgtcagaaatagattttcctatggctagaagcaagctgttgaaaaaggaattgccttcaaaagacttaccgaagacactgcttaaaacacttaaacgacagtccaaacaaactgattatgtggatgacagcacaaaagagctttctccaaggaagaaggcaaagttaagcacaaatgagacaacagttgagaatctagaaagtgatgtgcagattgactgtttcagtgaatcaaagcatacagagccatcatttccagagtcatttgcctcattggattcagtaccagtgtctactctccagaaagggaccaaacccattcaggctttgcttgcaaagaatattgggaataaagtgaccttaacaaatcaactgcctccttccacaggtagaaatgctcttgctgtggaaaaaccagttttatctcctccggaagcaagcccgataaagccagcattgacctgccacaccaatacaaaaggtcctttacaaatggtatacaaaatgccctgtggccagtggttgccaatagatcttcaaaatagctctgtaaagattcaggtgcagcctatggtggatcctaaaacaggagaaaaaatcatgcagcaagttcttattctgcctaagaattttgtgattcagcataaagaaggaaaagcagttgcaaaagaagtgccaccacttcaacagaaaggtacagaacaacattgttcatctttcccacagacaacaaatataaattcttctttagcatcagtttttgtcaactcaccaggaactgtttctacccaactaccaaatacagctttcaacaaaacaattacacctttatcaaatataagtagtgctagaccacagcctttgtcgcctgtaacctctgtaagtaacttattaacaccatcagttaagactagccagagtgaggcaggaaaagccaagaatgcagtttcagcagccacattctccttgcccagtgcttcaccgaccatttcctccacaggtcagcctctgtcatcaacaacaacactaaatgggtctacaaatcctggtagttccttcaactgttttgcacaacagactgctgattcttctgaagcaaagcaagagctgaaaactgtgtgcataagagattcacagtcaattcttgttaggacacgaggtgggaacactggagttgtaaaagtacagaccaacccagatcaaaattcacccaatactgtatcttcaagttcagttttcacttttgctcctcagctgcaggcatttctggtgccaaaatcaacaacttcttcctctgctttttcacctgtagctggaacaactactacatctagtctttcaccttttagccaaacaccaacttctgtttccattccagctagctttgccccatccatggggaaaaatctcaaacttacattaggccacaccactggcagtggtgatttgggccacgtgatagataaaacttcacacatgccctcttctcccttgaagtcctctatttgttctagtactctactaccatcaacaacaagtagttcggtaagtgtaattagcatatcagcagcaaattttggacaaaacaatgcaaatattattcatactccaactaaacagcaacaagtagattatatcacaaaaagttaccctgttacaaggtcagaagcaacagcagcaacaaatggagatgtaatcagtgggactccagttcagaaacttatgctggtatcagctccatctattctttcttctggcaatggaactgcaattaatatgacacctgcgctgacatctacaggtgtttctgcccagaaattagtttttattaatgccccagttcctagtggtacatcaaccccaactcttgttgcagaatcattaaaacaaactcttcctcctccattgcataaagcatatgttaagactccagagcaaccccaaatagtactgattccgtctacagtgggcacaccaataaaaataaattcatcaccagctgtgtctcagataaaggatgtgaaaattggactaaacataggtcaagcaattgtaaatacttcaggcactgtgccagctataccatcaattaacatattacaaaatgtaaccccaaaaggagaagacaaaagtagcaagggctatattttgccattgtcaacaagtggtaattcagttccagtaagctcaaattttgtgagtcagaatattacccctgttaatgaatcagtggtttcttcagcaagagcagtaaatgtgctttcagttaccggagcaaatttatctttgggttcctttccagtgacctcagcctctgcttcagctggggcacaacctcctgttttagtcagtggaaatgatacctcttcaagaattatgcctattttgtcaaatagactttgctcatcaagtctcggaaacactgtgggctatatcaactgtgaaaacaggacaccttgcatcatctgttctgatttcaactacacaaccagtagtgtctcctaaatgttttaacatcagctttgcaaattcctgttacgggttggccttacctacacctggcggactacatcccctaaaaataattaaacacagtttccacattcgggagcagtaccaggagccacacgttctgtatctatttctaaaagacaatctcggacttcactccagttccattcaccagggatttcaactacagtgccaacaaatgtaaacacaaataaacctcaaactgaattgtcgtccctttcaacaagtccagtgagctttctcttaagtgtgccaagctgccatccaactttcttgagcattttttctcatgggaaatgatcaagttttgatagcagaaagtgcttctttccaagactttctcgaggccatcttcctgtaggcgtcatgcttctgatgttacacagctgatattttcatatgagctgcatttttagactacaaagatgcttactcaggtgggagaccatttctttgaactgtaagtgatttatttgattttctttttaatagtccttgtttttctccttcaagcctttttaaggaaacatttaacagcatcaatgtattttttcaaattgctttttgatttacctagaagttctcaattttctgatttgtgtttgtctgatttcaagttgccatcatccatgtaatttttgctaaagaagacaggcaagtgtatcaccttcca

SEQ ID NO: 3861 - DNA, 1227 bp, Homo sapiens
  SIMILAR (78)..(911): 301254mologous to Cynops pyrrhogaster alpha1 type II collagen,accession number AB022046,Smith-Waterman Score=169.
tcagcacttctgttttcttctgcaggtggtgacaccatctaagaggcactggccagagagctgggcagcagctgccacctgggatgaagatgggcagagctgggccaccagggccgtggtgtgaacacaccactctccctccaggggccgaccaacgagctccgggggtccaaccctggctccggctttggcagaactctcacctcgcccccagacaccgtccccgtcaatctcatccctgccaatgatcacatccttgcctggtggcacgggtcccctctgtctgcggccactgtcatgggagaagccaggctcagccactggcaagagcaggcagccagcaagaggtggatgtgggtccaagcccaggccacacggctcccagcaagagccatggccaggggccagtcggcagcccctctgcccgacaaggatgtgggccagcgtcgtctgcacttcagaggagacgagaaccaggaggcggcccccgagggcatcccgcgggtcctcacggaggctgcgttctcccaccttggccaggatgccccgggaacaccatgcagcgtctctgaggcttccacactcgtgcaatgaacacacagagcggtgcagggcccaggacagcgccttccccacgtgctcagggggcacaagggcgtccctccaagtcttgctcaggggcctcccagggtccctgcccagctgtgggtcctcactgagcacccggcgaggacagagtacggcatccgttggcctcgatctccggaacaacacgggcacacggccgtcccagccagcaacgagagccacgaaacaaatccacccgggctgactcccgaagccctcggactgttccgccccacggacctcccggaccctctcttccacggggaagacaccgcccagccaggaccgggtgtataaagaaacgggatttccgtaggggcaggccgatttccccctttcaccgccccctgcgggcagcaggcgcgtcctggggctgggcaaccggggtgcaggttccggagctgccagagctgtgagggggactcgggagagatccaggttcctctggctgcgaagtccctggaggccgggccggagggctccgcgcacgtagcactttttggcccgcccggcgcccccgtcgcctccacaagggctgcctcggcctcccaaggtgctgggattacaggcgtgagccagcgcgcccagccagctgggcat

SEQ ID NO: 3862 - DNA, 1183 bp, Homo sapiens
  SIMILAR (802)..(1182): 291254mologous to Caenorhabditis elegans weak similarity to collagens; glycine- and proline-rich,accession number AF000298,Smith-Waterman Score=53.
tcagcagggagtttttgcctggcggaacttgtctcttccaatcatctgactgtggcccacatcttgcagggagccgatatgtggatttactcccttgatggaagcagctgctgctggccatgagataatcgtgcagtattttcgcccacgggtcggcgggcaccggggaggtggcggacctgcgggcacgttggcgcgcgtgtgaagcgcccctggtgcgtttggtgtgtgatcaacgcgtacacatgtggcgggtgtgcagatgccgcccgtgcccggcacgtgtgatgtgtgtacacggccatgttctcccgtctcaaggcctccgagagcttccacagcggtggcagcggcagcctcgatgggccgcgacagccacgtcacccccgccacacttcccccatgccgccaccagcagctctgcggcctccagctggcccacgcggcctcgcccccgggggcccacagcaccaccagccacagccgcccctgtggaactccaacacccccttctccggcttcagactgggccacccctgggccccccaacagggccagcttaggaacccagggcccacccttgtatacgaggcttgctgccagctggttctgggccgccgcccagaagacagggccaccccgagcctccccggctccacactgctgcctgtagcccttgtcagccacagcgtgctctggaatcttcctgcccacccagggcttttcctgggacagctgctcactggctgcttggcactggcgactggctgctgtgacctgccgctcaagccgcacttgcttcccaggaatgggccctcccaggaatctgcctttgtaatagcctttcggagcccacaggacgggtgatcctggccagccagctagccccctgcatccgcctggggtgcaggaaacgaagcttggctaaggcccccaagctcatcagcggtggagctggggcgcacaccccgactccagagcccacttgtttctcagtctctgtgctgggcacctcccctcctgcagccgggggaccacggggacaggagtcagtggtgtcatcgccagtgacaatgggcacttcccggcctgggctattccctccttgggatgccgcggtgaggccagcctggaccaccccgcaggccaactgccagctcgtggtcaacgctcccgccgccat

SEQ ID NO: 3863 - DNA, 1599 bp, Homo sapiens
  SIMILAR (330)..(1592): 291254mologous to Equus caballus type II collagen,accession number U62528,Smith-Waterman Score=183.
atgcctgggccatctgaaaagccagttgacttcgtgcagccaaactggaaataccagcagcccctgggcaaaggccagacccgtttcccgtttctgatgaacaaagaagcatcagctgggatggccatgggaaggcacacgaatctcagagtgcggagcagcgggggaactgagttcttcacgcggtcggcaaccaagttcaagggtgccctggcccagaagttcatgtttgtggatggagaccgggctgtgtgcggctcctacagcttcacgtggtcggccgcgcggacggaccggaatgtgatctctgtgctgtctggccaggtggtggagatgtttgaccggcagttccaggagctgtacctcatgtcacacagtgtgagcctcaagggcatccctatggagaaggaaccggagccggagcctattgtgctgccctctgtggtccccctggtgcccgcgggcactgtggccaagaagctcgtcaaccccaagtacgcacttgtcaaggccaagagcgtcgacgagattgccaagatctcctctgagaagcaggaggccaagaagcccctggggctgaaaggcccagcgctggctgagcatccaggggaactccccgagctgctgccacccatccacccaggactgcttcacctggagagggccaacatgtttgagtacctgcccacgtgggtggagccagacccggagcctggcagcgacatcctgggctacatcaatatcatcgaccccaacatctggaacccccagcccagccagatgaaccgcatcaagatccgtgacacctcccaggccagcgcccagcaccagctgtggaagcagagccaggacagcaggccccgtccagagccttgccctcccccagagcccagtgccccccaggacggtgtcccagctgagaacggcctcccccagggggaccctgagccattgccccccgtgcccaagccccggacagtccctgtggcagatgtactagcccgggacagcagtgatattggctgggtcctggagctccccaaagaggaagctccccagaatgggacagaccataggctacccaggatggcaggcccaggccacgccccactccagcggcagctatctgtgacccaggatgaccccgagagcctcggggtggggctccccaatgggctggatggggtggaagaagaagatgatgacgactacgtaaccctcagtgaccaggacagccactcaggcagctccggccgtggccctggcccccgacggccctcagtggcttcctctgtgtcagaggagtacttcgaggtgagagagcactcagtccctctccggaggcgccactcagagcaagtggccaacgggccaaccccaccaccgcgccggcagctgagtgccccccatataacccgagggacctttgttggaccccagggtggctccccatgggcccagagtcggggaagagaagaagcagatgcgttgaagaggatgcaggcccagcgctccacagacaaggaggcacagatggggaaacttgatgaacaggcaggggtgggaaccggccagggccatatggaaggccatcattaa

SEQ ID NO: 3864 - DNA, 1351 bp, Homo sapiens
  SIMILAR (406)..(1014): 331254mologous to Cynops pyrrhogaster alpha 1 type I collagen,accession number AB015438,Smith-Waterman Score=131.
aagcagttctatgaagtttggatgtcaagattctcagctcacaacagggatgagaagagaagatggttctctgtggagcagagtcaccaacaatagcaggaaggacaaatgtgacagcctgaaagacaagtcagtaaatgaaaacttgaaaggtgaatttcagactggagaaggcagcggggaaagggactcaagtccgtttttctcggaccaatggcagtgtatggctgacctgccgtgcctgcagcccacaagccacccccttcttttcccacgcatggcccaaagctacgagctctcagagtttttccttcttgcagcacgagatgacacaaagataggttctggcagttgcagaatgattcctgtttcctacatagcccaggagaaaggcaatggctgggtgggccgcggtcagatacgtttggcccgcaagtccttttcggacacgttggcatctgctcccaaagagcgccccagcaggacccggtcaccggggtcttccagaggggcggtagccaccgcacaggagccagcggcatcccccaaggagccgcaagccctacctggcttaacccccggacatgtgtgtcgctaccgatcgaagaacccaaacaccccgagatttccctcctctaggcaggtgaaaaccccacggaactctccgcagcgctgcctgcccagccggccgtgtctcgccgtccccgaggcctcgggggctcccagcacctccacccaaatcccacctgtgcgggctcgggagtccgagggcgctgacagctgctgccgccgcatcccggatctccaaagggggagaggggttggactgcaagccccggggcggcccgagggggcccaggtccagctcctgccccacgccctccgtgcgtcctggagtcagcccagcgtcactttcccgctgcccttggctggcttggccgtcaccccgggtcgaggactgagccagcctggaaagctggcggggccgcggcgcgcccgggacctgagctccctcgggacctgctgcaagctggcagcacagacacagccagtggggaacagcttgcagcaggcccctggacagggaaggaaattagtggcagagccaggcctagactttgactctccacactcgctgtcacagccagaagagtccctggtttggttccattccagaaggattatacgcaaagcagccatagacatccatgaacaaatgaaggagcgggtgcctgagaggctgatcaatgcttttggacaaccttgcagggattgcagggagaggtgcactggcatcctggagtccagggctgccaagaaggtgtggttgataacagatgtcaaagaatag

SEQ ID NO: 3865 - DNA, 415 bp, Homo sapiens
  SIMILAR (2)..(52): 881254mologous to Homo sapiens mariner transposase,accession number U49974,Smith-Waterman Score=69.
ttacacaattctgactgaaaaatgaaagttgagcaaactctccacttgatgggatgcatcaagatcagctgcagaaaagagaagaactttcaatggagattttaaacaagtgagatcaagattctgaagcatatcctcaaagaactgtaacaggagaggaaacatggctttaccagtatgatccgccacccctccccaggtcccttcccccaccacaaacccacactgcgcccgtgggcgcctagagcactggggtggatgagaacttccacctgggcttaacggagacaagctagcccaccactcccccacccctttcctctccttctcaggcttgctctttgtggactggctgtgatcccagctccttagcttgtttggattattcacccaaggggttatccgaatcttcatt

SEQ ID NO: 3866 - DNA, 4530 bp, Homo sapiens
  SIMILAR (3436)..(4431): 891254mologous to Mus musculus cadherin-related 23 protein,accession number AF308939,Smith-Waterman Score=1542.
atggggttctgctgtcgggaatgcaggcctcgtctgctcaaggggaggccatgcattcagcatgcaggtccggtggcagccttcaaggtcgccacgccgtattccctgtatgtctgtcccgaggggcagaacgtcaccctcacctgcaggctcttgggccctgtggacaaagggcacgatgtgaccttctacaagacgtggtaccgcagctcgaggggcgaggtgcagacctgctcagagcgccggcccatccgcaacctcacgttccaggaccttcacctgcaccatggaggccaccaggctgccaacaccagccacgacctggctcagcgccacgggctggagtcggcctccgaccaccatggcaacttctccatcaccatgcgcaacctgaccctgctggatagcggcctctactgctgcctggtggtggagatcaggcaccaccactcggagcacagggtccatggtgccatggagctgcaggtgcagacaggcaaagatgcaccatccaactgtgtggtgtacccatcctcctcccaggatagtgaaagtaaccatggcaacaacttccggatccatgtcagcaatgggctcctgatgcgagggccccggcccctggaccgggagcggaactcatcccacgtgctgatagtggaggcctacaaccacgacctgggccccatgcggagctccgtcaggatgaggaaactgaggcaaagcactgcactggcacagcactggacaggcacagcactggacagaaagcaggtctggttctccaggaagcccagttgctcccacttgctcagcaagaacctgacagacctctgcttcctgtacatctgtgcctctcaggcaaaagccaccatgcctggcctccataaacaccttttaaactgtattacgttcatgatgtacagtgcacacattcataaagagaacttagtgctggtgattgtgtacgtggaggacatcaacgatgaggcccccgtgttcacacagcagcagtacagccgtctggggcttcgagagaccgcaggcattggaacgtcagtcatcgtggtccaagccacagaccgagactctggggatggtggcctggtgaactaccgcatcctgtcgggcgcagaggggaagtttgagattgacgagagcacagggcttatcatcaccgtgaattacctggactacgagaccaagaccagctacatgatgaatgtgtcggccactgaccaggccccgcccttcaaccagggcttctgcagcgtctacatcactctgctcaacgagctggacgaggccgtgcagttctccaatgcctcatacgaggctgccatcctggagaatctggcactgggtactgagattgtgcgggtccaggcctactccatcgacaacctcaaccaaatcacgtaccgcttcaacgcctacaccagcacccaggccaaagccctcttcaagatagacgccatcacgaggatactgggaacacaaatggacacaaagatgaacaagacccttctcagtcctcaaagagttctcaggctagaagtggaaatggaactaatccaggatgcaaatcagagcgccacaagaagatgtgcagagaactacaacagaggggtagtggagcccctcagggcccagcagtcatacctggctggggaagcaggaaggcttcatggaagaggtggcttcccagtggaatgtgagagagaagaaggaattcaacagacagagtgtcctggggaagttatgccggacagaggaagtgacatggagggtgtgatcacagtccagggcctggtggaccgtgagaagggcgacttctataccttgacagtggtggcagatgacggcggccccaaggtggactccaccgtggtgagtgggaccagggtctacatcactgtgctggacgagaatgacaacagcccccggtttgacttcacctccgactcggcggtcagcatacccgaggactgccctgtgggccagcgagtggctactgtcaaggcctgggaccctgatgctggcagcaatgggcaggtggtcttctccctggcctctggcaacatcgcgggggcctttgagatcgtcaccaccaatgactccattggcgaagtgtttgtggccaggcccctggacagagaagagctggatcactacatcctccaggttgtggcttctgaccgaggcacccctccacggaagaaggaccacatcctgcaggtgaccatcctggacatcaatgacaaccctccagtcatcgagagcccctttggatacaatgtcagtgtgaatgagaacgtgggtggaggtactgctgtggtccaggtgagagccactgaccgtgacatcgggatcaacagtgttctgtcctactacatcaccgagggcaacaaggacatggccttccgcatggaccgcatcagcggtgagatcgccacacggcctgccccgcctgaccgcgagcgccagagcttctaccacctggtggccactgtggaggacgagggcaccccaaccctgtcggtgagcgatgggggtggccacagggaggagcgggtgggccagggcagctccgcctccgattatctgcctggcttcaaaatggccttcactggctcaggaccaaccttgctggaggacaagggcatgaaagattcattcatttgttcatccaacaccaagttcctgagagctggacattcctgcaaacagcctaggccacccccatccggcctcagcccatatcacccgaactcggaacagctgtgctgcaaggggtatctgggccagacccaggcccgccacacaatgctccctgctcagcccctgcacagaccagagggcaagccagtgtgccacagagggaactgtcagggtagaagcagtcctaaaagcaatctggtccagctgccttgttttatggtggaaagaaccaagcacagagaagttaagcgacttggcccaggggaaatcaccaccacgtctctgcttgaccgagagaccaagtctgaatacatcctcatcgttcgcgcagtggacgggggtgtgggccacaaccagaaaactggcatcgccacccggcctggctccttcctgccctcgaaagcccaggctctgcccaaggctcccaaggttggtggagctggcagaattaatgcgaagattgcccgtgggcatctgagcacttttcccctggcaggccctgccctggcccatctcagctgggtaaacatcaccctcctggacatcaatgacaaccaccccacgtggaaggacgcaccctactacatcaacctggtggagatgacccctccagactctgatgtgaccacggtttttgggaaattcttcccaaacgggattgatgggcaggaaatccacgagctatcagggaatgcctactgcatgccaggccccacgcttgtcaggctgagggtacaggaagcaacaccaggccaggtggtggctgttgacccagacctgggggagaatggcaccctggtgtacagcatccagccacccaacaagttctacagcctcaacagcaccacgggcaagatccgcaccacccacgccatgctggaccgggagaaccccgacccccatgaggccgagctgatgcgcaaaatcgtcgtctctgttactgactgtggcaggccccctctgaaagccaccagcagtgccacagtgtttgtgaacctcttggatctcaatgacaatgaccccacctttcagaacctgccttttgtggccgaggtgcttgaaggcatcccggcgggggtctccatctaccaagtggtggccatcgacctcgatgagggcctgaacggcctggtgtcctaccgcatgccggtgggcatgccccgcatggacttcctcatcaacagcagcagcggcgtggtgctggaccgcgagcgcatcgcggagtaccagctgcgggtggtggccagtgatgcaggcacgcccaccaagagctccaccagcacgctcaccatccatgtgctggatgtgaacgacgagacgcccaccttcttcccggccgtgtacaatgtgtctgtgtccgaggacgtgccacgcgagttccgggtggtctggctgaactgcacggacaacgacgtgggcctcaatgcagagctcagctacttcatcacaggtggcaacgtggatgggaagttcagcgtgggttaccgcgatgccgttgtgagaaccgtggtgggcctggaccgggagaccacagccgcctacatgctcatcctggaggccatcgacaacggccctgtagggaagcgacacacgggcacagccaccgtgttcgtcactgtcctggatgtgaatgacaaccggcccatctttctgcagagcagctatgaggccagcgtccctgaggacatccctgaaggccacagcatcttgcaggcaggcctcagggcagcctcaacccccaccccaacctccaggaagacagtgcctaatggccagcagggcctgctggtgaggtggatggctacaggctga

SEQ ID NO: 3867 - DNA, 2610 bp, Homo sapiens
  SIMILAR (1381)..(2133): 921254mologous to Mus musculus cadherin-related 23 protein,accession number AF308939,Smith-Waterman Score=1208.
atggcgctcaccttcccctgtcggaagtttgaatggtatggtcggcggcagccagaggttcgctattcagtgcctgccagccaccagctgaaagccacggacgcagatgagggcgagtttgggcgtgtgtggtaccgcatcctccatggtaaccatggcaacaacttccggatccatgtcagcaatgggctcctgatgcgagggccccggcccctggaccgggagcggaactcatcccacgtgctgatagtggaggcctacaaccacgacctgggccccatgcggagctccgtcaggatgaggaaactgaggcaaagcactgcactggcacagcactggacaggcacagcactggacagaaagcaggtctggttctccaggaagcccagttgctcccacttgctcagcaagaacctgacagacctctgcttcctgtacatctgtgcctctcaggcaaaagccaccatgcctggcctccataaacaccttttaaactgtattacgttcatgatgtacagtgcacacattcataaagagaacttagtgctggtgattgtgtacgtggaggacatcaacgatgaggcccccgtgttcacacagcagcagtacagccgtctggggcttcgagagaccgcaggcattggaacgtcagtcatcgtggtccaagccacagaccgagactctggggatggtggcctggtgaactaccgcatcctgtcgggcgcagaggggaagtttgagattgacgagagcacagggcttatcatcaccgtgaattacctggactacgagaccaagaccagctacatgatgaatgtgtcggccactgaccaggccccgcccttcaaccagggcttctgcagcgtctacatcactctgctcaacgagctggacgaggccgtgcagttctccaatgcctcatacgaggctgccatcctggagaatctggcactgggtactgagattgtgcgggtccaggcctactccatcgacaacctcaaccaaatcacgtaccgcttcgacgcctacaccagcacccaggccaaagccctcttcaagatagacgccatcacgaggatactgggaacacaaatggacacaaagatgaacaagacccttctcagtcctcaaagagttctcaggctagaagtggaaatggaactaatccaggatgcaaatcagagcgccacaagaagatgtgcagagaactacaacagaggggtagtggagcccctcagggcccagcagtcatacctggctggggaagcaggaaggcttcatggaagaggtggcttcccagtggaatgtgagagagaagaaggaattcaacagacagagtgtcctggggaagttatgccggacagaggaagtgacatggagggtgtgatcacagtccagggcctggtggaccgtgagaagggcgacttctataccttgacagtggtggcagatgacggcggccccaaggtggactccaccgtggtgagtgggaccagggtctacatcactgtgctggacgagaatgacaacagcccccggtttgacttcacctccgactcggcggtcagcatacccgaggactgccctgtgggccagcgagtggctactgtcaaggcctgggaccctgatgctggcagcaatgggcaggtggtcttctccctggcctctggcaacatcgcgggggcctttgagatcgtcaccaccaatgactccattggcgaagtgtttgtggccaggcccctggacagagaagagctggatcactacatcctccaggttgtggcttctgaccgaggcacccctccacggaagaaggaccacatcctgcaggtgaccatcctggacatcaatgacaaccctccagtcatcgagagcccctttggatacaatgtcagtgtgaatgagaacgtgggtggaggtactgctgtggtccaggtgagagccactgaccgtgacatcgggatcaacagtgttctgtcctactacatcaccgagggcaacaaggacatgaccttccgcatggaccgcatcagcggtgagatcgccacacggcctgccccgcctgaccgcgagcgccagagcttctaccacctggtggccactgtggaggacgagggcaccccaaccctgtcgcttccatttgtgaagcccggctatgacacaggcgtcacacaccttaaccagaatccacacgatggcccaaagacagcgtcagtccactccttttcttggagaaagaaactggggccagaggggaacgctgctccaagtgcgatgccaggagctggcatagtgaacccctccctgtgccacacgtggcagaaggaggcccacaagcacctcagctcaggcctgccccgccactcatggctccaggcctccgtttctccactgtgggagtggagcacctcttgggcctgcatcaaggtgaaggacgtcaccctcatttcaggctttcatcctcctacctatgtcccctccccaagctcctctgtggcttggcccttgagtaccatgggcctgaggttatctgctgaattccacacacgcctgcacagacgggatcaatccgaggctgcctcgccttcagcttatctctgctccaaatga

SEQ ID NO: 3868 - DNA, 1398 bp, Homo sapiens
  SIMILAR (523)..(1392): 291254mologous to Babesia bigemina 200 kDa antigen p200,accession number AF142406,Smith-Waterman Score=249.
atgcttgggctgggcggcctggctgctcctggactcgcctcccagcgtctgatgctgtgtattttccatctgccccaggaatttgacacagagggtgtaggagttgtgttccaagtttgttcctgcaaaccctccgatgaggccagctgcattcatcggggcctggatggccgcacctctctctccccgccctgtctcctgcactcagggacagagtgcaaggacatgatcgaacagaaaaagttctggtacaagatcaaccccgtggggtggaaggcgtgggccaatgaccagctggaagtgcaggttcatgtgtcctcagacagtggctggtgcctcacgctggcttctggctgtgaccagggtagcagagagagcaaagaggtcctttcctcaggtggccgagcacacacagtccagtgggctgaggtggccccaagggcaggaacgtggcatctcttcccaccagtcagtggctctgggggcacaaggacttgtcgggggaaggaggcagcaaccacgagagaaagcggggacaacggggcacgcaccaaaaaaacacaacggtgcccgaaaaaccctcccccgcgtgtggagaatagagagggcggccaagggggagcccgattttccccacccgcgctccgagagaaaagaaaagatgagaagaggttgggggacacaaacgagaacaaacgggataggggggtggggaacgccgaaagccgcccaacccacaacacgaaccgaaagaaaggggttggtgttcccgtgtgccagaagaaccccagggaaaaggaggagcgcgagggcaaggcccaaaaagctatagagagagaagcgaaggaggggacgccccaaaaggtgtttgtggtgaacggggcgacaccccagccaccacccccggacacaccaatgttgattttaatggagaaaggggaggaggggaaggaacgtaaaaaggaacagcccgcccacgcggggcagaaaaggaggaaggccgcacgacaccgccgacgacgacgacgaagagagagaacagatgagaagaacagaacgtggacgcggcgaagacgagagaaagcagggcaggatgagaagagagagggcgaacacgggcagaaacgaagccaacagggacgagaaagcagaagagacgggagagcgaggacacggaaagagagacgacagaaacgggagaacgacaacagagcacgacgacgacagcaggccgagagagagaaaacgaagagcgtgaagcgacgacaaacgacgcagcaagcagaagaggtaagacaggcgcgagagaacgaagcacgagagccgcagcagcggagacagcacagcagacggaggaaggagaaagaagagatgcgagcgccgagatcgaagcagtga

SEQ ID NO: 3869 - DNA, 548 bp, Homo sapiens
  SIMILAR (154)..(546): 751254mologous to Mus musculus Pro-Pol-dUTPase polyprotein,accession number Y12713,Smith-Waterman Score=481.
aagataaaccctgcgctgcctgaggaaacagtgatggcctcccctgaggcagttgccaggaaagataatgtagagtctcctcaggacccatctccaacacccctgtttgcttctagacctataactggactaaagtcccagtgggcccctagagtgccagaatgcataattagcacagacatacttagcaactggcagaacccccacattggctccccaactggtggggtgagggctgttatggtgggaaaggccaaatggaagccattagaggtgcctctacctagaaaaatagtaaatcaaaaacaatgtcacatccctggagggattgcagagattagtgctgccattaaggccttaaaagatgcaggggcaatgattcctacaatatccctgttcgactctactcagcctgtgcagaagacaggtggattttggagaatgacagtggattattgtaagcttaaccaagtggtgtctccaattgcagctgctgtaccagatgtggtttcattgcttgagcaaattaacacaccttcgggtacctg

SEQ ID NO: 3870 - DNA, 1806 bp, Homo sapiens
  SIMILAR (664)..(1122): 671254mologous to Mus musculus Pro-Pol-dUTPase polyprotein,accession number Y12713,Smith-Waterman Score=539.
atgtccgaaagcctcaaaaccagggaagctgacagtgcagccttaagtctgcagccgaaggcccaagggccccagggaagatgctggcacaagtttcagagccagcgtctgaagatcctggagtctgatgtccaagggcaggaagagtggaaagaagcaaacatcctgcacgtgaagaagaaagagccagaagactcagcatgcaaatttatctcatcttctcctgctttctttgttccagctgcattggtagccaattggatgatgcccacccacattgagggaaaggagggagagaagaagggagagagaaaggtaggaaggagggaagaagagaacaaagaaaaaagaagggaagcagaaagggagaaagaaagaaagggagagagtgagggaggagggaaggaaggaaaggaaagacagcaggaaggaatgaaaggaagaaagaaggatgggagagggagggagggaggggacctgggatggaggaagaaagcctttccaccttggtctgaggagataaaccctgtgctgactgacacaacagtgatggcctcccctgaggcagttgccaagaaagataatgttgattctcctcagaagccaccgccaatagccatgtttgcttctagacctacaactagactaatgtcctcgcagaaccctagaggagacctccagccttttaccaggataactatgcactggggaaagggaaatgatcagacattttggggactgctggacaatggctctgagctgacattgattccaggggacccaaaatgtcattgtcgtcttccaattgaagtaggggcttatggaggtcaggtaattactggaattttagaacagccccaacttacagtgtgtccagtgggttcctggactcatcctgtgatcattatcccagtaccagaatgcataattggcatagacatacttagccagctggcagaacccccatattggatttctgactggttgaaggctgttatggtgacaagggcccagtggaagccattagagctgcctctacctagaaaaatagtaaatcaaaaacaatattccatacctgaagagcttgcagagattaatgccaccatcaaggacttgaaagatggcagaggctcatctagccataaagtgggtcatgaacagcaacaccccatcatcaaatggaaatggtatatacatgatcaggctcgagcaggccctgaaggcaacaccagaagtcacaggtccaggaatcaaggggtgggagtagaagtggcaccactcatggtcacccctagtgatccactagcaaaatttttgcttcctgttcctgcgacattattgtctgctggcctagaggttttagttccagatggaggaagacttccaccaggagacacaacaacaattccattaaacttgaagttaagattgccacctgggtactttgggctcctcctacctttaagtcaacaggctaagaagggagtgactgtgttggctgggatgattgactatcatgatgaaatcagtctaccactccacaacggagcttgcagatggcctattgtgggaccttctgattatgtactatatgtgttactattatcaaaagagattgcatcaaccatcttggttgatgcaattgaaaagcccagagttgggttagttatagagatcgttgatcctccatctcaatatgtgatccaaggaccaatttcttcccaccgtctcattctgccaggcattggattggagcttcatttcaatgctggaggttcttgtgattatagagattactttaattaa

SEQ ID NO: 3871 - DNA, 720 bp, Homo sapiens
  SIMILAR (1)..(279): 891254mologous to Homo sapiens 3-beta-hydroxysteroid dehydrogenase/delta-5-4-isomerase,accession number M67466,Smith- Waterman Score=419.
cttcctttaaccctgatgtactggattggcttcctgctggaagtagtgagcttcctactcagcccaatttactcctatcaaccccccttcaaccgccacacagtcacattatcaaatagtgtgttcaccttctcttacaagaaggctcagcaagatctggcatataagccactttacagctgggaggaagccaagaagaatgtacctgagtctgttagaaccgtggagtgggtttcccttgtggaccggcacaaggagaccctgaagtccaagactcagtgatttaaggatgaccagagatgtgcatgtgggtattgttaggagatgtcatcaagctccaccctcctggcctcatacagaaagtgacaagggcacaagctcaggtcctgctgcctccctttcatacaatggccaacttattgtattcctcatgtcatcaaaacctgcgcagtcattggcccaacaaggaaggtttcttgtccttaattcatattaccagagggaaagaccatgtgggttttgcttgtttaccaaatctcagtagctgattctgaacaatttagggactcttttaacttgagggtcgttttgactactagagctccatttctactcttaaatgagaaaggatttcctttctttttaatcttccattccttcacatagtttgataaaaagatcaataaatgtttgaatgtttaatgtgaaaaaaaaaaaaaa

SEQ ID NO: 3872 - DNA, 963 bp, Homo sapiens
  SIMILAR (40)..(441): 531254mologous to Equus caballus 3 beta-hydroxysteroid dehydrogenase,accession number D89666,Smith-Waterman Score=358.
atgtgctatagcaggcaaagcaaccttggcacctttggtgaaggcaaaataaaaggaagtgaagttatagatgagtgtcccagatccagtaggtatcaggaccttcaagagctccagaacaagaccaagctgacggtgctggaaggagacattctggatgagtcatgcctgaagagagcctgccaggacatgtcggtcatcatccacaccacctccatcatagacatcatcggtgtcactcacagagagtccatcatgaacatcaatgtgaaacgtacccagcttctgttggaggcctgtgtccaagctacagtgccagtcttcatctacaccagtaccccagaggtagccgggcccaattcctacaaggaaatcatccagaacagtcacgaagaagagcctctggaaaacacatgcgtgttcaccttctcttacaagaaggctcagcaagatctggcatataagccactttacagctgggaggaagccaagaagaatgtacctgagtctgttagaaccgtggagtgggtttcccttgtggactggcacaaggagaccgtgaagtccaagactcagcgatttaaggatgacagagatgtgcatgtgggtattgttaggctcccaggagctatgacacaagactttaggacacccctcagcagccccttctctgcagcactgggcacaaccacctggaactggcgtctggcagttctttactcaggttggaaatccttcaaatacgtgtgtgggaatgccaatttaaacattgcacgtacactgacacctttttcaacctccttaaaaacacagggcaacatggtatatggaacaccttgccacccacctcattggcttccaaagctgagcattcccagctgctggaatgagacagggcgccagctggatgcagacagcattgtgaacagtgccctggatcccacaggagcagcaagaaactga

SEQ ID NO: 3873 - DNA, 621 bp, Homo sapiens
  SIMILAR (52)..(384): 1001254mologous to Homo sapiens hypothetical protein,accession number AL117444,Smith-Waterman Score=593.
ccgctgggcagcagacagtggagatcgacctgaggcatcggatccagctgccccgacctcgagaaccagcgcaacttcaatgagctctcccgcatcgtcctggaggtgcgcgagagggtgcgccaggagcagcaggaaggcgggcacgaggcgggcgagggtcgtggccggcagggcccccgggagtcccagccaagccctgcccagcccagggcagaggcgcccagcaagggcccagatgggacacctggtgaggatggtggcgagcctggggatgccgtagctgcggccgagcagcctgcccagtgtgggcaggggcagccgttcgtgctgcccgtgggcgtgagctccaggaatgaggactacccccgaacctgcaggatgtggaatagcacatttcaaacctacaagaaagaagtgtgcctcccccgtcattcgatgcaccctggcccctgggccatctgctgtgaatgccagaccagattcgggggccgcctgcctgtgtccagggtggaagcagcactgccttactgggtccctctgtccctgagaccccgaaagcagcacccctgctggatgcatgctgctggcacaactgctggcggatctgcggtgatgagt

SEQ ID NO: 3874 - DNA, 543 bp, Homo sapiens
  SIMILAR (100)..(336): 401254mologous to Caenorhabditis elegans Similar to cuticular collagen; coded for by C. elegans cDNA yk72c11.3; coded for by C. elegans cDNA yk55a12.3; coded for by C. elegans cDNA yk55a12.5; coded for b,accession number AF047652,Smith-Waterman Score=115.
aggcatcggatccagctgccagacctcgagaaccagcgcaacttcaatgagctctcccgcatcgtcctggaggtgcgcgagagggtgcgccaggagcagcaggaaggcgggcacgaggcgggcgagggtcgtggccggcagggcccccgggagtcccagccaagccctgcccagcccagggcagaggcgcccagcaagggcccagatgggacacctggtgaggatggtggcgagcctgggaattgccgtagctgcggccgagcagcctgcccagtgtgggcaggggcagccgttcgtgctgcccgtgggcgtgagctccaggaatgaggactacccccgaacctgcaggatgtggtaaggatgcggcgggtactggggcctgaaggtgggacagcatgggcttcagcgagggccccagccccacacctagcacaggcggagagggcctgtgacctcacagagggcggcagccggtgctttgggacaggagtgcggcctctgaccccttgggccatgttccccagcacctgagcaagcggccgc

SEQ ID NO: 3875 - DNA, 1177 bp, Homo sapiens
  SIMILAR (378)..(1151): 271254mologous to Leishmania major proteophosphoglycan,accession number AJ243460,Smith-Waterman Score= 190.
gtggcagccagatatcgggccatacggaggactgctgaacgtggtggtggacggcctgttcatcatcgggtggatgtacctgcctccccatgacccccacgtcgatgaccctatgagattcaagcctctgttcaggatccacctgatggagaggaaggctgccacagtggagtgcatgtacggccacaaagggccccaccacggccacatccagattgtgaagaaggatgagttctccaccaagtgcaaccagacggaccaccacaggatgtccggcgggaggcaggaggagtttcggacgtggctgagggaggaatgggggcgcacgctggaggacatcttccacgagcacatgcaggagctcatcctgatgaagttcatctacaccagtcagtacgacaactgcctgacctaccgccgcatctacctgccgcccagccgccccgacgacctcatcaagcctggcctcttcaaaggtacctatggcagccacggcctggagattgtgatgctcagcttccacggccggcgtgccaggggcaccaagatcacgggcgaccccaacatccccgctgggcagcagacagtggagatcgacctgaggcatcggatccagctgcccgacctcgagaaccagcgcaacttcaatgagctctcccgcatcgtcctggaggtgcgcgagagggtgcgccaggagcagcaggaaggcgggcacgaggcgggcgagggtcgtggccggcagggcccccgggagtcccagccaagccctgcccagcccagggcagaggcgcccagcaagggcccagatgggacacctggtgaggatggtggcgagcctggggatgccgtagctgcggccgagcagcctgcccagtgtgggcaggggcagccgttcgtgctgcccgtgggcgtgagctccaggaatgaggactacccccgaacctgcaggatgtgtttttatggcacaggcctcatcgcgggccacggcttcaccagccctgaacgcacccccggggtcttcatcctcttcgatgaggaccgcttcgggttcgtctggctggagctgaaatccttcagcctgtacagccgggtccaggccaccttccggaacgcagatgcgccgtccccacaggccttcgatgagatgctcaagaacattcagtccctcacctcctga

SEQ ID NO: 3876 - DNA, 681 bp, Homo sapiens
  SIMILAR (143)..(199): 361254mologous to Homo sapiens zinc finger protein,accession number AF027146,Smith-Waterman Score=40.
catctgagaattcatactcaggagtcttcctatgtatgtgatgagtgtggaaaagccttgactagcaaaagaaatcttcatcagcatcaaagaatccatactggagagaaaccctatgagtgtagcaagtatgagatagccttttggacttcttccccagctaggtcaccttgagcatgtctactctggagagaagcctgtgctggacatttgtcgttttggcctcccagaattttttacccccttttactggtaatagtacactccagtgaaatgtactgagtggattcccgtcttctactcaggaatggaatgtgtgacacaggcctgacctcagcctctgatccatccctcaagccacagttaatgattcagatgtcagtagatgaccaaaagatggttcaattagagtcccagggattgcaagagctaatagggaacaaatactctccccccgcccacccccattggttttaatgctgagaagaagaactagactcttacagaggtgagaatgaagtccacacagcaaaaatgcatctgagaattggagagcagtaaaagactgaagataatgtttgaacagccacatacaccatgcctgaagctaaaaatatatacgggtttttgaattgcagcagccaataaattccatttttgtttggttggttttggctttgg

SEQ ID NO: 3877 - DNA, 1397 bp, Homo sapiens
  SIMILAR (900)..(1139): 601254mologous to Homo sapiens zinc finger protein,accession number X78933,Smith-Waterman Score=254.
atgcggccacagctggccgggcgtgaccaccaccgaggcgcagcgaccttgctcctagagaggcccggccgcctggtgacgcacttccggcagcgccggggagcagtccgctacggaggtggaaagagtacaacacagcacttatcacagaggcggttgtcaggaccaaacgaccatacaaagggcttagtatggctcctggagcatattctacagaggttagtcagctttgtgaagctgcaagctaccagaaccttcacaaggacctacatcacctatgcctggttcctgccctggggcttctctggtgtcctatgtgggacacctgtggacacctgctgggccctgaaacaccagagaatccacactggggagaaaccttttgagtgtagtgagtgtggaaaagcctttaatggtaattcttcgttaattcggcaccagaggattcacactggagagagaccctatcagtgtgaggagtgtgggcgagcctttaatgataatgcaaatctgatcaggcatcagagaatccacagtggggacagaccctattactgtacagagtgtgggaatagtttcacgagtagttccgagtttgttatacatcagagaatccacactggggagaaaccctatgagtgtaatgagtgtggcaaagcttttgttggtaattcacccctacttcggcatcagaaaatccacactggagagaaaccctatgagtgtaatgagtgtggcaaaagctttggaaggacttcccatctaagccaacatcagcgtattcacacaggggaaaagccttattcttgtaaagtatgtggacaagccttcaattttcatacaaaactaactcggcaccagagaattcacagtgaggagaaacccttttgactggtgtagattgtggaaaagccttcagtgctcaggaacaattaaaaaggcatctgagaattcatactcaggagtcttcctatgtatgtgatgagtgtggaaaagccttgactagcaaaagaaatcttcatcagcatcaaagaatccatactggagagaaaccctatgagtgtagcaagtatgagaaggcctttgggacttcttcccagctaggtcaccttgagcatgtctactctggagagaagcctgtgctggacatttgtcgttttggcctcccagaattttttacccccttttactggaaggaggagaagaaatgtggtcggaagatgaggaatgaggtggtccataaagtgagtttcttcttagttgttcctatagcactcagttccttacttaaaaaaaaatggaaaatgctgaagaaggaaaaggcacaggatccaacagaatatggcaacttggaagatgacaacagtcagcagcaccagggagcaaaatggaaataa

SEQ ID NO: 3878 - DNA, 547 bp, Homo sapiens
  SIMILAR (4)..(387): 331254mologous to Mus musculus T2,accession number X67863,Smith-Waterman Score=146.
atggacagccagagaccccgagagcgacaagagaaagagaacggcagagtgagagacagaggcacacgcagaggatgcacagagaagcagagacagaagatgaaagagactggaagggacacgacaccaaaaccaggaggcaaaggcagagaaaaagagcagaggaagggcaatgcagagagcacgacagagagagacgcagagacagtgactggagagaggagagagaaacagagaaagagcacacaacagagcagaaaacccagtgaggagccacacagagagaagacgcagataaagagagaacgggggccagagcagggagaactagaaagggggcaatgcacagagaggaacagaaaggctgcaccccagaatgctaaacagaccctcacatttggactccacatccagcgaggagtgcccctgcccaccccccagatcacacagctgccaagtacagaccaccctataggtcccaccactcgggcataacccaccaacatcccagagctgcctctacactaaagctctggcccaaaccagc

SEQ ID NO: 3879 - DNA, 399 bp, Homo sapiens
  SIMILAR (37)..(399): 641254mologous to Homo sapiens unnamed protein product,accession number AK022547,Smith-Waterman Score=431.
gaaaatggggaggaatcaagacagaatagtactgtggaggaagattctgaaggtgacaatgattccgaagaattttattacggaggacaggtgaactatgatggggaactgcacaagcacccacaactggaagctgatttgtcagcagttagagagatatatgggccacatgcagtttctctcagggaatatggagccattgatgatgtagatattgatctgcatatcgatgttagctttcttgatgaggagattgctgtggcttgggaagtaattcgaacagaacctataattgttcgactacactgttcacttacacagtatttaaatggcccagtgcccactgttgatgtctttcagatttccacaaaagagcgatttggattgggacatcagctg

SEQ ID NO: 3880 - DNA, 874 bp, Homo sapiens
  SIMILAR (440)..(709): 751254mologous to Homo sapiens unnamed protein product,accession number AK024961,Smith-Waterman Score=310.
gcaaatccaaactgaaatctgagcaggacggaatctccaaaacgcataagctgctgcggaggacttgttccagcacagtcaagactgatgatgtgtgtgtcacaaagtcacacaggacctttggccgctccttgtccagcgatcccagggcggagcaggctatgacagcaattaaatcgcacaaacttttgaaccgtccttgccctgcagctgttaagtcagaggaatgcctaactctaaagtcgcatagactattgactcgatcttggtctggagatccacgatgtgagcacaacacaaacttgaagccccataaactgttaagcaggtcttactctagtaatctcagaatggaagaattatatggactgaaaaatcacaaattgctcagcaagtcctactccagtgcccccaagtcatccaaaacttgagcttttccaaggaaccttaacgcagaaggggcaggaaggctctctccttacctcagggcttatttgggtatccctaacaccatcttcatccttcatcttctcagcttgctccaaatggtgcaaaatgcattccagtacgagaccgtggcttcctggtgcagacaattgagtttgctgaacagcggatccctgtattaaatgaatattgtgaggtttgtgatgagccacatgtgtttcaaaatggccctatgcttaggcgtgggagagatgtttgtgaatgggccaagaaatatgcaaactcagtagtcaggaagaaattctgcagattaagcattgcaagacgcagtcggtaccgagctgatatggacctacttcgcatgtctaatttcatcctcacaataatttataaacagaaactaaatctccagaggttcttttcttag

SEQ ID NO: 3881 - DNA, 491 bp, Homo sapiens
  SIMILAR (147)..(4): 1001254mologous to Homo sapiens dJ635E8.1 (novel protein similar to Drosophila SCM),accession number AL110502,Smith-Waterman Score=245.
  misc_feature (1)...(491): n = a,t,c or g
attgttgtcgctcccatcaaggcgcaggcgaaggcgggcacctgtcagtccaactactgtggcaatacaggtggatgtggtgttcctggggtcctgtgcttccaatttcatactgatcttgaactcgttgcttggaggtgtgtaggactagatccaggatgtcagcagcttgatattgggatgcagactctgataggtgaccatatttgtgttttctaacatcactccagtctatcacattaggctgcatagtcaatggactaaaaaccggtctaggggttaagaagtttgggatttatccctggatccaccaataccttgctctgacttctgacaagtcagtttctttgtatgctaatttctccatctgagggcgcgacgaaggcgcggggcggctcactcccttcccgccgccacgaaatcgtcggnncggnnnttccnnnccggnnggtcatcctgtcgaccgtccgggannaannnangcgagcact

SEQ ID NO: 3882 - DNA, 1055 bp, Homo sapiens
  SIMILAR (388)..(1053): 901254mologous to Homo sapiens putative p150,accession number U93563,Smith-Waterman Score=1020.
atgggagactttaacaccccactgtcaacattagacagatcaaggaaacagaaagttaacaaggatatccaggaattgaactcagcactgcaccaagcagacctaaaagacatctacagaactcttcatcccaaatcaacagaatatacattcttttcagcaccacaccacacttattccaaaattgaccacatagttggaagtaaagcactcttcagcaaatgtaaaagaacggaaattataacaaactgtctctcagaccacagtgcaatcaaactagaactcaggattaagaaactcactcaaaaccgctcaactacatggaaactgaacaacctgctcctaaatgactactgggtacataacgaaatgaaggcagaaataaagatgttctttgaaaccatgttggaagttctggccagggcaatcaggcaggagaaggaaataaagggctttcaattaggaaaagaggaagtcaaattgtccctgtttgcagatgacatgattgtatatctagaaaaccccatcaactcagcccaaaatctccttaagctgataagcaacttcagcaaagtctcagcatacaaaatcactgtgcaaaaatcacaagcattcttatacaccaataacagacaaacaaagagccaactcatgagtgaactcccattcacaattgcttcaaagagaataaaatacctaggaatccaacttacaaaggatatgaaggacctcttcaaggagaactacaaaccactgctcaatgaaataaaagaggatacaaacaaatggaagaacattccatgctcatgggtaggaagaatcaatatcgtgaaaatggccatactgcccaagttaatttatagattcaatgtcatccccatcaagctaccaatgactttcttcacagaattggaaaaaactactttaaagttcatacggaaccaaaaaagaacccacatttccaagtcaatcctgagccaaaagaacaaagctggaggcatcacgctacctgacttcaaactatattacaaggctacagtaaccaaaacagcatg

SEQ ID NO: 3883 - DNA, 962 bp, Homo sapiens
  SIMILAR (441)..(962): 731254mologous to Homo sapiens putative p150,accession number U93563,Smith-Waterman Score=640.
acagatcaatgagacagaaggttaacaaggatatccaggacttgatctcagctctgccccaagctgatctaatagacatctacagaaccctccaccccaaatcaacagaatatacattcttctcagcaccacatcgcacttatttcaaaattgatcacatagttggaagtaaagcactcctcagcaaatgtaaaagaacagaaatcacaacaaactgtctctcagaccacagtgcaatcaaattagaactcaggattaagaaacttactcaaaaccgcacaactacatggaaactgaacaacttgctcctgaatgactactgggtacataacgaaatgaaggcagaaataaagatgctctttgaaaccaatgagaacaaagagaaacataccagaatctctgggacacatttaaagcaccagtatcatactgaatgggcaaaaactggaagcattccctttgaaaactggcacaagagagggataccttctcttaccactcctattcaacatagtgttggaagttctggccatggcaatcaggcaagagaaagaaataaaggttttcaattaggaaaagaggaagtcaaactgtccctgtttgcagatgacatgattgtatatttagaagatcccatcatctcagctgcaaatctccttaggctgataagcaacttcagcaaagtctcaggatacaaaatcaatgtgcaaaaatcacaaacattcttatacaccaataacaggcaaacagagagccaaattatgagtgaactcccatttacaattgctacaaagagaataaaatacctaggaatccaacttacaagggatgtgaaggacctcttgaaggagaactacaaaccactgttcaatgaaataaaagaggacacaaacaaatggaagaacattccatgctcatggataggaagaatcaaaatcgtgaaaatggccatactgcccaaa

SEQ ID NO: 3884 - DNA, 1452 bp, Homo sapiens
  SIMILAR (1)..(1023): 941254mologous to Homo sapiens putative p150,accession number U93563,Smith-Waterman Score=1651.
atgggagactttaacaccccactgtcaacattagacagatcaatgagacagaaagttaacaaggatacacaggaattgaactcagctctgcaccaagcagacctaatagacatctatagaactctccaccccaaatcaaaagaatatacatttttttcagcactgcaccacacctattccaaaattgaccgcacagttggaagtaaagctctcctcagcaaatgtaaaagaacagaaattatcacaaactctctctcagaccacagagcaatcaaactagaactcaggattaagaaactcactcaaaaccgttcaactacatggaaactgaacaacctgctcctgaatgactactgggtacataacgaaatgaaggcagaaataaagatgttctttgaaaccaacgagaacaaagacacaacataccagaatctctgggacacattcaaagcagtgtgtagagggaaatttatagcactaaatgcccacaacagaaagcaggaaagatccaaaattgacaccctaacatcacaattaaaagaactagagaagcaagagcaaacacaatcaaaagctagcagaaggcaagaaataactaaaatcagagcagaactgatggaaatagagacacaaaagacccttcaaaaaagtaatgaatccaggagctggttttttgaaaggatcaacaaaattgatagaccactagcaagactaataaagaagaaaagagagaagaatcaaatagacgtaataaaaaatgataaaggggatatcaccaccgatcccacagaaatacaaactaccatcagagaatactacaaacatctctacgcaaataaactagaaaatctagaagaaatggataaattcctggacacatacaccctcccaagactaaaccaggaagaagttgaatctctgaatagaccaataacaggctctgaaattgtggcaataatcaatagcttaccaaccaaaaagagtccaggaccagatggattcacagtcgaattctaccagagggcaattaggcgggagaaggaaataaagggtattcaattaggaaaagaagaagtcaaattgtccctgtttggagatgacatgattgtatatctagaaaaccccatcgtctcagaccaaaatctccttaagctggtaagcaacttcagcaaagtctcaggatacaaaatcaatgtacaaaaatcacaagcatttttatacaccaataacaggcaaacagaaagtcaaatcatgagtgaactcccattcacaattgcttcaaagagaataaaatacctaggaatccaccttacaagggatgtgaaggacctcttcaaggagaactacaaaccactgctcaatgaaataaaagaggatacaaacaaatggaagaacattccatgctcatgggtaggaagaatcaatatcgtgaaaatggccatactgcccaag

SEQ ID NO: 3885 - DNA, 1251 bp, Homo sapiens
  SIMILAR (597)..(656): 801254mologous to Homo sapiens putative p150,accession number U93569,Smith-Waterman Score=84.
atgaaggcagaaataaatatgttctttgaaaccaatgagaacaaatacacagtgtaccagaatctctgggacacatttaaggcagtgtgtagagggaaatttatagcactaaatgcccacaagagaaagcaggaaagatctgcaatgaacaccctaacatcacaattaaaagaactagagaagcaagagaaaacaaattcaaaagctaacagaaagcaagaaacaactaagatcagagcagaactgaaggagatagagacacaaaaaacccatcaaaaaatcaatgaatccaggagcttgttttttgaaaagaccaacaaaatagatagaccactagcaagactagtaaagaagaaaagggagaagaatcaaatagatgcaataaaaaatgatacaggggatatcaccacagatcccacagaaatacaaactaccatcagagaatactataaatgcctctatgcaaataaactagaatatctagaagaaatggataaatttctggacacatacaccctccaaagactaaaccaggaaaaagttgaatctctgcatagaccaataacaggttctgaaattgaggcaataattaacagcctaccaaccaaaaaagtccaggaccagacagattcacagcccaattctaccagaggtattgatggaatgtatctcaaaataataagagctatttatgacaaacccacagccaatatcatgctgaatgggcaaaaactggaagcattccctttgaaaaccggcacaagacaaggatgccctctctcacgactcttattcaacatagtgttggaagttctggctagggcagtcaggcaagagaaagaaataaacggcattcatttaggaaaacaggaagtcaaattgtctctgtttgcagatggcatgattgtatatttagaaaatcccatcgtctcagcccaaaatctccttaagctgataagcaaatttagcaaagtctcaggatacaaaatcaatgtgcaaaaatcacaagcattcctatacactaataacagacaaacagagagccaaatcatgagtgaactcccattcacaattactacaaagagaataaaatacctaggaatccaacttgcaagggatgtgaaggacctcttcaaggagaactacaaaccactgctcaacaaaataaaagaggacccaaacaaatggaagaacattccatgctcatggataggaagaatcaatatcatgaaaatggccatactgcccaag

SEQ ID NO: 3886 - DNA, 1206 bp, Homo sapiens
  SIMILAR (538)..(1203): 901254mologous to Homo sapiens putative p150,accession number U93563,Smith-Waterman Score=1042.
atgggagccactgggaataaaggagaggtcagagatgatgcagcaccagggaacctgcagtaccacagacagataccagagggagcaacagctccagaaaaagaaactggcaaacctctacttgggatattgcaatgtataaacccaaagaagatgcattcccagaaaaagtttgagaggctgctggaacctatagccatgctgattcaggatcacagctccttgtcagcaacggaacaaagctggacagagaatgactttgacgagttgacagaagtaggcttcagaaggttggtaataacaaacttctctgagctaaaggaggatgttggaacccattgcaaggaagctaaaaaccttgaaaaaagatttgacgaatggcatacaagaataaacagtgtagagaagaccttaagtgacccaaaggagctgaaaaccatggcaccagaactttgtgatgcatgcacaatcttcaatagccgattcaatcaagtggaagaaagggtatcagtgattgaagatcaaataaatgaaataaaggcaatcaggcaagagaatgaaataaagggtattcaattaggaaaagaagaagtcaaattgtccctgtctgcagatgacatgattgtatatttagaaaaccccaccgtctcagcccaaaatctccttaagctgaaaagcaacttcagcaaagtctcaggatacaaaatcaatgtgcaaaaatcacaagcattcctatacactgataacagacaaacagagagccaaatcatgagtgaactcccattcacaattgcttcaaagagaataaaatacctaggaatccaacttacaagggatgtgaaggacctcttcaaggagaactacaaaccactgctcaacaaaataaaagaggatacaaacaaatggaggaacattccatgctcatggataggaagaatcaatatcgtgaaaatggccatacagccaaaggtaatttataaattcaatgtcatccccatcaagctaccaatggctttcttcacagaattggaaaaaacaactttaaagatcatatggaaccaaaaaagaacctgcattgccaagtcaatcctaagcaaaaagaacaaacctggaggcatcacactacctgacttcaaactacactacaaggctacagtaaccaaaacagcatggtactggtgccaaaacagagatacagaccaatga

SEQ ID NO: 3887 - DNA, 1236 bp, Homo sapiens
  SIMILAR (1)..(750): 631254mologous to Homo sapiens putative p150,accession number U93570,Smith-Waterman Score=743.
atgggagactttaacaccccactgtcaatattagacagatcaacgagacaaaaagttaacaaggatatccaggaattgaattcagctctgcaccaagcagacctaatagacacctacagaactctccaccccaaatcaacagaatatacattcttttcagcaccacaccacacctattccaaaattgaccatatagtaggaaataaagcactcctcagcaaatgtaaaataacagaaattataacaaactgtctctcagaccacagtgcaatcaaactagaactcaggattaagaaactcactcagaaccactcaactacatggaaactgaacaaactgctcctgaacgactactgggtacataacgaaatgaaggcagaaataaagatgttctttgaaaccaatgagaacaaacacacaacataccagaatctctgggacacattcaaagcagtggaaatacaaactaccatcagagaatactataaacacctctacgaaaatgaactagaaaatctagaagaaatggataaattcctcaacacatacaccctcccaagactaaaccatgaagaagttgaatctctgaatagaccaataacaggctctgaaattgaggcaatgattaatagcttaccaaccaaaaaaaggccaacagcaaatggattcacagctgaattctatcagagacaaacagagagccaaatcatgagtgaactcccattcacaattgcttcaaagagaataaaatacctaggaatccaacttacaagggatgtgaaggacctcttcaaggagaaatacaaaccactgctcaacgaaataaaagagaatacaaacaaatggaagaacattccatgctcatgggtaggaagaatcaatatcatgaaaatggccatactgcccaagcaagacgtagcccagcgcgtcggccgccatgccggcgataatggcctgcttctcgccgaaacgtttggtggcgggaccagtgacgaaggcttgagcgagggcgtgcaagattccgaataccgcaagcgacaggccgatcatcgtcgcgctccagcgaaagcggtcctcgccgaaaatgacccagagcgctgccggcacctgtcctacgagttgcatgataaagaagacagtcataagtgcggcgacgatagtcatgccccgcgcccaccggaaggagctgactgggttgaaggctctcaagggcatcggtcgagcttgacattgtag

SEQ ID NO: 3888 - DNA, 951 bp, Homo sapiens
  SIMILAR (298)..(948): 921254mologous to Homo sapiens putative p150,accession number U93563,Smith-Waterman Score=1014.
atgaaaagagagaagaatcaaatagatgcaataaaaaatgataaaggggatatcaccaccgatcccacagaaatacaaactaccatcagagaatactataaaccgctctacacaaataaactagaaaatctagaagaaatggataaatttccggacacatacaccctcccaagactaaaccaggaggaagttgaatctcttaatagaccaataacaggttttgaaattgaggcaataatagcctaccaaccaaataaagtccaggagcagagggattcacagctgaattctaccagagtgttggaagttctggccagggcaatcaggcaagagaaagaaataaagggtattcaactaggaaaagaggaactcaaattgtccctgtttgcagatggcatgactgtatatttagaaaactccatggtctcagccccaaatctccttaagctgataagcaacttcagcaaagtctcaggatacaaaatcaatgtgcaaaaatcacaagcattcctatacaccaataacagacatacagagagccaaatcatgagtgaactcccattcacaattgctacaaagagaataaaatacctaggaatacaacttacaagggatgtgaaagaccttttcaaggagaactacaaaccactgctcaatgaaataaaagaagacacaaacaaatggaagaacattccatgctcatggataggaagaatcaatatcgtgaaaatggccatactgcccaaggtcatttatagattcaatgccatccccatcaagctaccaattactttcttcacagaattggaaaaaactactttaaacttcatatggaaccaaataagagcctgcatagccaagacaatcctaagcaaaaagaacaaagctggaggcatcatgctacctgacttcaaactatactacaaggctacagtcaccaaaatagcatag

SEQ ID NO: 3889 - DNA, 814 bp, Homo sapiens
  SIMILAR (1)..(702): 911254mologous to Homo sapiens putative p150,accession number U93564,Smith-Waterman Score=1066.
atgattatctcaatagatgcagaaaaggcctttgacaaaattcaacaacacttcaagctaaaagctctcaataaattaggtattgatgggacatatctcaaaataataagagctatttatgacaaacccacagccaatatcatactgaatgggcaaaaactagaagcattccctttgaaaactggcacaagacagggatgccctctctcaacactcctattcatcatagtgttgggagttctggccagggcaatcaggcaggagaaagaaacaaagggtattcagttaggaaaagaggaagtcaaattgtccctgtctgcagatgacatgattgtatatctagaaaaccccattgtctcagcccaaaatctccttaagctgataggcaacttcagcaaagtctcaggatacaaaatcaatgtgcaaaaatcacaggcattcctctacaccaataacagacaaacagagagccaaatcatgagtgaactcccattcacaattgcttcaaagagaataaaatacctaggaatccaacttacaagggatgtgaaggacctcttcaaggagaactacaaaccactgctcaacaaaataaaagaggacacaaacaaatggaagaacattccatgctcatggataggaagaatcaatatcatgaaaatggccatactacccaagataagagtgtatcagcttgagagtgcaagaggggagatggagcaagatggaagaatagaagaagactctactgcttgtccccctgacaaggacaccaatggcacaaaaaagcacctttgtgagaaacaaaaatcag

SEQ ID NO: 3890 - DNA, 1545 bp, Homo sapiens
  SIMILAR (1448)..(1543): 591254mologous to Homo sapiens putative p150,accession number U93564,Smith-Waterman Score=82.
catcagctgaaagtccagttccgcatcatcatctcaatcaggtccagctgtgatgggagcgcctggggtgtagctccaactttcaagacgaggggggcgaggagcaggagccgagcagcgattcgcctcggcgcagcggacctagacgaggtcaagtcgtccctggtcaacgagtcggagaaccagagcagcagctcggactcggaggcggagaggcgccctcagcccgtccgggacactttccagaagccgcgggactatttcgccgaagtgagaaggcctcaggacagcgcgttctttaaaggacccccgtaccctgggtaccccttcctgatgatcccggacctgagcagcccgtacctctccaacggacccctgtctcccggaggagcgcgcaccaattcttcgcctgcaccgaaggaaacttggatttgtgcccgctttgggggggtctcgctttccttcttggaaatcggttcccgcgtgctgctgcttgggcgcgatgtgaatcgtagtagttctttgcttcccgcccagattcccattgcctgccacttcgctgtcgacggtgggaacttcatccgaggaaaaggtgcttacctgctaacatttgacctgtttggaaattggggattgtttttcctcattgaaattgcggtgtgggagctcagcgcccactccagtgggcagtccgaggatgccctggagctaagccggggaacctgttcttcctccctgcagctgtgctggacagccaaggccttggtaggaaaaggcctggatggaggcccagtgtgcaaaaactcagggatatgttccaccagaactaagactcaagagcaaatgagttttatggaggctttgtaccaggaagggttcttaagggagacagttgtgcaggctgtgaggaaggttccgcagacccccagaaaagcagtattggaagttctggccagggcaatcagtcaagagaaagaaataaagggtattcaattaggaaaagaggaagtcaaattgtctctgtttgcagatgacatgactgtatatttagaaaaccccatcgtctcagcccaaaatctccttaagctaataagcaacttcagcaaagtctcaggatacaaaatcaatgtgcaaaaatcacaagcattcccatacaccaataacagacaaacagagagccaaatcatgagtgaactcccattcacaattactacaaagagaataaaatacctaggaatccaatttacaaaggatgtgaagggcctcttcaaggagaactacaaaccactgctcaacgaaataaaagaagacacaaacaaatggaagaacattccatgctcatggataggaagaatcaatatcgtgaaaatggccatactgcccaaggtaatttatagattcaatgccatccccatcaagctaccactgactttcttcacagaattggaaaaaactactttaaatttcatatggaaccaaaagagccggcataggcaagaaaatcctaagcaaaaagaacaaagctggaggcatcatgctacctga

SEQ ID NO: 3891 - DNA, 1464 bp, Homo sapiens
  SIMILAR (1358)..(1462): 911254mologous to Homo sapiens putative p150,accession number U93563,Smith-Waterman Score=166.
actcagagcacatgagtcaggtgcgagtggccaggagacgctttcctgaggaccttacgtagcctctggcccaggcaggctgagtggccagctctgtctttactatgctgtgtacctctgggcaacctgctaccctctctgtggctgccacgcagatgctgcatggggtcagtcagaaattcagcacaagtcaaagcagagagaagaaaacatcctgtgagctcaccgacagcaacccctgggggcctggtaaagagcaacaactgatgcaactccaccttttgcttggtagccaaaacctgagagctcagagcctcatccagggaacggacaaaacctcacctccccagtcacccccacctttccacttccagtgccatcaaggcacggtcatcaaagccaggcaggtctgagtgctgctctgcaacttactacctttatgaccatacgcaagtcataagtctggccatacgccctactgccagagaccccattttattctgtaagaagtgacaggaaggcatagcttgttccccacaaaataccccatcttcaattttctcccttgcctggctccaacggcagagaaaaatgtgcatggacaccaaaccatctccaagaagcagccattaggtaatctgggacatggcattgacaatggcaccgggcacagggcttctgacatcatataagcaagggcggaagtcaaattgtccctgtttgcagatgacatgattgtatatttagaaaaccccatcatctcagcccaaaatctcctcaagctgataagcaagttcagcaaagtctcaagatacaaaattaatgtgcaaaaatcacaagcattcctatacaccaataacagacaaacagagagccaaatcatgagtgaactcccattcacaattgctacaaagagaataaaatacctaggaatacaacttacaagggatgtgaaggacctcttcaaggagaactacaaaccactgctcaatgaaataaaggaggacacaaacaaatggaagaacattccatgctcatggataggaagaatcaatatcgtgaaaatggccatactgcccaaggtaatttatagattcagtgccatccccatcaagctaccaatgactttcttcacagaattggaaaaaaaaaactggctagcaatatgtagaaagctgaaactggatttcttctttataccttacacaaaaattaattcaagatggattaaagacttaaatgttagacctaaaaccatgaaaaccctagaagaaagcctaggcaataccattcaggacataggcatcggcaaggacttcatgactaaaacaccaaaagcaatggcaacaaaagccaaaagagcttctgcacagcaaaagaaactaccatcagagtgaacaggcaacctacagaatgggagaaaatttttgcaatctatccatctgacaaagggttaatatccag

SEQ ID NO: 3892 - DNA, 2519 bp, Homo sapiens
  SIMILAR (2381)..(2518): 521254mologous to Homo sapiens putative p150,accession number U93563,Smith-Waterman Score=105.
gtattgatggaatgtatctcaaaataataagagctatttatgacaaacccacagccaatatcatgctgaatgggcaaaaactggaagcattccctttgaaaaccggcacaagacaaggatgccctctctcacgactcttattcaacatagtgttggaagttctggctagggcagtcaggcaagagaaagaaataaacggcattcatttaggaaaacaggaagtcaaattgtctctgtttgcagatggcatgattgtatatttagaaaatcccatcgtctcagcccaaaatctccttaagctgataagcaaatttagcaaagtctcaggatacaaaatcaatgtgcaaaaatcacaagcattcctatacactaataacagacaaacagagagccaaatcatgagtgaactcccattcacaattactacaaagagaataaaatacctaggaatccaacttgcaagggatgtgaaggacctcttcaaggagaactacaaaccactgctcaacaaaataaaagaggacccaaacaaatggaagaacattccatgctcatggataggaagaatcaatatcatgaaaatggccatactgcccaagcaaatgcaaagaactgaaatcataacaaatagtccctcagaccacagcacaaacaaattagaactcaggattaagaaactcactcaaaaccacacaattacatggaaattgaacaacctgctcctgaatgactcctgggtaaataatgaaattaaggcagaaatcaagaagttctttgaaaccaatgagaacaaaaagacaacgtaccaaaatctctgggacacagctaaagcagtattaagagggaaatttatagcactaaatgcccacatcggaaatctagaaagatctaaaatctataccctaatatcacaattaaaagagccagagagacaagagcaaactaatccaaaagctagcagaagacaagaaataactaagatcagagcagaattgaaggagatagagacacaaaaaacccttcaaaaaatcaatgaatccaggagctggttttttgaaaacatcaaaattgatagacagctagcaagactaataaagaagaaaagagagaagaatcaaatagacacaataacaaacaataaaggggatatcaccaccgatcccatagaaatacaaactaccattagagaatactataaatacctctacgcaaataaactagaaaatctagaagaaatggataaattcctggacacatacaccctcccaagactaaaccaggaagaagttgaatccctgaatacaccaataacaggttctgaaattaaggcaataatcaatagcctaccaaccaaaagaagtccaggaccagacagatccacagctgaatctaccacaggtacaaagaggagctggtactattccttctgaaactattccaatccacagaaaaagagggctggcagagacacaacaaaaaaagagaattttagaccaatatccctgatgaacatcgatgcaaaaatcctcaataaaatactggcaaatcgaatccagcagcacatcaaaaagcttatctaccacgaccaagttggcttcatacctgggatgcaaggctggttcaacatatgcaaatcaataaatgtaatcttccaatacaccaataacagacaaacagagagccaaatcatgagtgaactcccattcacgattgcttcaaagagaataaaatacctaggaatccaacttacaagggatgtgaaggacctcttcaaggagaactacaaaccagtgctcaacgaaataagaggacacaaacaaatggaagaacattccatgctcatggataggaagaatcaatattgtgaaaatggccatactgcccaaggtaatttatagattcaatgccatccccatcaagctaccaatgactttcttcacagaattggaaaagaggaagtcaaattgtccctgtttgcagatgacatgattgtatatctagaaaaccccatcatctcagcccaaaatctccttaagctgataagcaacttcagcaaagtctcagcatacaaaatcaatgtgcaaaaatcacaagcattccgatacaccaataacagacaaacagagagccaaatcatgagtgaactcccattcacaattgcttcaaagagaataaaatacctaggaatccaactaacaagggatgtgaaggacctcttcaaggagaactacagaccactgctcaatgaaataaaagaggatacaaacaaatggaagaacattccatgctcatgggtaggaagaatcaatatcgtgataatggccatactgtccaaggtaatttacagattcaatgccaaccccatcaagctaccaatgactttcttcacagaattggaaaaaactactttaaaggtcatatggaaccaaaaaagagcccgcattgccaagtcaatctaagccaaaagaacaaagctggaggcatcatgctacctgacttcaaactatactacaaggcta

SEQ ID NO: 3893 - DNA, 1306 bp, Homo sapiens
  SIMILAR (800)..(1117): 1001254mologous to Homo sapiens putative p150,accession number U93563,Smith-Waterman Score=542.
tttagatgctctgcagtgcctacggtattcaatacggcaatatgctgtacagaacattcatgccaggtcctccagtgccttaaaaggagaagcaatattagagaagggcactgaaggaaagaagggccaggcagatggacaagagtggaccagggaagggaaaggtgtgccactttgcactcccatgagcagggcctgtgagtgccctttacctgcagccttgaccctggagtctgctatgaaaactttggacttccgccaatctggtgaaaaacaacagtcaccagaggacaacaagctacaactagacctgatggagaaaactatgtatcaagcagacattctggactttgaagtagatgcaattatgtataagaacagcttccaggaaggcttttggttccctggtaaaacagagatgctgttgttgatccatgccctttcctggtgcttcaaacagaaaggtgatgcctacagcagaagcagccatcttgcaacaacattaagccttatgcacactttcaaaaatagattaggcaatatcattcaggacataggcatgggcaaggacttcacgactaaaacagcaaaagcaatggcaacaaaagccaaaattgacaaatgggatctaattaaactaaagagcttctgcagagcaaaagaaactaccatcagagtgaacaggaaacctacagaatgggagaaaatttttgcaatctacccatctgacaaagggctaatatccagaatatacaaagaatttaaacaaatttacaagaaaaaaacaaccccatcaaaagcccaaaatctccttaagctgataagcaacttcagcaaagtctcaggatacaaaatcaatgtacaaaaatcacaagcattcttatacaccaataacagacaaacagagagccaaatcatgagtgaactcccattcacaattgcttcaaagagaataaaatacctaggaatccaacttacaagggatgtgaaggacctcttcaaggagaactacaaaccactgctcaaggaaataaaagaggatacaaacaaatggaagaacattccatgctcatgggtaggaagaatcaatatcgtgaaaatggccatactgcccaagaagaagaagaagaagaagaagaagaaggagaaggagaagaagggaggagaaggagggaaaagagagggaggagggagagaggaggggggaggaggaggaggagaaggagaagaaggagaaggaggagaaggaggaggaaggaaggaggaagaagaaggaaggaagaaggaagaaagaagaagaaaataa

SEQ ID NO: 3894 - DNA, 2081 bp, Homo sapiens
  SIMILAR (243)..(2081): 1001254mologous to Homo sapiens Human sex comb on midleg isoform,accession number W37397,Smith-Waterman Score=3280.
caacgcatgtgccgctccctcagatggagaaattagcatacaaagaaactgacttgtcagaagtcagagcaaggtattggtggatccagggataaatcccaaacttcttaacccctagaccggtttttagtccattgactatgcagcctaatgtgatagactggagtgatgttagaaaacacaaatatggtcacctatcagagtctgcatcccaatatcaagctgctgacatcctggatctaggtcattttacctgggacaaatacctaaaagaaacatgttcagtcccagcgcctgtccattgcttcaagcagtcctacacacctccaagcaacgagttcaagatcagtatgaaattggaagcacaggaccccaggaacaccacatccacctgtattgccacagtagttggactgacaggtgcccgccttcgcctgcgccttgatgggagcgacaacaaaaatgacttctggcggctggttgactcagctgaaatccagcctattgggaactgtgaaaagaatgggggtatgctacagccacctcttggatttcggctgaatgcgtcttcttggcccatgttccttttgaagacgctaaatggagcagagatggctcccatcaggattttccacaaggagccaccatcgccttcccacaacttcttcaaaatgggaatgaagctagaagctgtggacaggaagaaccctcatttcatttgcccagccactattggggaggttcggggctcagaggtgcttgtcacttttgatgggtggcgaggggcctttgactactggtgccgcttcgactcccgagacatcttccctgtgggctggtgttccttgactggagacaacctgcagcctcctggcaccaaagttgtgattccaaagaatccctatcctgcctccgatgtgaatactgagaagcccagcatccacagcagcaccaaaactgtcttggaacatcaaccagggcagagggggcgtaaaccaggaaagaagcggggccggacacccaagaccctaatttcccatcccatctctgccccatccaagacagctgaacctttgaaattcccaaagaagagaggtcccaaacctggcagcaagaggaaacctcggactttgctgaacccaccacctgcctcaccaacaaccagcactcctgaaccggataccagcactgtaccccaggatgctgccaccatccccagctcagccatgcaggccccaacagtttgtatctacttgaacaagaatggcagcacaggcccccacttagataagaagaaggtccagcaactccctgaccattttggaccagcccgtgcctctgtggtgttgcagcaggctgtccaggcctgtatcgactgtgcttatcaccagaaaaccgtcttcagcttcctcaagcaaggccatggtggtgaggttatctcagccgtgtttgaccgggaacagcataccctcaacctcccagcagtcaacagcatcacctacgtcctccgcttcctggagaaactctgccacaaccttcgtagtgacaatctgtttggcaaccagccctttacacagactcacttgtcactcactgccatagagtacagccacagccacgacaggtacctaccaggtgaaacctttgtcctggggaatagtctggcccgctccttggaaccacactcagactcaatggactctgcctcaaatcccaccaaccttgtcagcacctcccaaaggcaccggcccttgctttcatcctgtggcctcccaccaagcactgcctcagctgtgcgcaggctatgctccagggggtcggaccgatacctggagagccgcgatgcctctcgactgagtggccgggacccctcctcgtggacagtcgaggatgtgatgcagtttgtccgggaagctgatcctcagcttggaccccacgctgacctgtttcgcaaacacgagatcgatggcaaggccctgctgctgctgcgcagtgacatgatgatgaagtacatgggcctgaagctggggcctgcactcaagctctcctaccacattgaccggctgaagcagggcaagttc

SEQ ID NO: 3895 - DNA, 1848 bp, Homo sapiens
  SIMILAR (679)..(1542): 761254mologous to Homo sapiens putative p150,accession number U93564,Smith-Waterman Score=1154.
atggttatctcagtagatgcagaaaagaccttcaacaaaattcaacagcccttcacgctaaaaactctcaataaactaggtattgatggaagttatctcaaaataataagagctatttatgaccaacccacagccaatatcatactgaatgggcaaaaactggaagcattccctttgaaaactggcagaagacaaggatgccctctctcaccactcctattcaacatagtattggaagttctggcccgggcaatcaggcaagaggaagaaataaagggtattcaattaggaaaagaggaagtcaaattgtccctgtttgcagatgaaatgattgtctatttagaaaaccccattgtctcagtccaaaatctccttaagccgataagaaacttcagcaaagtcttaggatacaaaatcaatgtgcaaaaatcacaagcattcctatacaccattaacagacacacagagagccaaatcatgagtgaactcccattcacaattgctacaaagagaatgaaatacctaggaatccaagttacaaggtatgtgaaggacctcttcaaggagaactacaaaccactgctcaacgaagtaaaagaggacacaaacaaatggaagaacattccatgcccatggataggaagaatcaattatcctgaaaatggccatactgcccaagaattggaaaaaactactttaaagttcatatggaaccaaaaaagagcctgcattgccaagtcaatcctaagcaaaaagaacaaagctggaggcatcacactacctgacttcaaactatactacaaggctacagtaaccaaaacagcatggtactggtaccaaaacagagatatagaccagtggaacagaacagagccctcagatataataccacacatctacaaccatctgatctttgacaaacctgacaaaaacaagaaatggggaatgggttccctatttaataaatggtgctgggaaaactggctagccatatgtagaaagctgaaactggatcccttccttacaccctatacaaaaattaattcaagatggattaaagacttaaatgttagacctaaaaccataaaaaccctagaagaaaacctaggcaataccattcaggacatagacatgggcaaggacttcatgtctaaaacaccaaaagcaatggcaacaaaagccaaaattgacaaatgggatctaactaaactaaggagcttctgcacagcaaaagaaactaccatcagagtgaacaggcaacctaaagaatgggagaaaatttttgcaatctactcatctgacaaagggctaatatccagaatctacaaagaactcaactttacaagaaaaaagcaaccccatcaaaaagtgggcgaaggatatgaacagatacttctaaaaagaagacatttatgcagccaacagacacatgaaaaagtgctcatcatcactggccatcagagaaatgcaaatcaaaaccacaatgagatacatctcacaccagttagaatggcaatcattaaaaagtcagggaacaacagaactagagaaaactattttaaaattcatatggaatcaaaaaagagccaaaatagccagggcaatcgtaaggaaaaagaacaaagctggaggcatcatgctaccagacttcaaactatagtacagggctatacagtagccaaaacagcatgctactggtacaaaaacagacctacagaccaatcaaacagaacagagaaccaagaaataagactgcatacctacaaccatctgatcttcgacaaacctgacaaaagcaatggagaaacgactccctattcaataaatggtgctaggataactggctag

SEQ ID NO: 3896 - DNA, 700 bp, Homo sapiens
  SIMILAR (64)..(537): 891254mologous to Homo sapiens putative p150,accession number U93565,Smith-Waterman Score=720.
atgattatctcaacagatgtagaaaaggacttccacaaaattcaacagcccttcatgctaaaaattctcaataaactagtgttggaagttctggccagggcaatcaggcagaagaaagaaataaagggtattcaattaggaaaagaggaagtcagattggccctgtttgcggatgacatgattgtatatttagaaaaccccactgtcttagccccaaatctccttaaactgataagcaacttcagcaaagtctcaggatacaaaatcaatgtgcaaaaatcacaagcattcctatacaccaataacagacaaacagagagccaaatcatgagtgaactcccattcacgattgcttcaaagagaataaaatacctaggaatccaacttacaagggatgtgaaggacctcttcaaggagaactacaaaccacttctcaacgaaataaaagaggacacaaacaaatggaagaacactccatgctcatggataggaagaatcaatatcgtgaaaatggccatactgcccaagataggatattgtgtgcaagacacaacctctgccaatactacccttgttcatcagaccacaccttcacatgtaatgccaccaaatcaccaccaattagcatttaattatcaagaattagaacatttacagactgtgaaaaacatttcacctttacaaattctgcctccctcag

SEQ ID NO: 3897 - DNA, 3489 bp, Homo sapiens
  SIMILAR (2644)..(3384): 891254mologous to Homo sapiens putative p150,accession number U93563,Smith-Waterman Score=1149.
atgaaatctgggcaccctgaaaaagaacaggataacagcgatgttcaggaaacaagggagataaccataaggggcctgctgtgcactgctctgatgaggcattccactggggcaattgcctacctgggagtgctctcaggatctgcttcactcaagctggctggagtccccctcagatgctgtgagggtgacaaagatgcagggcacccactggaaacacagacggcactctgcgaaagaggaaggggcgccaggagcttggttggcaacaccatcatgacatcacaacctgttcccaatgagaccatcatagtgctcccatcaaatgtcatcaacttctcccaagcagagaaacccgaacccaccaaccaggggcaggatagcctgaagaaacatctacacgcagaaatcaaagttattggggtaaatctaattcagaacgtgttggagaggggttgggggaagtgccaagagatgatatatgtcttgggactggacatctgtcgacccttttttgtgagtagagtttctgaggagggcaggatggggcaaagaggggaggaagatgccaatagcttagacttcccacctgccagcttgctatgtttgatctgccaggagcaaggagtcaacggtgaatcttgttctcctgtcggaatgtatcacagagaaattgtgcctgtttatgaggttctttcggtgataactggccttcaaattcaggttttcagtggcaaggaagctgacagtgttataaagcggtctattggttggggtccattctttaagcccagaaccaaagacaaaaaccacatgattatctcaatagatgcagaaaaggcctttgacaaaattcaacaacacttcatgctaaaaactctcagtaaattaggtattgatgggacgtatctcaaaataataagagctatctatgacaaacccacagccaatatcatactgaatgggcaaaaactggaagcattccctttgaaaactggcacaagacaaggatgccccctctcaccactcctattcaacatagtgttggaagttctggccagggcaattaggcaggagaaggaaataaagggtattcaattaggaaaagaggaagtcaaattgtccctgtttgcagatgacatgattgtatatctagaaaaccccattgtctcagaccaaaatctccttaagctgatcagcaacttcagcaaagtctcaggatacaaaatcaatgtacaaaaatcacaagcattcttatacaccaataacagacaaacagagagccaaatcatgagtgaactcccattcacaattgcttcaaagagaataaaatacctaggaatccaacttacaagggatgtgaaggacctcttcaaggagaactacaaaccactgctcaatgaaataaaagaggatacaaacaaatggaagaacattccatgctcatgggtaggaagaatcaatatcgtgaaaatggccatactgcccaaggtggctaccattaccgtgctcactttacaggtgaggttcagagatttatgtaacatgccaaaggtcacacagctggacacagcagaaccaagattcaaatctgcacagaatcccatccagaataacagtatatttagttatcaagcctctttaggctccttgtggctacgacagtttctcagactttctattgtgatgccctggacagttttgaagggtattggtcagctgagtgttctacatgtttatgtcgtatggcccctgaaagaattcgtatttgaagctctgggtaagtggttaggaaaggaccagctgcaggcaacaatgcgagtgtgccttatttcctcaactgtaagaaattccagcatgtctagagagcaatcagggactctggcttctcaagagactctcagcatggaagccttcctgaaagccctgtgtggaggtggacccaatttatgcacctctatagatccactcaatctcttctttcctgtggtagtaaattcccagatcctcctgtctcatcctcagataccagcaattgcagaaacctactcagaggagaagtgcttaaaggagctgaaaaccaaggctcgagaactacgcgaagaatgcagaagcctcaggagccgatgcgatcaactggaagaaagggtatcagcaatggaagatgaaatgaatgaaatgaagcgagaagggaagtttagagaaaaaagaataaaaagaaacgaacaaagcctccaagaaatatgggactatgtgaaaagaccaaatctacgtctcattggtgtacctgaaagtgacggggagaatggaaccaagttggaaaacactctgcaggatattatccaggagaacttccccaatctagcaaggcaggccaacattcggattcagaaaatacagagaatgccacaaagatactcctcgagaagagcaactccaagacacataattgtcagattcaccaaagttgaaatgaaggaaaaaatgttaagactaaaccacgaagaacttgaatccctgaatagaccaataacaggttctgaaattcaggcaattattaatagcctaccaaccaaaaaaagtccagaatcagatggattcacagccaaattctaccagagccaatatcatactgaatgggcaaaaactggaagcattccctttgaaaaccggcacaaaacaggatgccctctctcaccactactattcaacatagtggtggatgttccggctagggcaatcaggcaggagaaagaaataaagggtattcaattaggaaaagaggaagccaaattgtccctgtttgcagatgacatgaatgtatatttaaaaatccccatcgtctcagtccaaaatctccttaagctgataagcaacttcagcaaagtctcaggatacaaaatcaatgtgcaaaaatcacaagcattcctatacactaataacagacaaacagagagccaaatcatgagtgaactcccattcacaattgcttcaaagagaataaaatacctaggaatccaacttacaagggatgtgaaggacctcttcaaggagaactacaaaccactgctcaacgaaataaaagaggacacaaacaaatggaagaacattccatgctcatggataggaagaatcaatatcatgaaaatggccatactgcccaaggtaatttatagattcaatgccatccccatcaagctaccaatgactttcttcacagaattggagaaaactgctttaaagttcatatggaaccaaaaaagagcctgcattgccaagacaatcctaagccaaaagaacaaagctggaggtatcacactacctgacttcaaactgtactacaaggctacagtagccaaaacagcatggtactggtaccaaaacagcatggtactggtaccaaaacagagatatagaccagtggaacagaatagagcccttggaaataataccatacacctacaaccatctgatcttcgaaaaacctga

SEQ ID NO: 3898 - DNA, 1838 bp, Homo sapiens
  SIMILAR (1323)..(1652): 1001254mologous to Homo sapiens dJ635E8.1 (novel protein similar to Drosophila SCM),accession number AL110502,Smith-Waterman Score=616.
agggcccactgggctcgttccactcacttggcctggcaggctgctcatgctatcagcctggatctcacgcctccaagagagactggagttaggcatggagtggtgaggagtgtgtatgaacgagcttggggcccatctactgcgcagtcagacacaccagctcctgccgcaaggtgggcagctccaggtgccagcatggatgccagctctctgtgaggctgcagctggaccaggcacaccacaagcagcttccctggctggcaccaaagaatgcagtagtgcccaaaagcttggaggacccacagggccggaaagagggagtcacagccctgactccggaagctcccaggtctgggccccccaaacggctgcagctcttccctccttctctttgcccaaactgcagcaagcagggggcatatttcagcccttttggtgttacagcaactcttttagccacgccgttcagcagatcccgagttcttgtcctgcaaccaggaagaatgaggtacgcagacaagtggagggtgagcaagatgaagaggtgctgtattgagcaatggaacagctcagagaagactcacagtgccagggcgtcccattctctgcagaggcagagaggaggccctagagtgggtggctcctctctgcaagcaggttgtcacgtcatctctgcagctctcagcaaagaggaggccctagaatgggtggcttctttctgcaggcagattgttcagtcatatcttcgtcctctgctctgctctggggctgatcctggggcttttatggacctcagaggggaggaacttagaagcctagagctttctttgtcctacacacctccaagcaacgagttcaagatcagtatgaaattggaagcacaggaccccaggaacaccacatccacctgtattgccacagtagttggactgacaggtgcccgccttcgcctgcgccttgatgggagcgacaacaaaaatgacttctggcggctggttgactcagctgaaatccagcctattgggaactgtgaaaagaatgggggtatgctacagccacctcttggtgattcttttcattgtgatgttagggtgtcgattttagatcttttctgctttctcttgagtgaactcccattcaccattgatacaaaaagaataaaatacctaggaatccaacttacaaaggatgtgaaggacctcttcaaggagaactacaaaccactgctcaacgaaataaaaggacacaaacaaatggaagaacattccacgctcacggataggatgaatcaatatcgtgaaaatggccatactgcccaaagatttcggctgaatgcgtcttcttggcccatgttccttttgaagacgctaaatggagcagagatggctcccatcaggattttccacaaggagccaccatcgccttcccacaacttcttcaaaatgggaatgaagctagaagctgtggacaggaagaaccctcatttcatttgcccagccactattggggaggttcggggctcagaggtgcttgtcacttttgatgggtggcgaggggcctttgactactggtgccgcttcgactcccgagacatcttccctgtgggctggtgttccttgactggagacaacctgcagcctcctggcaccaaaggtttctttgtacaaagcaaaaatttcaaaatcggactcaacatcgtggctcacgtacaggattcttacactggtctggaggaaggcaaagctggagcaggcagatggcagtgtggggaggggggtgtcacacttttacaacaaccagaactcactcactatctcaaggacagaaccacaccctga

SEQ ID NO: 3899 - DNA, 1423 bp, Homo sapiens
  SIMILAR (740)..(1420): 941254mologous to Homo sapiens putative p150,accession number U93574,Smith-Waterman Score=1172.
atggacagtatgtctggagggggacagtataggaagattaatgggaatccaacatcagtgaagtgccctttgctgctgctgccagccattctgactccagagccggtgaataggtggagacaaagctgcaaagcatttgcacggcattctccgcttgctttcagagtgacaatttcaacaagcaccttttttgacggcttgctggtgacaggactatacacatctacaagtgttcaggcatcacagagcattggaggttccagtgctttcggatttgtgttggaagttctggccagggcaattaggcaggagaaggaaataaagggtattcaattaggaaaagaggaaatcaaattgtccctgtttgcaggcgacatgattgtatatctagaaaaccccattgtctcagcccaaaatctccttaagctgataagcaacttcagcaaagtctcaggatacaaaatcaatgtacaaaaatcacaagcattcttatacaccaacaacagacaaacagagagccaaatcatgagtgaactcccattcacaattgcttcaaagagaataaaatacctaggaatccaacttacaagggatgtgaaggacctcttcaagggagaactacaaaccactgctcaaggaaataaaagaggatacaaacaaatggaagaacattccatgctcatgggtaggaagaatcaatatcgtgaaaatggccatactgcccaagaattggaaaaaactaaagttcatatggaaccaaaaaagagcccacatcgccaagtcaatcctaagccaaaagaacaaagctggaggcatcacactacctgacttcaaactatactacgaggctacagtaaccaaaacagcatggtactggtaccgaaacagagatatagatcaatggaacacaacagagccctcagaaataatgccgcatatctacaactatctgatctttgacaaacctgagaaaaacaagaaatggggaaaggattccctatttaataaatggtgctgggaaagctggctagccatatgcagaaagctgaaactggatcccttccttacgccttatacaaaaatcaattcaagatggattaaagacttaaacgttagacctaaaaccataaaaaccctagaagaaaacctaggcattaccattcaggacataggcatgggcaaggacttcatgtctaaaacaccaaaagcaatggcaacaaaagccaaaattgacaaatgggatctaattaaactaaagagcttctgcacagcaaaagaaactaccatcagagtgaacaggcaaactacaaaatgggagaaaattttcgcaacctactcatctgacaaagggctaatatccagaatctgcaatgaactcaaacaaatttacaagaaaaaaacaaacaaccccatcaaaaagtga

SEQ ID NO: 3900 - DNA, 1566 bp, Homo sapiens
  SIMILAR (636)..(1316): 861254mologous to Homo sapiens putative p150,accession number U93563,Smith-Waterman Score=976.
aaatacaaactaccatcggagaatactataaacacctctacacaaataaactagaaaatctagaagaaatggataaattcctggacacatacacccttccaagactaaaccaggaagaaggtgaatccctgaagagaccaatggcaggttctgaaattgaggcaataattaatagcctaccaaccaaaaacagtccaggaccagacagattcacagctgaattctaccagaggtacaaagaggagctgctgataagcaacttcagcaaagtctcaggatacaaaatcaatgggaaaaaatcacaagcattcctatacatcaataacagacaaacagagagccaaatcatgagtgaactcccattcacaattgcttcaaagagaataaaatacctaggaatccaacttacaagggatgtgaaggacctcttcaaggagaactacaaaccactgctcagcgaaataaaagaggacacaaacaaatggaagaacattccatgctcatggataggaagaaccaatattgtgaaaatggccatactgcccaaggacaaaacaagtaaatatattgatgttgatgagaatgagggttctcactgtggaaaaaggaaatacaaatatggaatggagaaagcgttggaaattctggccagggcaatcaggcaggagaaagaaataaagggtattcaattaggaaaagaggaagtcaaattgtccctgtttgcagatgacatgattgtacatttagaaaaccccatcatctcagcccaaaatctccttaagctgataagcaacttcagcaaagtctcaggacacaaaatcaatgtacaaaaatcacaaacattcctatacaccaataacagacaaacagagagccaaatcatgagtggactcccattcaaaattgctacaaagagaataaaatacctaggaatccaacttacaagggatgtgagggatctcttcaaggagaactacaaaccactgctcaacgaaacaaaagaggacacaaacaaatggaagaagaacatcctgtcctcatggataggaagaatcaatatcgtgaaaatggccatactgcccaaggtaatttatagattcaatgccatcctcatcaacctaccaatgactttcttcacggaattggaaaaaactactttaaaattcatatggaaccaaaaaagagcttgcattgccaagacaatcctaagccaaaggaacaaagctggaggcatcacactacgtgacttcaaaccatactacaaggctacagaaaccaaaacagcaagtgaaatgaagtactatttggagaataagatacctttcaaggttttgcatatggtttataatgttcccacacatcctccttttattggtgatcttcatcccaataccaaggtagtgtctctccctccaaacattacctctttgattgaaccaatgaatcaaggtgttatatcagcttttaaggactgctacctgaggaagacctttgtccaggctgttgctacacctgagggagagactgagatgacagtgatgcaattctggaaggattacaacacag

SEQ ID NO: 3901 - DNA, 2704 bp, Homo sapiens
  SIMILAR (1791)..(2330): 581254mologous to Homo sapiens putative p150,accession number U93572,Smith-Waterman Score=491.
atggtaaagggatcaattcaacaagaagagctaactatcctaaatagatatgcacccaatacaggagcacccagatccataaagcaagtcctgagtgacctacaaagagacttagactcccacacaataataatgggagactttaacaccccactgtcaacattagacagatcaacgagacagaaagttagcaaggatatccaggaattgaactcagttctgcaccaagcggacctaatagacatctacagaactctccaccccaaatcaacagaatgtacattcttctcagcaccacaccgcacttattccaaaattgaccacatagttggaagtaaagcactcctcagcaaatataaaagaacagaaattataacaaactgttgctcagaccacagtgcaaccaaactagaactcaggattaacaaactcactcaaaaccgctcaactacatggaaactgaacaacctgctcctgaatgactactgggtacataatgaaatgaaggcacaaataaagatgttctttgaaaccaatgagaacaaagacacagcataccagaatctctgggacacatttaaagcaatgtgtagagggaaatttatagcactaaatgcccacaagagaaagcaggaaagatctaaaattgacaccctaacatcacgattaaaagaactagagaagcaagagcaaactttacattcaaaagacagcagaaggcaagaaataaatgcagaaaaggcctttgacaaaattcaacagcccttcatgctaaaaactctcaatacactagatattgatgaaacgtatctcaaaataataagagctatttatgacaaacccacagtcaatatcatactgaatgggcaaaaactggaagtattccctttgaaaactggcacaagacagggatgccgtctctcgccactcctattcaacataatgttggaagttctggccagggcaatcaggcaagagaaagaaataaagggtattcaattaggaaaagaggaagtcaaattgtccctgtttgcagatgacatgattgtatatctagaaaaccccatcatctcagcccaaaatctccttaagctgataagcaacttcagcaaagtctcaggatataaaatcaatgtgcaagaatcacaagcatttctgtacaccaataacagacaaacagagagccaaatcatgagtgaactcccagttcacaattgcttcaaagagaataaaatacctaggaatccaacttacaagggatgtgaaggacctcttcaaggagaactacaaaccactgctcaaggaaataaaagaggatacaaacaaatggaagaatattccatggctcatgggtaggaagaatcaatatcgtgaaaatggccatactgcccaaggtaatttatagattcaatgccatctccaacaagctaccaatgactttcttcacagaattggaaaaaactactttaaaagttcatatgaaaacaaaaaagagcctgcattgccaagtcaatcctaagccaaaagaacaaagctggaggcatcacactacctgacttcaaactatatatactacaaggctatagtaaccaaaacagcatggtactggtaccaaaacagagatatagaccaatggaacagaacagagccctcagaaataataccacacatctacaaccatctgatctttgacaaacctgacaaaaacaagaagtggggaaacgattccctatttaataaacggtgttgggaaaactggctagccatatgtagaaagctgaaactggatcccttccttacaccttatacaaaaattaattcaagcatggattaaagacttacatgttagacctaaaaccataaaaaccctagaagaaaacctaggcaataccattcaggacataggcatgggcaaggacttcatgactaaaacaccaaaagcaatggcaacaaaaagccaaaattgacaaatgggatctaattaagctgaagagcttctgcacagcaaaagaaactacccatcagagtgaacaggcaacctacagaatggaagaaaattttcacaatctacccatctgacaaagggctaatatccagaatctacaaagaacctaaacaaatttacaagaaaaaaatcaaacaacctcatcaaaaagtggatgaaggatgtgaacagacacttctcaaaggaagacatttatgcagccaacagacacatgaaaaaatgctcatcctcactggccatcagagaaatgcaaatcaaaaccacaatgagataccatctcacaccagttagaatggcagtcattaaaaagtcaggaaataacagacaaacagagagccaaatcatgagtgaactcccaatcacaattgcttcaaagagaataaaatacctaggaatccaacttacaaaggatgtgaaggacctcttcaaggagaactacaaaccactgctcaatgaaataaaagaggacacaaacaaatggaagaacattccatgctcatggataggaagaatcaatattgtgaaaaatggccatactgcccaagggatttgtgaacacgaaccaagacagtaaattctatgaaaacaatggtacaatatttgcttctggaactttctgttcacccactcaagaaatgcagtatgaccaggccatgccagaaggccctttgtgttctgtggtaactttgaggcccttgg

SEQ ID NO: 3902 - DNA, 2130 bp, Homo sapiens
  SIMILAR (4)..(702): 251254mologous to Homo sapiens mucin,accession number AF007194,Smith-Waterman Score=121.
atgacagagactcaggcgtcagcatcgactagaacagaagacacgcagcacaacgtgccacatgagacagagcactacacgcagtgccgagcgggcggacactcgcatcgaatcaatgccgacgtagaccacaccgtagcacacagacgacgtaccacgcactgcactaacagcacgcatacagcgacgacgtcacccagcacgcacaaccaccagcagacgctcacgcgagtagcgaacgtcgcacagatccgtcgcaccgacatctcctccatcgctgctacagaatggatcagtacaattaacacacataactacgcgtgcagaactcgtgcagtctcccaacgaagatacgtgtcggactttgaaaagcgcgaaagacccacttccaatacccccgaacctcgattccggcttgttgtttctacacccaccctcgtcggtaccacccaaggcacctaccagccaccccctgcacgctctcgcatctcgatcgcgtcccacctgctccctcctctgtcgttgctgccaagtagtctggacctagatggacgctccacacttgcgtgctcatcctctgtatctcagttctcggggagccgtggttcaccatcatcatacatagtagccactactcgcgtcatcagcgacgtcgactacgacatgacgacctactacaacagcacaatcacaccgatatctcgtcagctagatcatagtgtcagcgctcagtgcatctgctactcagcagtcatcgtacgtatcgacatcctctcgtcagtcgtcatacctctcaagaacatagtttgggcggaccgctccacaggcactagtacaatcccgtcggctctcgtgcggctgcgtgggcgagtaaatctgcactggtcttgtaagcctggaggctttagtcgtgtctgccctcatctgactcgtcgcgactcgccagcgtctggtcggtatctgccgaacaaccccaatccgagcacgatcaagcgttgtacgctgagtaactcgatatcagccaaaccagagagcgccactcattcatgctacctaccatttgctggaccgaggacagcatcctcagagtatgcagacgatttcgcactggacgaccccaccctgctggtgtttagtgtgcggcaagaaatcatctctgccgtgttgctccaccagttctatgagtacccgtcgaaatcaatacgacactttgtcgttgacaacaagctgggtcctctgatcctccatcttctggctagcttttatcctactcccgcgcacttccctgccgtggccgactgtttcataattagctgcaaatgcttgcctctggttcaacgccagttaattcttcatttcggactcagtgttcgtagatccaaattagtcgttcccgcgaacgaaatagaaactccatccttcgtcgtcgtcaccaaattctcacgctctgcgtcgagctatgactgtagcatagagtatgcgtctacctacgctatcaacataacaatagttaacagctacgtcttcgcgctacgcacaccactcgagagcacactatcagctacgcgctcacaagcccggggcaacctcaaaacaaaaccagaatcccggaattgcagtgggctttctgagctgtgcgacctagcacacaacgtctacggttatataccacgcaccgaccagccaggccatcgcctcgtgtgccttgcactcgctgttagggtgtctgctcggctcagccacagcccctctgccgccaacgtggaccacgcccccaccgcccccccagctacgcacgacatgatcgaccggctctcttccccatcctccctcatgctagacacgtccttgacctttagctccccgaaactagcccttcactgggatgtcatcgcaacattgcattccaacctgaccccagcttgcgtcacactccatcgcactccggggctacgggctcgtcctacgacgtcgcaaacgagcattgcatcgtgcactcgcattcgtaacttagccatgttcagtaacgtccgctctctgatcagcgctctcctctcgatcatcatgcacacagcagcatactatacgccagagcgtcaagaatctcgtgcttgcgtgtgtgcgctgtag

SEQ ID NO: 3903 - DNA, 884 bp, Homo sapiens
  SIMILAR (346)..(480): 461254mologous to Homo sapiens NAG13,accession number AF194537,Smith-Waterman Score=96.
atggcagaggatcagcttatactacaagaggaaaggagagtggagtttgagaagtttgtcagcgtgacctcattcttcttggatgctggacaagagctcaggacccactgtgtgcaggatccaattgcatgcaaacctctcttcctggccaattaccagaccttgctagtgaatggggctggtgcctgcttcattgctttccgttccacttgcctgaccctctttgttgtgagtaatctggccttcattgtgaatgacacccaactataccagcagacttttcctacacatgggagtgttattctacccattctacaggaggctcacctaacacataaggactcacataaacttaaaggggtggaaaaaaggcatttcatgcaaatggacaccaaaaatgcagaaaaagcattagacaaaatccagcatcgctttatgattaaaactctcagcaaaatcagcatacaagggacacactttaatgataataaaagccatctatggcaaatccacaaccaacacaatactgaatggggaaaagctgaaagcattccctctgagaactggaataaaacaaggatgcccactcttaccactccctttcaacatagtactggaactcctagccagagcaatcagacaagagaaagaaataaagggcatccaaattggtaaagaggaagtcaaactgacactgtttgctgatgatatgatcatttaccttgaaaactctaaagactcctccagaaagctcccagaactgataaaagaattcagcaaagtttccagatacaaggttaatctacacaaatcaatagctcttctatacaccaacagtgaccaagcagagaatcaaatcaagaactcaacctcttttacaatag

SEQ ID NO: 3904 - DNA, 843 bp, Homo sapiens
  SIMILAR (428)..(769): 381254mologous to Mus musculus proline-rich salivary protein,accession number M11902,Smith-Waterman Score=153.
atggaaatgctctactgtttgattgcagaggcaggtcacatctcctccaggatggccaccaataccgccaactctgcaggtctaaaacccacgtgtgtttgtgtggcccttcctctcccacctggccgcagcgctcctcatcgcaggggcagggctgcggcttctggagtgagaggtcatttaagggataccctgagcgacctgccggtgctgctggcgtctgcaggctccagggctgcggtcggcggggccggggagccccgttcagaaccacagatttctcgtccagaccccgaggagccgcagaacgcgctgatcagggccccagggctgggtccccctggccgaggacgacgagcggggctcagagagggcgcgcgcagggccaaggtcacactgcgcgccggcgcgggaactcgaacccaggcccaagccgcgcccgccaggccagccgccgccgccgccccgcgactagcggaccccccagaggcagccctcgccggcccgcccccggcgcaggagccccttctaccggtcgtcttctcgcgagacgtcgcggccgccggaggggccacggaggccgagggcgcccgccctcagcgcgcctgcgcccggccagcccgcccgcccccgccctcgcgagccagtgccatgtggcgccgtatttacggccagagatcgactccgcccaccggccgccacgagccacgcccctttctcagcagccaatccgcggcgttgacaccgccccggcggaccgggcgcgcggcggctcggggacgcgcagctgtctcgccgttcgacccgggagctccacgttgcagccaaacacgatcccgttaa

SEQ ID NO: 3905 - DNA, 1056 bp, Homo sapiens
  SIMILAR (427)..(1008): 341254mologous to Arabidopsis thaliana putative proline-rich protein,accession number AC004561,Smith-Waterman Score=174.
atggaaatgctctactgtttgattgcagaggcaggtcacatctcctccaggatggccaccaataccgccaactctgcaggtctaaaacccacgtgtgtttgtgtggcccttcctctcccacctggccgcagcgctcctcatcgcagttgtagccaggctggccgtgagctcccagggcaaggcccacgctattaccggcatctaccccagcttagcatcttgcactcgattggagaggggcagggctgcggcttctggagtgagaggtcatttaagggataccctgagcgacctgccggtgctgctggcgtctgcaggctccagggctgcggtcggcggggccggggagccccgttcagaaccacagatttctcgtccagaccccgaggagccgcagaacgcgctgatcagggccccagggctgggtccccctggccgaggacgacgagcggggctcagagagggcgcgcgcagggccaaggtcacactgcgcgccggcgcgggaactcgaacccaggcccaagccgcgcccgccaggccagccgccgccgccgccccgcgactagcggaccccccagaggcagccctcgcccggaccgcccccggcgcaggagccccttctaccggtcgtcttctcgcgagacgtcgcggccgccggaggggccacggaggccgagggcgcccgccctcagcgcgcctgcgcccggccagcccgcccgcccccgccctcgcgagccagtgccatgtggcgccgtatttacggccagagatcgactccgcccaccggccgccacgagccacgcccctttctcagcagccaatccgcggcgttgacaccgccccggcggaccgggcgcgcggcggctcggggacgcgcagctgtctcgccgttcgacccgggagctccacgttgcagccaaacacgatcccgttaaccaacctttatgcagtgcctgttgtctatccgaccctttctcgagcatcggctcattggcaaaggatcgtgatgctcaccggctggggcttgagactcgctgtgtgaccttgggcaagtga

SEQ ID NO: 3906 - DNA, 601 bp, Homo sapiens
  SIMILAR (574)..(209): 631254mologous to Homo sapiens Breast cancer tumour specific protein encoded by clone B18Ag1,accession number Y14525,Smith- Waterman Score=333.
ccgtctttagcaactccttggtttttatggagatattagggagggctaaagcaggggcttcagttaatgctaaattaacgggctacttcattctgtacttcttggatagctgccactaagatttttgtttgtcttctgaatgctttatcagcggcctttccagttgcctgtgttgcttgtttttgtttttttaaccttgtgattgtcaaaagctttttgggctatttctaaaagctgacagatatttattctagtaaatctttttaggtttttggagtttctatttaatatcctgggctgcctgagccacaaatgctaaattaatagcaaggctattttcgggagctgccgggtcaaaaggggtgtaaatccgataaaaaggggtgtaaatccgataagcctcctggaggtgctctaaaaaccttcttggtgacttctcgggcctttggacaacttcggtcgtcttagacaagttgatgggtttctgagaggctcttttaatacttgcgaggagataccggtgagaatcgtctaaagctccctttctacttgaggaatttgggtcctggttaggccgtgtagaaggaaagacctcctcaag

SEQ ID NO: 3907 - DNA, 642 bp, Homo sapiens
  SIMILAR (45)..(560): 361254mologous to Canis familiaris type I collagen pre-pro- alpha1(I) chain,accession number AF153062,Smith-Waterman Score=148.
atgaccacacctgccggctccggcagcggcttcggctccgtgtcctggtggggcctgtccccggcgctggacctgcaggctgaaagggatgctacggtggacgctctgccaaccaccatggtgccccagccagctgtcatcttgccaggtcctcctgtggacccagactcccaggccgatacagtgcacagcaaccccgagctagatgtgctgcttctgggctctgtggatggacggcacctgctgcggaccctgtcccgagcgaagttctggcctcgcaggaggttcaacttctttgtgctggagaataatctggaagctgtggcccgacacatgctgatcttcagcctagccctggaggaaccggagaagatggggctgcaagagcgaagcgagaccttcctggaagtgtgggggaacgcgctgctgcgcccgccagtggccgccttcgtgcgtgcccaggccgacctgctggcgcacctggtccccgagcccgaccgcctggaggaacagctgccctggctcagcctccgcgccctcaaggtgccgccgcccggcctccatctgggatcgggtggccgcgggaataatggaagcgcacagtccaaaggacgtgcgttgatggagcaggcggcgggctag

SEQ ID NO: 3908 - DNA, 2377 bp, Homo sapiens
  SIMILAR (2082)..(2294): 451254mologous to Homo sapiens HTRM clone 619699 protein sequence,accession number Y73346,Smith-Waterman Score=149.
agtgcagctcactgctagtgcttgtttcttggggcaaacaggaaatgagttaagcttgaatgtgaatttcagaggtcagagataaccagtgtcttcagagaacagaaagatgggatatatgcaatttaagtgcttttcactgctttaattagaaacgtagtccctgtttcatggaaaagtttgccatttcttgcatgagcctcttccattggtgtatctttccctgtgtacaggttaccagctcttcaaacccagtctgatctcttggctggaggaagaggaagagttgagcacactgccaagagttctccaagaatggaaaatgtgcctgaaaaccaaagggccagccctttggcaagataatttttgtttaaaaacattaaatgggatacagttggcaagaaaccaaaatggagaggaactctatgactgtaagcaatgtgaagatgtcttctgtaaacatccatgccttaagaccaacatgagtactcaaaatagaggcaacacgtctgaatgtattcagtatgcaaaagacctcctttctctatacaataaaacctctaccataaggaaagtttctgtgttcagtaagcatggaaaatctttccgcctgattttaaatgttcaggtccagagaaagtgtacacaagataaatcctttgaaggcactgactatgggaaagccttcatttatcagtcataccttgaagcacacaggaaaactcagagtggagaaaaactcaatgaatggaagcaatgtggggaagcatttactcactccacaagccatgctgtaaatgttgaaacacacattattaaaaacccctatgaatgtaaggaatgtggaaaagattttagataccctacccaccttaataatcacatgcaaacccacattgggataaaaccttataaatgtaagcactgtggcaaaaccttcactgtgccgtcaggctttcttgaacatgtacgaactcacactggagagaagccctatgggtgtaaggaatgtggtaaagcctttggtacatctgcaggccttattgaacatataagatgtcacgccagagagaaaacctttaaatgtgaccactgtgggaaagcctttatttcttacccatctctttttggacatttgagagttcataatggagagaagccatatgagcataaggaatatgggaaggcctttggtacatcctcaggtgttattgaagatagaagaagtaacacaggacagaaacgctttgattgtgaccagtgtgggaaagtctttgtttctttctcatctctttttgctcatttgagaactcacactggtgagaagccctttaagtgttacaaatgtgggaaaccatttacctcttctgcctgtcttcgtattcacatgcgaactcacacagaagagagactctatcaatgtaagaaatgtggtaaagctttcactaagtgctcatatcttaccaaacatttacgaacacacgctggagagaaaccctatgaatgtatgaaatgtgggaaagccttcactgagcgctcataccttactaaacatttacgaagacacagtggagagaagccatatgaatgtaagaaatgtggaaaagccttcacagaacgctcagatcttactaaacatttacgaagacacactggagataagccctatgaatataaggactgtgggaaagcctttgttgtctcctccagtctagttgatcatttaagaactcacactggatataaaccctataaatgtaatgcatgtgaaaaagcttacagtaggtcttgtgtactaactcaacacttaaaaactcatgcagcagagaagacctctgaatgtaacgcatgtggaaattcctttcgaaattccatgtgctttcatgatcgcttaaaaactctcaccaaaataaaaccctataaatgtaaggactgtgggaaagccttcacttgtcattcagatcttactaatcatgtgcgaattcacactggagagaagccctataaatgtaaggaatgtgggaaggccttccgtacatcctcaggacgtattcaacatttaagaactcatatgggagagaaaccctttgaatgtgaccagtgtgggaaagcctttgcttctttctcagctcgtattgcacatttgaaaacacactagagagaagccctgtggatgtgaagaatgtggaaaaacctttgctgtttcctcaagcctaactgaacatgtaaaaattcacaggagaaagtaacactatcaatgtaaggaatgtgagaaagcctgaacagttgaatctttctagatatgtacaaactcacactgtagagaaaccctgtaaatgtaagggatgtaggaaaacactagttcttctctctctct

SEQ ID NO: 3909 - DNA, 457 bp, Homo sapiens
  SIMILAR (24)..(395): 331254mologous to Homo sapiens dJ25J6.4 (ret finger protein),accession number Z84476,Smith-Waterman Score=182.
cctgaggacttctgcacgagcggcaagcagaggccagatgctccatctgtctggactacctgagacacccaatgaccactgattgcaggcactacatctgaagtgcccgcatccaccaatgctggtaagaattacaggacatctctccctgtcctgtctgcctccagcactgtcctgacaagaacctcaagaggaacttccagttatgccacatgaccgatattgctaagcagcttctcaccactgcaaggcgcaaaaggaaactgcagggagaggagcccgtgtgcaggaagtcagatgtggccctgttctgtgagaaggatcctgagctactgtgtcaccagtatagggtctccctcgaccactgagatcacccccgatgcccattgaacaagctgcagctaagcacaggaagcagttcgagagctacattgaacccttggaaaagcaagtttga

SEQ ID NO: 3910 - DNA, 1009 bp, Homo sapiens
  SIMILAR (821)..(988): 921254mologous to Homo sapiens Human secreted protein, SEQ ID NO: 6580,accession number G02499,Smith-Waterman Score=287.
atggaatggtcatcgaatgaattgaatgcaatcatcgaatggtctcgaatggaatcatcttctaatggaaaggaatggaatcatcgcatagaatcgaatggaattatcatcgcatggaatcgaatggtatcaacaccaaacggaaaaaaacggaattttcgaatggaatcgaagagaatcttcgaacggacccgaatggaatcatgtaatggaatggaatggaataatccatggactcgaatgcaatcatcatcgaatggaatcgaatggaatcatcgaatggactcgaatggaatcatcttccaatggaatgggaatgggaatcatcgcataggaatcgaatggaattatgatcaaatgtaatgaatggattcgaatggaatcaacatcaaacggaaaaaaacggaattatcaaatggaatcgaagagaatcatcgaatggacccgaatggaatcatctaatggaatggaatggaataatccatggactcgaatgcaatcatcatcgaatggaatcgaatggaatcgaatggaatcatcgaatggactcgaatggaataatcattgaacggaatcgaatggaagcgtcgaatcatcatcagatggaaatgaaaggagtcatcatctaatggaattgcatggaatcatcataaaatggaatcgaatggaatcaacatcaaatggaatcaaatggaatcatggaacggaattgaatgaatcgaatggaattatcatcgaatggaatcgaatggaatcaacatcaaacggaaaaaaacggaattatcgaatggaatcgaagagaatcatcgaatggacccgaatggaatcatctaatggaatggaatggaataatccatggactcgaatgcaatcatcatcgaatggaatcgaatggaatcatcgaatggactcgaatggaataatcattgaacggaatcgaatggaatcatcatcggatggaaatgaatggaatcatcatcgaatggaatcgaatagaattatggaatga

SEQ ID NO: 3911 - DNA, 1494 bp, Homo sapiens
  SIMILAR (523)..(1494): 601254mologous to Homo sapiens protocadherin Flamingo 2,accession number AF231024,Smith-Waterman Score=889.
atggccagcctcctgggagcccctcgcctggctggatgggccagtggggcgggggcattgagcagagggtgggcaataaggcctgcggacacaggaggaaacttaggccctgtgccacgggtgcccctcccccccgacccggttttgactgcccgctgggctcctggtgtgaacagcggctcccaatttagctgtcactgccaggctcccatcctggagatgggccacaagggatccagtccagggctgggggacgcagaggtaagggccatcactgtgcaatgcatacgtcccattgacggtccccagcagcctccaggtggtgggagcgctggccgacgcctaaccatcccagctagcacccaggagtgggcccagcttccagtggggagggtgctggccaacgtgctgaccgaggggggggacacaggaaaccagcccatcccccagcgctccctctgcaggcctcagccctgctcccatgcagagacctggggggaggtggaggcccaggtcccagcgcagagcaaccgggaacagccagcggcggcgcctggatgcggacccggccgcggggagacgggcgcccgccccgaaacgactttcagtccccgacgcgccccgcccaacccctacgatgaagagggcgtccgctggagccttgaattcatgctttgtggcacggacggccctgtgcagccggtgcaacaccaggagggtccagctgccaggctgcagctgatccgaggtggttccttgatcctggagtctgaagggacattgaggggctacctgtgctccaaacagaccagcccgcttctcatctgcttcacacacaggggttctgggctgagcactgagcgctgtctgtctgaccagaacatcatccactcgggcagtgccctcctggccccggccaccagggcagcgtgggagcagatccagcggagcgagggtggcacggcacagctgctccggcgcctcgagggctacttcagcaacgtggcacgcaacgtgcagtggacgtacctgcagccctttgtcatcgtcaccaccaacatgattcttgctgtcgacatctttgacaagttcaacttcacgggagccagagtcccatggttcgacgccattcatgaagcattccccagggagctggagtcctccatctccttcccagccaacttcttcaaaccacctgaagaaaaagaaggccccctggtaaggccagccagccggaagaccaccccgcagaccacacgcccagggcctggcaccgagagggaggccccgatcagcaggtgaaagcgacaccctgatgacactggctagttcaccttcactctgggcatcgtttactgtaccccggggcagctcccgcctgagccctatgaccccaaccgccgcagcctctggctgcctcactggcccatcattaatacgtcgatggtgagcgcactggtgtacagcgagggggctccacttccgagccccctg

SEQ ID NO: 3912 - DNA, 684 bp, Homo sapiens
  SIMILAR (82)..(621): 251254mologous to Glycine max DNA-directed RNA polymerase,accession number X52492,Smith-Waterman Score=103.
atggggcagctgctggacaagaatactcccagtcatggagccaggacacgagaggagtgtggacgggagcgactgtgcgtgtctccctcccaaactggggacaccccgaggaccagcgcgtacctgtgcgtgggaggccccgcgtggagccccctcagcgagtcccgacctgctggctcctctggctgcccctggataaagccccctgaccccaggtattctcctattggcctttgttccttgctgaccacagagatgatgagcaggcaaccacgcactgaccttcgtggacaaacaaacccagctgcccgcctcagctcctgtcccactgagctgcagccaaaatctgcctgtttggccctctctcatggcagggaccacatggcactcacctctgttcccccagctgcttctggcacagtcctgggcacaactgacattaatgttgtgtcagcaaagattgaaagtcccttttttgggaacctactgcctcagtccattgctcccatctacctctccatgtcgaagtccatgcagccgccaaaacccaggtctaatgctgattcctccgtgcaggcctctctgatccccagagctatgagctcacctaccgttagtccctggatcatggggaatggctctcaaggctttgatcacattgcagtgtcaatgtgggatgattag

SEQ ID NO: 3913 - DNA, 420 bp, Homo sapiens
  SIMILAR (403)..(116): 511254mologous to Homo sapiens nucleotide-binding site protein 1,accession number AF298547,Smith-Waterman Score=238.
  misc_feature (1)...(420): n = a,t,c or g
tttgttggtggacccacgcctccgcccacgcgtccggagccagngaagctcctggacatttgcgttattgagaacaccagccttgcacctgaagaccccgcctttcctgaaacttgaggttgctgtttgagctgaagagagagcagaaatctgtccagaggcgaagagagcgaagatcctgccgagcccagttcggaatggttaggaacaccccctttgctacctgcagtgagagtttctgcaagtcttgacaatgcttcaggctgaaggaacaatgcatcacttcagaagtatttgtcaggtgaatagaaatttccttgaacggggccaccaccaccttcgccagctcctcctcctgagactcatacaggcagcccaagacctccttcaggtcggtcacggataagggcttatttgcat

SEQ ID NO: 3914 - DNA, 1785 bp, Homo sapiens
  SIMILAR (1545)..(1784): 381254mologous to Shigella flexneri reverse transcriptase- like protein,accession number U97489,Smith-Waterman Score=91.
atggggtttctccaagttgttgaggctggtcttgaacccacgacctcagtttatcagttgccggaagccactcgtgcgcagcgcggtcgtccgatcgtcaacctgctgccgctggagcaggacgaacgtatcactgcgatcctgccagtgaccgagtttgaagaaggcgtgaaagtcttcatggcgaccgctaacggtaccgtgaagaaaactgtcctcaccgagttcaaccgtctgcgtaccgccggtaaagtggtgcgctttaaagagtcttctgtccgtgcgatgggctgcaacaccaccggtgttcgcggtattcgcttaggtgaaggcgataaagtcgtctctctgatcgtgcctcgtggcgatggcgcaatccttaccgcaacggaaaacggttacggtaaacgtaccgcagttgcgaaatacccaaccaagtcgcgtgcagagacaggggttaatctcatcaaggttaccgaacgtaacggtttaagtgttggcgcggtacaggtagatgactgcgaccagatcatgatgatccacgatgccgcaacatcaaagggaatttttcccatctcaatgaagcaggcaaaaccacaggccagtaacgccagtacggtggttagcggcgagttccagcccatcgccagcgtattgctgatcatctcgatatgcgtggaaactgctatcagcgccaatagcagcaagcctcaggcctggcgtggcacagccaaccgcgcggcgtggggaggagctggggagggggctcgcaaggccggggagggggctaggggcctccgagggctccggatcggcgactggcgagccatggcgctggggctgcagcgcgcaaggttgggaggtcactgtgccaccccggagcagtgggctgaattcttctatgtcctcaaagccaaccagtccctgaagcacctgcgtctctcagccaatgtgctcctggatgagggtgccatgttgctgtacaagaccatgacacgcccaaaacacttcctgcagatgttgtcaaaacccagtaacgtcaccgtccagttcatcccgctggcaaaaaacagcgtcatgccgagaaagccaccgggaataaaggacagtaaccagaaacgcccttgccagaccactaccgccgagaaggccaccgatccgtccctacggattcaacggctgctgcgtctgataacacaaccagaatggctggctgaagcggcgcggatcacgctttcatcaaagggggcccatacccccggcgttgatggcgtgaacaaaacaatgctacaggccagactggctgttgagctgcaaatcctcagggatgaattactctcaggccactaccagcccttgcccgccagacgggtttacatccctaaaagcaacggcaaactgcgaccactgggtatccccgcgttgcgggatcgtattgttcagcgggccatgctgatggcgatggagccgatatgggagagtgattttcatacgctctcatatggcttccggcctgagcgcagtgtccaccacgcgatccgcacgactgtggtgaaacccgggggacgctgggtgattgaaggcgacctgtccagttacttcgacaccgtacatcatcgactgctgatgaaagctgtacgccgcaggatcagtgacgcacgtttcatgactctgctgtggaaaaccatcaaggcgggacatatcgatgtcggtctctttcgggcggccaggaaagggtgccacagggcggtgttatatcgcccctattatcgaacatcatggtga

SEQ ID NO: 3915 - DNA, 3085 bp, Homo sapiens
  SIMILAR (397)..(2730): 661254mologous to Homo sapiens NALP2,accession number AF310106,Smith-Waterman Score=2571.
atgacatcgccccagctagagtggactctgcagacccttctggagcagctgaacgaggatgaattaaagagtttcaaatcccttttatgggcttttcccctcgaagacgtgctacagaagaccccatggtctgaggtggaagaggctgatggcaagaaactggcagaaattctggtcaacacctcctcagaaaattggataaggaatgcgactgtgaacatcttggaagagatgaatctcacggaattgtgtaagatggcaaaggctgagatgatggaggacggacaggtgcaagaaatagataatcctgagctgggagatgcagaagaagactcggagttagcaaagccaggtgaaaaggaaggatggagaaattcaatggagaaacagtctttggtctggaagaacaccttttggcaaggagacattgacaatttccatgacgacgtcactctgagaaaccaacggttcattccattcttgaatcccagaacacccaggaagctaacaccttacacggtggtgctgcacggccccgcaggcgtggggaaaaccacgctggccaaaaagtgtatgctggactggacagactgcaacctcagcccgacgctcagatacgcgttctacctcagctgcaaggagctcagccgcatgggcccctgcagttttgcagagctgatctccaaagactggcctgaattgcaggatgacattccaagcatcctagcccaagcacagagaatcctgttcgtggtcgatggccttgatgagctgaaagtcccacctggggcgctgatccaggacatctgcggggactgggagaagaagaagccggtgcccgtcctcctggggagtttgctgaagaggaagatgttacccagggcagccttgctggtcaccacgcggcccagggcactgagggacctccagctcctggcgcagcagccgatctacgtaagggtggagggcttcctggaggaggacaggagggcctatttcctgagacactttggagacgaggaccaagccatgcgtgcctttgagctaatgaggagcaacgcggccctgttccagctgggctcggcccccgcggtgtgctggattgtgtgcacgactctgaagctgcagatggagaagggggaggacccggtccccacctgcctcacccgcacggggctgttcctgcgtttcctctgcagccggttcccgcagggcgcacagctgcggggcgcgctgcggacgctgagcctcctggccgcgcagggcctgtgggcgcagatgtccgtgttccaccgagaggacctggaaaggctcggggtgcaggagtccgacctccgtctgttcctggacggagacatcctccgccaggacagagtctccaaaggctgctactccttcatccacctcagcttccagcagtttctcactgccctgttctacgccctggagaaggaggagggggaggacagggacggccacgcctgggacatcggggacgtacagaagctgctttccggagaagaaagactcaagaaccccgacctgattcaagtaggacacttcttattcggcctcgctaacgagaagagagccaaggagttggaggccacttttggctgccggatgtcaccggacatcaaacaggaattgctgcaatgcaaagcacatcttcatgcaaataagcccttatccgtgaccgacctgaaggaggtcttgggctgcctgtatgagtctcaggaggaggagctggcgaaggtggtggtggccccgttcaaggaaatttctattcacctgacaaatacttctgaagtgatgcattgttccttcagcctgaagcattgtcaagacttgcagaaactctcactgcaggtagcaaagggggtgttcctggagaattacatggattttgaactggacattgaatttgaaagctcaaacagcaacctcaagtttctggaagtgaaacaaagcttcctgagtgactcttctgtgcggattctttgtgaccacgtaacccgtagcacctgtcatctgcagaaagtggagattaaaaacgtcacccctgacaccgcgtaccgggacttctgtcttgctttcattgggaagaagaccctcacgcacctgaccctggcagggcacatcgagtgggaacgcacgatgatgctgatgctgtgtgacctgctcagaaatcataaatgcaacctgcagtacctgaggttgggaggtcactgtgccaccccggagcagtgggctgaattcttctatgtcctcaaagccaaccagtccctgaagcacctgcgtctctcagccaatgtgctcctggatgagggtgccatgttgctgtacaagaccatgacacgcccaaaacacttcctgcagatgttgtcgttggaaaactgtcgtcttacagaagccagttgcaaggaccttgctgctgtcttggttgtcagcaagaagctgacacacctgtgcttggccaagaaccccattggggatacaggggtgaagtttctgtgtgagggcttgagttaccctgattgtaaactgcagaccttggtgttacagcaatgcagcataaccaagcttggctgtagatatctctcagaggcgctccaagaagcctgcagcctcacaaacctggacttgagtatcaaccagatagctcgtggattgtggattctctgtcaggcgttagagaatccaaactgtaacctaaaacacctacggttgaagacctatgaaactaatttggaaatcaagaagctgttggaggaagtgaaagaaaagaatcccaagctgactattgattgcaatgcttccggggcaacggcacctccgtgctgtgactttttttgctgagcagcctgggatcgctctacgaattacacaggaagcgggattcgggtctctaagatgtcttatgaatgcaggtcagagggtcacatgttaacactagagtctgtcgagaggtaggatttgacactggttttctcactatttttgggagattctgcacgagtcacgcacccccttcacatgacgctatgtactttctcacagggataataaagttagagcactctca

SEQ ID NO: 3916 - DNA, 282 bp, Homo sapiens; identical to SEQ ID NO: 2959
  SIMILAR (116)..(232): 841254mologous to Homo sapiens Human secreted protein HCHPF68, SEQ ID NO:163,accession number Y86248,Smith-Waterman Score =168.

SEQ ID NO: 3917 - DNA, 252 bp, Homo sapiens
  SIMILAR (100)..(219): 851254mologous to Homo sapiens Human secreted protein HCHPF68, SEQ ID NO:163,accession number Y86248,Smith-Waterman Score =171.
atgacagtctgcatacacattgcctctgaagaccttccagtgggacgagatgtggaggtggaagacagtgacattcatgatcgtgaccctggcctgggagacaagagtgaaactccatctgaaaaaaaaaagaagaagaagaagaagaagaagaagaagaagaagaagaagaagaagaagaagaagaagaagaagaagaagaagaagaagaagaagaagaatccaattttcttcaacattatcttcatttag

SEQ ID NO: 3918 - DNA, 370 bp, Homo sapiens
  SIMILAR (2)..(187): 871254mologous to Homo sapiens Human thyrotropin GPR N- terminal sequence,accession number W03626,Smith-Waterman Score=274.
gaaaaaaagaaaagaagaagaagaagaagaagaagaagaagaagaagaagaagaagaagaagaagaagaagaagaagaagaagaagaagaagaagaagaagaagaagaagaagaagaagaagaagaagaagaagaagaagaagaagaagaagaagaagaagaagaagaagaaggagaaccctttctcttgcttttagtaaatggggtcttaattcctggtgtgagatcttgtcttgactctacctcgcaattcagcttgacagggatgcttcttcaagagaaatcagaaatatttggtctagcggtatgtagtccactcatcaaacggaaaggaggacatattccagtactcaacactgtccctggatga

SEQ ID NO: 3919 - DNA, 435 bp, Homo sapiens; identical to SEQ ID NO: 2964
  SIMILAR (315)..(166): 501254mologous to Plasmodium falciparum serine repeat antigen,accession number AB021826,Smith-Waterman Score=87.

SEQ ID NO: 3920 - DNA, 906 bp, Homo sapiens
  SIMILAR (900)..(613): 311254mologous to Homo sapiens adlican,accession number AF245505,Smith-Waterman Score=135.
atgcagatcccatctctacataaattgaagaaagaagaagaagaggaagaggaagaggaggaagaggaagaaagaagaagaagaataggaagaggaagagagaagaaagaagaagaagaagaagaagaagaagaagaagaagaagaagaagaagaagaagaaggagaagaagaagaaagaagaaaagaagaagaaagaagaggaagaagaagaaagaagaagaaagaaaaagaaagaaagaaaagaagaagaagaggaagaagaaaggaagaagaagaaggagaagaaggagaggaagaagaagaggaagaagaagaagaaagaagaaaagaagaagaagaggaagaagaagaaggagaagaggaagaagaagaagaagagtcgtgcctcatgggaccaatgtgtgtgcatattcatcctgaacaaggacttatattcgttggggccaccagcccagcgatttacaggaagccacgcggagctgcctacctgaaaagcgcgtcgatcgtcctcttggacggcagcctccagaggatgcgcggccagggatcccccgaggcgctgcagtccagcttgagggtccctccgtacctgacgtccgtcctctgcgaggagctgcaccgtactgcgcgcggagccgatcaggttggcggccacgcactcatagcgcccgctgtccttgggcgcgaggttgcagatgtagagcgtcccgttggggaaaacaaacaagttccggtggaggaaatgcgaggggcggatttgggtaccatccccgagcacccagagcacgctgggcaggggcgcagctttggcagtgcagtgaatgtgaatgctgagccccgggggcagcgagatgttctacagcttctcctggtggataatggggggcagtgccgccacgtgtag

SEQ ID NO: 3921 - DNA, 9012 bp, Homo sapiens
  SIMILAR (1998)..(4): 961254mologous to Homo sapiens adlican,accession number AF245505,Smith-Waterman Score=3367.
tcagaagacgtggatgtaagttgttttggagtcactgccgagaatgttttttgccatgcacttgtagaagccggcatctctctgtgtggcatgctggatggtcagtgatccctgggggtgaagaaatctgtttccatacagacgagcctgaacccctgccttcagatgcgacttatccggtaactcccacgtgatgtcagctttgggaatccccatagccatgcagttcagtttcacggtgttcccgggccgggtgtagatgaccggggtgggctcgctggtgatccggggaggataggcgatcacaatcacggggatgctggtgaccgaagggccgtactccgtctccatcctgcatacataggtacccctgtcaaacaccgaggcctcacgaaccgtgagggtgccattgtccagaagagaaacgcgtcccagggtttgggggccctccagatgcatgccattggggagcgtccaggagaaacgtccctgcccagccccgggaggggtgcaggggagcttcagggtctcaccattgatgatgctgaccaggttatgatactgcttgtttgcttctggcttcagtcccaccttcagggagaccagcctctccgtgtggccagcggcattgcgggccacgcagcggtaggccccggcgtccaccgaggagagaccgctaatgtgtagcatgccgtcagccttgtggtagaagcgctgcagctgctgtccactctgcagatcggtgccattgggaaggacccacaccaggctgggtgtcggggtccccgcggcagagcagttgaggctgatggtgtggcccgccatggccgtgatcttctcgctgatcgggtcgtggaagatgggtttctccatgggctccaggacagtgagctgcaggatcaacctggcctcccctccctcgttgcgtgccatgcataccagctggacggagtcgctcttcctcaaactcctgatgtccagggaaccgttgccatggacagtgatccggtttccatagtatggagctggcagaaccacaccctcgggaaaagcccataacaccctcggggtggggatgccttcagctttgcagtcaatcagtttccgactgcccccggctgctatctcccgcacagtggtgatggggttggggttaccgttgatcttgggtggctggacgttgacgtgaatccacaccgtcttcctatcctctcccgcgctgttcctgaccaagcaggtgtagttgccgctgtcagaacgctgggctttctgaataaggagagtgccatcttggtatatctgatacttctcagaggaggtggggatcaccttgttggttggggacaaccaagtcaccttgggcatgggttctcctttggcctcacaggctacagtgaccacgtctccatagggcacctgaaccgccaagtaagtcttgttccggatggtggcgggcgctgtcaccaccttgactctgactctcatctcgtccttcccgacctgattttcagcaaagcaggtgtagtctccttcctccctcatccccacttcgttaaagtagagtgtcccattgttgaagacgacatagcgcttggtgcgtccaccgctgtcatccgactgcatgaaggagttcaccagactcccgtctgggaggctccaggagatctcgggattgggaagcccggtggccacacagtccactttcaggtcacccccgtagaagactttgtggtcgttctcctccttgtgttcaatcttggccggtttcatcaccacatccactttgagcaccacgtagtcatcaccaaccttatttcgagctacgcacaggtaatctccggcatctttgtccgtcactgatttcaccaccagggtcccattggcaaacaccttgattctgctatcaaaactgaccttggcactatggacattgaaggtaggatggatgacaatctgtgatgggccatcctgtgcactgcagggtgttgagcaccgtccctggcctccacccaccagataccagaagcacccactgccccatttgtgataatcaaaggtgtcttcagatattgccaagtgttgtcttggggcaaaatcacccttggttgaaaagcactgccataaacctgtatatctgacgtccgtcctccgcggggaggtgcccgtgatgcgcgcgttggctgctgcacgctgcacgttcagctgcaccgtcctgcgcgcggagcctaccaggttggcggccacgcactcatagcgcccgctgtccttgggcgcgaggttgcggatgtagagcgtcccgttggggaaaacaaacaagttcccgtggaggaactgcgaggggcggatctgggtaccgtccccgagcacccagcgcacgctgggcaggggcgcagccttggcagtgcagtgaatgtgaatgctgagccccgggggcagcgagatgttctccagcttctcctggtggataacggggggcagtgccgccacgtgcaggcggatggccaggctgtccgccccggctgcattgctggccacgcacttatagacgcctctgtctgagaaggacgcctccttgatggaaagggtccggttttcgtgcagggtgatgcggccctccacgggggacacagtttgccacaccctcctgtcagggaagatccaggaaatttggggggctggggtccctttggccagacactccattgcaatggtgtctcccaggtagacagtgacgtcctggtagtgggaggctaggatttgaggttgctgcacggtgaccgaaagcaagaccaccatcctgtccaggccgtgcaggttgctggcggtgcacatatactggcctcgatcttgtacttgaaccttccgtatcactaaggtaccgttcttgagaacctcaaaccgttgtatcctggtattcggagtcataagagctcctgtggaaacctttgtccaagtaacgaaaggctttggttttcctgttgcctcacaggggaacacagtgtctgtctcagcggtgacggacacagtctgtggggacttggtgaggatttgtggcttttccccaagagaccagaatttggatgcaggaggtcctcctgcaaagaactttgagctgctctggtggaagcttcctgaggactggacagaagatgttataaaggagatagaactctgggtggaagagaccatagggatattctgtaagttagttgagggtgatcccgtggtctgcggagtgtgcaacaacggaggtgccggagggccaaagtccagatggaaggtgctatgggaatgtatcctgttgtaggaacctggaataacttttctctctctcattactggggcaggagaagtgggtatctggggtctccgggtgactcccaactgtggaaaagaaagagtcttgttggtaaagaaagggagtcttccattggaataatgaggaattcttggactgggaggctttccaactgggtttcttgcctcagggatgttgttatttccaaacactttggagtagccattgaattggtcagttcttcggtcagtaaacttactaggaatgctgggtttggacatgtgcaatgggagaggaattgttgtacttgataatcttggagttgtaaactgtttgttctctggcaaagccccagaaggatatgtagttatttccggtttgttggtccagtgacgaggtgactgggaagttacaaagtatctggaagcgctttgtgtggacatttcaggcagcctcactgttgctgttggtaggatgggtttggcagggactctggttagttgatgagaagcatgaactcttccatcctggcgttggctatctgggccacgtggtagactcctactaccaaatacttgcttttccaattccagctttgtagacaagttaaatgcatcctggtcggaagagggtgttgataattcatttggccctgacatatgctgtgttccttcattgttcactggggttgcttctgtttctggattccccacataattcaagaaaacattttccttggaatctctagatgcttgagatattcttggactgggaagtgctggcttagtggtggtggtttgtcccaaagacatgagaattgtggatggggacgaggatgctggctccttcatccgggcagcagtaggggtgtgattctgtggtctagtttcagaaaggagaatagccacagtggtttcaagatgatcttgatcaagggtggtggtttctgcctgacttgaagccacctccacttttatgcttgagagagttgtggaagaaccagcttcttcctggtgaaatggtgtggagactgtcaaagaggacaaaaactcggaagtgaaatccacatcctcaagctctttaagaaggggagggtctgtaagattttccccagaagtggtaacaggtatgcctgtctgtagcctcccaggctgggccgtccttgagggattccaggttggagttcctggaaagcctacaggagaggattcttccttaaattctcccatagtggagaccaaggagcgagaagttggtatggcattagtaattgattcaccagtgactaaaatgtcacttttatgtttgtcaacatttgtggcaacatcatccttaatttcttttccatctgatgtgggtttatatgtgactggaagtgtctcttggactttagggtaagatgaatatatttttctggtggttgtcatgtaatctaaggaatcataagggccctcagttttcagagaaacagttctaggcaaaagtatagtttctgaactgggagtaacaatgtttctatgtttattttctggagaagggctgggcttggatccggacgctcttgagctcactgtagaaggggtatatcgatgtttgtttggcctcttcccgtgttttctccgtggtgttcccttggatgtgggttctgcattcttctccatttccaactgtttgggggtattaactgtgttatccacccaagctgtaggaaccagagaactctccacttgacttgaaatcttaatgtcaggtgcttgagttggttgagtagaaaaagtctctgatggggcaaaagttgtgggtggggtttgcttgtgccggtggcggaatttgttggggcgtaatctccttctcccgttgggtctccttcgagaagggtgagtgctcatggtggatgacggagcaactttttgccttggtgttgttgttgctgttgtggtgtctttgtctaggagggtaccaactgtggtttccgcaggcttcttaactggagacatactgctcattatacccagtgtggagtcaggcaaagtgatggatttgctctcttggccctcactctcagaacttctggagtgtgtggggtctccctctagcatatttcctccctgtagtgtctgagacatctctttcataccctttttaatcagtaaggtgtcttgagtgcttagactacttttcacaaggtggatgttgtctgtcagtccttgtagatgtgattggcctgggacacctggttcccctatagtagaatcctcaaataactgtgatgtactggagtcattaacccagatggtgggggttggagtaaggtgtgcaaaggtgtcttctttcatcttatcctcatctggttgtgacttagtctccaaatctgggtcaaagtattgcatgggctcagactcagccaaggagacagcatccaatggaggctcatactcactggatgtgggctctggtgacgatccaacatctgctgcagaccaaccctctgttgccgtctcttcatgggtgggcttttcatagactgtgtctaatgtgtgcagagtaggagatggttcataaggctcagatataagtgtaggggctgctgtccccttcaggtctccttcagtggaagttatctcctcagtcttctcggaaaggtcatcaacaacttcctccagaggtgtgcttgttacttcaggttcaacaagaataactccattgtggttgtgttctagccccatgctggctgaggaaatggtacccaaaacgtgctcttcttcaccaagtagaggtacatctgctgaggattcttcagcactggttactgtctgcacaggagatgctgaggggggagaaatagcaggaaaaggtggtgtgacttctagactcaaggatggaggacttgtggttttaatcaatgggggtacttctgtgcccttagggagatttttcccacggactttggctaaaatatcagcccagcgctccggattaatctgtttgtttgccatgtttatccttcgtctagattcaaacactctgcgaccttctgcaacattggtctctggttctttttccgaatgcttccagagtttcagctttcttctccctttcttggctttcttgtctccattgatggcatcatcctttgttttgaggaacacctcttggtcctttggatgcagaagtctccttgaagtgttctcttcatctcccatgcccgagcccccttcatcctccacgatgtcttctctgactctggaaagagcctttgcacctgggcgtctgcctcttttggatggcaagccagaccctttcttggtcactgtgattcccaccgtaaaatggtctgccccttgctggttgacagccacacatctgtagtaaccactgtcactgacttggacctttgggatggaaagagttccatttggcaacatgtatacatgtgatgtgttagccaaatcattaattatccttctgtttggaagaatccagctaaggtgggcttcgggtattgctaaagcattgcaaggcaatgtcaccgactcccctgggttcttgccaattgtcactgtgtctttctcggctggctgagtggagggagactgcacaagtaccctatataccatgcggtccatttcatccctcacttgagcaatgcactggtacaagcctgagtcagatggctccatggacttgatcctcagccagccactgctgagaatggagaacttgctgtctgggtcatccatgggcgctttcaggatggagccatctggaagcacccagaagatagatggactctcagaagctttcacgttgcagctcaactggcatggacccccttccaggacagtctgatctctttgcacagctccactaggctcaatcattacccagcttctgccccgagcctgccttgtatctttggtggatattgtttgagaatactgggtgtagtaggaaagtagcaccttcttggccgtactctgacgtcggttcagctggatatctatggatggctgcatgacccattctggttctgcaagaatctgggctctcacacctgtgtagtaaagagcttcctcatcagcatcctgcctgtactggtagctgactctggggtctttgctgagcatgagctctctgtgtagcttcacgggaacttcactgtagtatgctatcaatttccatagcttttcatagttttctcgggtcattggacactcaaagtccaaggcaactgttgcatttatgtcaatatctggaggatccgtttggttcaagtgaatcttgtacacatccattggtttcttgatgtcacagaccaagttcaccatgttcccgtgctcgtcggtcatattcaaagagatgctccactggggcagttggaatttctccaggatgagctggctgccaccatcctcttcctgttcttgctcctcctcaatactcctgctcctgttctgtctcagaggggactctattgaaggcttcagacaagtcatgtccttcagcttgtgtatctcatgtttgtacaacttctttggactgaagcacattgcacacaactgaccgccttcataagctttgtcctttttacacttcagaattcgttgtcctcttggtctcctggatatgaaatcctctggaattttctccgtcctttctggccacaactgggtctcagtcactgcttcctcctcctcctctgcctgaatctttgctgactgggtcctccttgacttgagcctaagcccctttcctttctggtcggcttcagcgtcaatggcctctcgcatatgtgtggttccaattaccatccacccgccagtgatgactaccatatgtgcttctctagtccaaacacattccgtgagttccacaccccattgcctctttgacatgtactcacactcatacccacacacatacatgctgtgagacaaggcagcaagcacaagcaggagcatttcacaaaatcccttggccagctgaatttcatggctcagcgaatgagcgcagcctctacatgaatgccctctggattttgcatcccattccaaaaaccatctcatctcacaatcgcaggtccacggatttccctgcaagtaaagattctccagaagcggcatgttccgaagcatgctggcaggaagagttctaaccatgttctctgctaagtagaggtgccttatggtggagagtctgaaataatccaaaaatgtgaacgtggagaaggtgctggggtgcagctggtggaggagatttccttccaaatggagtagcctcagagacgttaagccgttgaaagcttgagggtggataaactcgatcttgttgtggtcaatgtgcagcctcattaagttagagagaccctggagggtctgtcctgtgatcactctcagcttgttgtagctgaacttgaaaacctgaagagagctgaggtctcttaaagctccatcggggatgcttgggatctcattgccgtgaatcataagtagctccaacttggtcagtcctgaacggagcccagaagaaggaggcagatcttcagacagaggagatagggctctgaggctctgtctctgaaatgggtcagaaacagctggatgttcctcagcacattttacttcaagggtgtgatatgttctccttccatagttgtggtcaccaaaaaggtctccagatgttgccaaatgttttccaggggcaaactcatccat

SEQ ID NO: 3922 - DNA, 993 bp, Homo sapiens
  SIMILAR (698)..(519): 351254mologous to Homo sapiens adlican,accession number AF245505,Smith-Waterman Score=81.
atgcagatcccatctctacataaattgaagaaagaagaagaagaggaagaggaagaggaggaagaggaagaaagaagaagaagaataggaagaggaagagagaagaaagaagaagaagaagaagaagaagaagaagaagaagaagaagaagaagaagaagaaggagaagaagaagaaagaagaaaagaagaagaaagaagaggaagaagaagaaagaagaagaaagaaaaagaaagaaagaaaagaagaagaagaggaagaagaaaggaagaagaagaaggagaagaaggagaggaagaagaagaggaagaagaagaagaaagaagaaaagaagaagaagaggaagaagaagaaggagaagaggaagaagaagaagaagagtcgtgcctcatgggaccaatgtgtgtgcatattcatcctgaacaaggacttatattcgttggggccaccagcccagcgatttacaggaagccacgcggagctgcctacctgaaaagcgcgtcgatcgtcctcttggacggcagcctccagaggatgcgcggccagggatcccccgaggcgctgcagtccagcttgagggtccctccgtacctgacgtccgtcctctgcgaggaggtgcccgtgatgcgcgcgttggcgcgcagcgcgctgcacgttcgctgctgcgcgctgcacgttcgctgctgcgcgctgcacgttcagctgcaccgtactgcgcgcggagccgatcaggttggcggccacgcactcatagcgcccgctgtccttgggcgcgaggttgcagatgtagagcgtcccgttggggaaaacaaacaagttccggtggaggaaatgcgaggggcggatttgggtaccatccccgagcacccagagcacgctgggcaggggcgcagctttggcagtgcagtgaatgtgaatgctgagccccgggggcagcgagatgttctacagcttctcctggtggataatggggggcagtgccgccacgtgtag

SEQ ID NO: 3923 - DNA, 314 bp, Homo sapiens
  SIMILAR (185)..(310): 571254mologous to Homo sapiens 05-DEC-1997 DNA encoding thrombospondin I fragment concatamer,accession number X58726_cd1,Smith-Waterman Score=145.
aaagcttagacaaagtacaatgttttatttgcagttcatggtggattttcccagtggtcagcatggagagcctgcagtgtcacctgtggaaaaggcatccaaaagaggattcgtctgtgcaaccagcccctttcagccaatggtgggaagccctgatggtgtaatggttcacctttgtatagtggatggtagctggtcggaatggagtctttgggaagaatgcacaaggatctgtggacgcggcaaccaaaccaggaccaggacttgcaataatccatcagttcagcatggtggacgaccatgtgaagggaatg

SEQ ID NO: 3924 - DNA, 3910 bp, Homo sapiens
  SIMILAR (3497)..(3649): 291254mologous to Caenorhabditis elegans hemicentin precursor,accession number AF074901,Smith-Waterman Score=45.
atgggtatgaccaaaaagataagagataacaagagtcggcaaggatgtggagaaaaggggacacttgcacactgttggtgggattcccctaaaatgacctggatgaaagatggccggccccttccacagacggatcaagtgcaaactctaggaggaggagaggttcttcgaatttctactgctcaggtggaggatacaggaagatatacatgtctggcatccagtcctgcaggagatgatgataaggaatatctagtgagagtgcatgtacctcctaatattgctggaactgatgagccccgggatatcactgtgttacggaacagacaagtgacattggaatgcaagtcagatgcagtgcccccacctgtaattacttggctcagaaatggagaacggttacaggcaacacctcgagtgcgaatcctatctggagggagatacttgcaaatcaacaatgctgacctaggggatacagccaattatacctgtgtggccagcaacattgcaggaaagactccagaaaatttatttttactgtcaaaatatgaacaatcaaaaaaggctgattcagaagacttcacttgtgatttctcttgtagatattccatcttggaaaatggattccttcatattcaatcagcacatgtcactgacactggacggtatttgtgtatggccaccaatgctgctggaacagatcgcaggcgaatagatttacaggtccatggttcactagtaattatttccccttctgtggatgacactgcaacctatgaatgtactgtgacaaacggtgctggagatgataaaagaactgtggatctcactgtccaagttccaccttccatagctgatgagcctacagatttcctagtaaccaaacatgccccagcagtaattacctgcactgcttcgggagttccatttccctcaattcactggaccaaaaatggtataagactgcttcccaggggagatggctatagaattctgtcctcaggagcaattgaaatacttgccacccaattaaaccatgctggaagatacacttgtgtcgctaggaatgcggctggctctgcacatcgacacgtgacccttcatgttcatgagcctccagtcattcagccccaaccaagtgaactacacgtcattctgaacaatcctattttattaccatgtgaagcaacagggacacccagtcctttcattacttggcaaaaagaaggcatcaatgttaacacttcaggcagaaaccatgcagttcttcctagtggcggcttacagatctccagagctgtccgagaggatgctggcacttacatgtgtgtggcccagaacccggctggtacagccttgggcaaaatcaagttaaatgtccaagttcctccagtcattagccctcatctaaaggaatatgttattgctgtggacaagcccatcacgttatcctgtgaagcagatggcctccctccgcctgacattacatggcataaagatgggcgtgcaattgtggaatctatccgccagcgcgtcctcagctctggctctctgcaaatagcatttgtccagcctggtgatgctggccattacacgtgcatggcagccaatgtagcaggatcaagcagcacaagcaccaagctcaccgtccatgtaccacccaggatcagaagtacagaaggacactacacggtcaatgagaattcacaagccattcttccatgcgtagctgatggaatccccacaccagcaattaactggaaaaaagacaatgttcttttagctaacttgttaggaaaatacactgctgaaccatatggagaactcattttagaaaatgttgtgctggaggattctggcttctatacctgtgttgctaacaatgctgcaggtgaagatacacacactgtcagcctgactgtgcatgttctccccacttttactgaacttcctggagacgtgtcattaaataaaggagaacagctacgattaagctgtaaagctactggtattccattgcccaaattaacatggaccttcaataacaatattattccagcccactttgacagtgtgaatggacacagtgaacttgttattgaaagagtgtcaaaagaggattcaggtacttatgtgtgcaccgcagagaacagcgttggctttgtgaaggcaattggatttgtttatgtgaaagaacctccagtcttcaaaggtgattatccttctaactggattgaaccacttggtgggaatgcaatcctgaattgtgaggtgaaaggagaccccaccccaaccatccagtggaacagaaagggagtggatattgaaattagccacagaatccggcaactgggcaatggctccctggccatctatggcactgttaatgaagatgccggtgactatacatgtgtagctaccaatgaagctggggtggtggagcgcagcatgagtctgactctgcaaagtcctcctattatcactcttgagccagtggaaactgttattaatgctggtggcaaaatcatattgaattgtcaggcaactggagagcctcaaccaaccattacatggtcccgtcaagggcactctatttcctgggatgaccgggttaacgtgttgtccaacaactcattatatattgctgatgctcagaaagaagatacctctgaatttgaatgtgttgctcgaaacttaatgggttctgtccttgtcagagtgccagtcatagtccagggtgagtgtgatcagaggaatattcatagtaaacagtacctgggtggtctgcatggagagcctgcagtgtcacctgtggaaaaggcatccaaaagaggagtcgtctgtgcaaccagccccttccagccaatggtgggaagccctgccaaggttcagatttggaaatgcgaaactgtcaaaataagccttgtccagtggatggtagctggtcggaatggagtctttgggaagaatgcacaaggagctgtggacgcggcaaccaaaccaggaccaggacttgcaataatccatcagttcagcatgttcatggagcatggagcgcttggcagccttggggaacatgcagcgaaagttgtgggaaaggtactcagacaagagcaagactttgtaataacccaccaccagcgtttggtgggtcctactgtgatggagcagaaacacagatgcaagtttgcaatgaaagaaattgtccaattcatggcaagtgggcgacttgggccagttggagtgcctgttctgtgtcatgtggaggaggtgccagacagagaacaaggggctgctccgaccctgtgccccagtatggaggaaggaaatgcgaagggagtgatgtccagagtgatttttgcaacagtgacccttgcccaagtgagtgttggaaatacccatggtaactggagtccttggagtggctggggaacatgcagccggacgtgtaacggagggcagatgcggcggtaccgcacatgtgataaccctcctccctccaatgggggaagagcttgtgggggaccagactcccagatccagaggtgcaacactgacatgtgtcctgtggatggaagttggggaagctggcatagttggagccagtgctctgcctcctgtggaggaggtgaaaagactcggaagcggctgtgcgaccatcctgtgccagttaaaggtggccgtccctgtcccggagacactactcagctcagcctctggtagtagcagggccccagtggcatcaggaggtccaaataggttgacagtttgggttgcagaatctggcagaggatttcagagatcccagccaggtattcagaatgaggagtcttttgagcactgggactcaagtccctctgtgagactagagaaccagggtcaaaatgtcagtgatgacccagagagctaa

SEQ ID NO: 3925 - DNA, 573 bp, Homo sapiens
  SIMILAR (177)..(560): 331254mologous to Homo sapiens spiceosomal protein,accession number L21990,Smith-Waterman Score=113.
atggcctgccatatggtcaagccagatttaaaaattgagaatatctattaccaatccactaatgctaaagccaaagtcacagacaggacgcagaatctcaacggtcagagcgtgttcagcgtggcccccgtcaagggcgtcatggaccccgggaagacacaagacttcactgtcaccttcagccccgaccacgaaagcctctacttctccgacaagctccaggtggtgctctttgaaaagaaaatctcccaccagatcctgctgaagggtgccgcctgtcagcacatgatgttcgtggagggcggcgaccccctggacgtgcccgtggagtctctgacagcgatccctgtatttgaccccaggcacagagaggaagctgaggagctgaggcccatcctggtgaccctggactacatccagtttgacacagacacgccagccccacctgccacccgagagctgcaggtgggctgtatccggaccacccagccatctccaaagaaggtgcccacagcactgcccctggggacaccaggcagccccctcggcctcccctgccgtgggcagccctga

SEQ ID NO: 3926 - DNA, 424 bp, Homo sapiens
  SIMILAR (410)..(9): 381254mologous to Homo sapiens Human secreted protein sequence encoded by gene 33 SEQ ID NO:154,accession number Y91433,Smith-Waterman Score=145.
gtgccggcgggcaggctctgcagggtcctggccagggcaggggctcccagggcgttgtaggacagggacagggtcttcaggtgctcagcatcttggaaagcactacccagtgctgtctggtggctcagaaagaagctggggccgaagccacacgcctgcaggcgcagggtgctgagtaaggggcaggcgtgcaggagggaggccagggactggccacagccgtcccccagggggttcatgcttaagtccagctcctccaaactctgcaaggtggcttggcctgggagccccatggcaagctggcgcaggccttcgggacccaggtgattggaggagaggtcaaggagggccaggctgggcatggtgcccagggcagccaccagctcagccacacacttgtcccccgaattccaccgcacggtac

SEQ ID NO: 3927 - DNA, 1238 bp, Homo sapiens
  SIMILAR (9)..(1232): 301254mologous to Araneus diadematus fibroin-3,accession number U47855,Smith-Waterman Score=205.
tcagaggcgccgaaagaagagcttggagccgtggtccagcgtgcactcgccggggcccggccgactgggctgcagctggcgcagggcgtccctgtcctcagcgcagaggcgtctgctgcacagctgcagttcccggagctgcgcggctatcttgtcccacaggcccaggcccaggggaccctggacggcgcagcctgacaggccaaggaagctaaggccttggggccgcttttggagggtggacaggagctcttccaagctggcacagctgatctcagggttggcagacagatccagtgagatgagtgaggggcacagagagagacatctgcacaggtctctaacagccttgtcccccaggtggtttgcagacagggtcaggtgggctagagcacagccttccttggccaggtatcggaatacaggctccatgaggtccgaatcacccttgccggctgccacggagctgagctctaagtgcaggagggtgccggcgggcaggctctgcagggtcctggccagggcaggggctcccagggcgttgtaggacagggacagggtcttcaggtgctcagcatcattgctgccccccttacactccccctggatgacacccaattcccagcctcttggcactgggaccccagtctctgcagcctgagtgggctcacagtggaactgcctcaggcgaacagcactcagctggcgagcacgggatggggaccacaggacactagctgcccggactctgctctcggtgtgtccttggaaagcactacccagtgctgtctggtggctcagaaagaagctggggccgaagccacacgcctgcaggcgcagggtgctgagtaaggggcaggcgtgcaggagggaggccagggactggccacagccgtcccccagggggttcatgcttaagtccagctcctccaaactctgcaaggtggcttggcctgggagccccatggcaagctggcgcaggccttcgggacccaggtgattggaggagaggtcaaggagggccaggctgggcatggtgcccagggcagccaccagctcagccacacacttgtcccccagccggttccctgccaggcgcagctcccggagtgctgtgtgcagcttgagggcccgcagcaggggtgtaagctgggcctggtccagggccagggagcaggcgctgaacgagaggcccaagccctggagctccacggcctgcagcacctgttggtgctccc

SEQ ID NO: 3928 - DNA, 415 bp, Homo sapiens
  SIMILAR (126)..(371): 401254mologous to Rattus norvegicus N-methyl-D-aspartate receptor NMDAR2D subunit,accession number U08260,Smith-Waterman Score=109.
gggagacaggacgacacagatcccagcaatcggtatcatcgccccccgtacagccaagaggaaaaagagcaatgtatcactctgctgctgagctggtgtctaggggattcccaaggcccccagtgcaggccccagctgagcctgcaggagctgcggagggagttcacagtcagcctgcatctcgccaggaagctgctctccgaggttcggggccaggcccaccgctttgtaagtccccctaatgcagctggcgctggagatgggcagacccccaatcccttctggcccccactaacagaccttgccccccaggcggaatctcacctgccaggagtgaacctgtacctcctgcccctgggagagcagctccctgatgtttccctgaccttccaggcctggcgccgcctctctgtga

SEQ ID NO: 3929 - DNA, 657 bp, Homo sapiens
  SIMILAR (120)..(527): 291254mologous to Homo sapiens hyperpolarization activated cyclic nucleotide-gated potassium channel 2,accession number AC005559,Smith-Waterman Score=98.
atggagacagagccttcaaaggccagagccaatgacccaggatcagctgcagaggggctcagcctgttgctgcttcccttgctcctggttcaagctggtgtctggggattcccaaggcccccagggaggccccagctgagcctgcaggagctgcggagggagttcacagtcagcctgcatctcgccaggaagctgctctccgaggttcggggccaggcccaccgctttgacccggagcgtctctgcttcatctccaccacgcttcagcccttccatgccctgctgggagggctggggacccagggccgctggaccaacatggagaggatgcagctgtgggccatgaggctggacctccgcgatctgcagcggcacctccgcttccaggtgctggctgcaggattcaacctcccggaggaggaggaggaggaagaggaggaggaggaggaggagaggaaggggctgctcccaggggcactgggcagcgccttacagggcccggcccaggtgtcctggccccagctcctctccacctaccgcctgctgcactccttggagctcgtcttatctcgggccgtgcgggagttgctgctgctgtccaaggctgggcactcagtctggcccttggggttcccaacattgagcccccagccctga

SEQ ID NO: 3930 - DNA, 526 bp, Homo sapiens
  SIMILAR (125)..(523): 551254mologous to Homo sapiens Human phosphodiesterase interacting protein, myomegalin,accession number Y71159,Smith- Waterman Score=323.
tgagtgcggcggaattcctggaagaagagaggtgagccggcggtcaggcagaggctggcctggcagcgggtcttgactgcgcccctgaggtggaggtaccaagtgacactgtttctccttctaggaagcagaagcgttggagaaccagtcccagccttgtgacactgggcccaatcagcatttagcccaccagggtccacccagcacccgcgctcccagctgtcacaatgcaaacaacgctatcaagatctccaggagaagctgctgctatcagaagccactgtctttgctcaggcgaacgagctggagaaatagagagttatacttagtaggtgaacccttgctgaagcaggacagtaaacaggtccaggtggacctccaggacctgggctatgagacttgtggccaaagcaagaatgaggctgaacaggaggaaaccaccagtcccgagcatgaggagcacagcagccgcaaggaaatggtcctggtggaggggctgtgctctgagcaggggcgccggggctga

SEQ ID NO: 3931 - DNA, 648 bp, Homo sapiens
  SIMILAR (154)..(612): 451254mologous to Human endogenous retrovirus K gag protein,accession number Y10392,Smith-Waterman Score=384.
atgggacaggtgtggggtctggttcatttcaccttggaagtttttcacactggtgatgaggaggaacaagagtatagtgaagtaacagaagacgttacagagcatgtttatttaccagctaaagctaaagtggcaaaggaagaagaggcaggaattcagcaagctagacaagagggtgatttagaggcttggcagttccctgttagaatacaccccccagatcaacaggaaaatattacagctacatttgagccttttccttttaaattactcaaagaattaaaacaagctataaatcagtatggaccaggttctccttttgtaatgggactgttaaagaatgttactgtttctagtcagatgattcctactgacggggaccctcttactcgagcttgtctaactcctgctcagttcttacagtttaaaacttggtgggcagatgaagcttccattcaggctgctcgcaatgcctgggcccaacctcaaattaatataactgcagaccaacttttgggggttggcggctgggctggtttagatgcgcaattcgtcatgcaggatgatgccatagaacagcttagaggagtgtgcattagagctcgggaaaaaaatcacttaatgtggggaacaatacccttcctttag

SEQ ID NO: 3932 - DNA, 1079 bp, Homo sapiens
  SIMILAR (345)..(668): 371254mologous to Human endogenous retrovirus K gag protein,accession number Y17832,Smith-Waterman Score=224.
tttcagctctgaaggctgtgagtcccctgatttcccactccacactctatatttctgtgtgtgtgtctttaattcctctagcgccgctgggttagggtctccaagaccgagctggtgtcggcaagtggcgcccaacgtggggcttgaaccccagttgaagggtcgctggagttatggttggagaatgtggaactaagctggaggacacccgagtacccttaagcaatccccatggtgagtaagaaggggagctcggaaacatcagggtaacaatgggacaagtgtgggctctggtgcgttccaccttagaaccttttcacactaatgatgagaaggaaggaaagtataaggaagtaacagaagaagtaacagagcagaacagcttagaggagtgtgcattagagcttgggaaaaaagtcacttcgggtgaagaacaatacccttcctttagcattgtaaaacagggaccaagagaaccatacacggattttatagcttggttacaggagtctcttaaaaaggtgattgcagattcagctgctcaggatatagtgttgtggttattagctttcgacaatgctaatcccgattgccaggctgctctgcgacctatcagagggaaagcacatttagttgattatatcaaggcctgtgatggtatcagaggccctgctgggaggctcagctggctcagcctgcagggccggcctgccggggctgcccgctgtacgtcctcgagttccgactggaaggctcagctggccccagggccccatgcggggcctctccgctgtcccgccttcagggctcgccagcctcggctgcccgctgtcctgtctgcaggggctgccttccgggattgcccgctctcctgcgtgcaggccctgctgggaggctcagctggccccggggaccgcctgccggggcattacagtgcgctggtggcactcagtctgcctttcgtgaaggaggccacgatgaacaggtggagtcggaatcaccgttctgccttcttcctgttctcagcaaacgcacacggcgccgagggggtgctctctcacactgtggcttcccggtga

SEQ ID NO: 3933 - DNA, 633 bp, Homo sapiens
  SIMILAR (151)..(627): 341254mologous to Human endogenous retrovirus K gag protein,accession number Y10390,Smith-Waterman Score=244.
atgggacaactgtgggctctggttcattccatcttggaaccttttcacactgatgatgaggaggaaggagagtctaatgaagtaacagaagaagtaacagagcagatttgtttgccagctaaagctaaagcggcaaaggagggagaggtttatccctatccttctgcaccccctccttattttgaagaaaaagagtggcctgaccctccagatctttcttttctggaggatgctgggcaaaaagtgattgccccagtgactgttcaagcagcgcctcaagcgatcgctctcagttctattcaggcaggaattcagcaagctagaagagagggtgatttagaggcttggcagttccctattagaatacaccccccagatcaacagggaaatattatagctacatttgagccttttccttttaaattactcaaagaatctaaacaagctattaatcaatatggacaaggttctccttttgtaatggaactgttaaagaatgttgctgtttccagtcagatgattcctactgactgggatgctcttgctcaagcttgtctaactcttactcagttcttacaatttaaaaccttgtgggcagatgaagtttccattcaggctgcttgtaatgcctag

SEQ ID NO: 3934 - DNA, 825 bp, Homo sapiens
  SIMILAR (267)..(584): 341254mologous to Felis catus fibrinogen A-alpha chain,accession number AF095461,Smith-Waterman Score=105.
ctatataaagaattcttcttcatcttcttctttttcttcaccctgaacttgcagatgaaggagacattctgaaattgtcttcctggtaccaaggtccctttggccagcaagtggcaaaggagagactctttccttaaggacactgttgtttttggaggtagccacccccaaggaagaggctggcaagcagaatggtggctggctggtctgtaaatcccttggaaatccgccaaaataagtctgcctgggttcagaatttatgatggtcaagccggtgtcaacattcgtctcggcctcaagcttctgaaagctgttttcccggttgaggaccttcattctggccccggattcaaggtgatgagaagacaggtgcaggtgggcacccatagctgggctgctgacctggaatgaccggccagggcttttccacgaagtgccagcacacctgtctgatgtggggctcccactgggctcaggaagctccagagaatgcccctgggacctcttgccctggttcctctggctcctgggttctgaggtcctctttgcagagacagaagtcagcctggagcccaggggaagcatgccagctcccaagatgccattcttaacaccaagttctggattcagctgaaccctgcagttgactgcactctccctccacaggatggagttcactgacccccctttaagacttccacccttgggagccttgcatcctattccatgcacaacactcttcccaagaagatttctgcccacattttctgaacatgtgttcaggatgccacagaaacacatcggtctgtgaaatgggtgccccat

SEQ ID NO: 3935 - DNA, 516 bp, Homo sapiens
  SIMILAR (15)..(395): 481254mologous to Homo sapiens LRP16,accession number AF202922,Smith-Waterman Score=271.
agaagaaaaaggtgtggagagaggagaaagaacgtttattgaagatgaccttagaagagagacgcaaagaatacctaagagactatattcccctgaacagcattctatcatggaaggaggagatgaaggggcaagggccaaaatgatgaagaaaatactcaggaaacatcccaggtgaagaaaagtttgactgaaaaagtttctctctatagaggtgacatacataggtagatgctatagtcaatgccgcaaatgccagtcttcttggaggaggaggtgtggatggctgtattcatagagcagccggcccctgtttgctagctgaatgtcgtaacctgaatggctgtgatactggacatgcaaaaatcacatgtggctatgaccttcctgcaaaatgtgagtacaactgaatactgtttcaaaaccagatgagacatcttaacttgttttactccagtgtataactggaaaaggaaatggcagtggtggtatttaattaaatgtgcttaagttcag

SEQ ID NO: 3936 - DNA, 432 bp, Homo sapiens
  SIMILAR (113)..(367): 361254mologous to Homo sapiens Human N-methyl-D-aspartate receptor subunit encoded by clone NMDA24,accession number W87504,Smith-Waterman Score=106.
acatcagtacggcctgcttggttcgagggcgaccggctgaccgagagcgtgagcctcaaggagaagtcgttagatgcttcacaatctgaggccacggactctgactacgaggacgcgctgcccaagcactccttcgtgaaccactacatgagcgaccccacctactacaactcatggaagcgcagggcccagggccgcgcacctgcgccgcacaggtacgaggcggtggcgggctccgaggcgggcgcgcagctgcacccggtcatcaccacgcagagcgcgggcggcgtctacacccccgctggccccggcgcgcgaactccgctcaccggcttctcctccttcgtgtgagcaaagcgccgcgcctccctcagggcggaacggaggcaactttccggagtctatttttgttaagacaatcaactccaatag

SEQ ID NO: 3937 - DNA, 897 bp, Homo sapiens
  SIMILAR (289)..(576): 271254mologous to Trichoplusia ni insect intestinal mucin IIM14,accession number AF000605,Smith-Waterman Score=86.
atggggtgggtacggcatgaggacagggccacggactctgactacgaggacgcgctgcccaagcactccttcgtgaaccactacatgagcgaccccacctactacaactcatggaagcgcagggcccagggcgcgcacctgcgccgcacagagaaccagcggctcacacccttctcaacgcaggacatcctcggcggctcctggggtttgaagagcaaacgtttttccctgggctcactagatgaaaagagtatgaactactttggaaaacttaacagctcagagatggccatgcctccagcccctcacgtcatctttgcaacagacgactgggctgccatggtccacccctcagcccgggtcccgggtctggatggaacgggagcactgctggtgcccactggcgtgtgtgccccgggtccctgtaagtgccccctcaccagcagcagcgtgacacacacaagactcaagaccaccctgtcagtgccccccagtgcacggcaaacgggcaggtgccgttcccccagtgacctgaggtgtagctatcctcctgacgagcaacccgtctgcgtacctaagtgtggctccccgtgggtcagcgtcctggtagcatggatccagtctgaaagtgccgtgctggacccccggcacccccaacacccttacctttatcctgttgacatgcagaacctgctcacgaacctgggggagcccccacaggctcgagctctggcagcaaagctcctgggaaggccctccagctctcagagtggcagccgcgtccctgctgtgtgggctcaggcgggaaatgctacctacatcacggtgcacacgctctgcagccacaacacacacatgtccccagtgcgagtgaaaagattcacccacctgggctga

SEQ ID NO: 3938 - DNA, 615 bp, Homo sapiens
  SIMILAR (478)..(549): 581254mologous to Homo sapiens transcription factor AML2,accession number AF022726,Smith-Waterman Score=67.
ttttttttttttttttttaaggaacaaaataatggtttttattaaaaattgtacccatacgcacctctctgtcttcctacaaggttgtttctttttttcttttaatgagatctgtttttctgcacaatttcagaaaaagttgtagggaacgtttagggacctgacggctccctaaaccagaaggtgacgcgggaaggagacgtgtcccagctgggcagggctcagctcatgagtttccacgttgtcctcacctttcagactggatccatgctaccaggggcgctgacccacagggaggccacacttagggtacgcaaaccgggttgcctcgtcagggaggataagctacacttgtgtgccaagaattgcgtaagaaataaaaaccatgctacggaaccatttagggcaaacattcatgctttcagcccagtcacagttagatacaaacacggcctccgaagacctgtacagattgagccacctcccgggggctgtggaggcgcgttccgtgtgtggcatctggggtcccctctccctggggcccctcgtttttttggctgcagcattgagtgaagtgcgccttataaaagcaggccgggagagaggctgaagggg

SEQ ID NO: 3939 - DNA, 939 bp, Homo sapiens
  SIMILAR (91)..(216): 971254mologous to Mus musculus NSD1 protein,accession number AF064553,Smith-Waterman Score=217.
atggcaatcaaaaccaacatcaccaggacttctagtctggaagggtatggatccccctgggtgttcagcataaaagacacagcaacagaagctgtgcggtcagagaagaaacgccttaggaagccaagcaagtggcttttggaatatacagaagaatatgatcagatatttgctcctaagaaaaaacaaaagaaggtacaggagcaggtgcacaaggcttgtgtcaaaacactcccacgttcttccagaatttctatgcgggactctgaatgtgttcaagaagaagagagtactggatgcacattccctatcaggagtctctacagagtctcccacccagttacgacatattgcggtacccttaatcatcgtttctggaagatgctttctctgaccgatgagttacgcccccggatcatgactgccactggccgtccacacacgccgatgatggaacgacaattcagatattttgttgggacacagcaaactacatcagtggtcaagcatggcctcaggctgggacaggactgcccaaccaggacagccttcatggaggccatcgggattgcccccgtctgcccccagggagtggtggctgaaaatgcatatgcggtcagagggggtgtcctctcgtgtactctcgtcctcatgtcgtgccgctaccgctcccggggtttatttcttatgtgtcgactgtatcctggttgtagtggtgcgcagccactgactgggccgtcatgggatgtgtgtgttggtcggatgctggtcttcagggtgtcagggtgtcaccatgcacttcagcgtgttgtgcacaatgcgctggtgaggtcgcagtgtagcgcaagtgatgctgtgggctgccacatggtgaacaccaatgctgcacttgggttgcaacgcagattgccaggtcgcctgcaagcttgccacaagtga

SEQ ID NO: 3940 - DNA, 3934 bp, Homo sapiens
  SIMILAR (1727)..(3307): 991254mologous to Homo sapiens fibroblast growth factor receptor 4,accession number L03840,Smith-Waterman Score=2748.
ggcacgagaaaagagacgggctgtttctatgtagcaggatcggcccagcttcgggaaaatggagttttcagaggctcatcgaggccattttttcatctccagtcgggggaactttttctgcccatggaagtgcagcagaaaggcatagaggccactaggccttgaagtggctgccattttaaagagtcgagtcagatggcctattaactcagattaattgctgtgcttttggattccaggttgatgccggcccaggatggatcagacctgtgaactacccagaagaaattgtctgctgcccttttccaatccagtgaatttagatgcccctgaagacaaggacagccctttcggtaatggtcaatccaatttttctgagccacttaatgggtgtactatgcagttatcgactgtcagtggaacatcccaaaatgcttatggacaagattctccatcttgttacattccactgcggagactacaggatttggcctccatgatcaatgtagagtatttaaatgggtctgctgatggatcagaatcctttcaagaccctgaaaaaagtgattcaagagctcagacgccaattgtttgcacttccttgagtcctggtggtcctacagcacttgctatgaaacaggaaccctcttgtaataactcccctgaactccaggtaaaagtaacaaagactatcaagaatggctttctgcactttgagaattttacttgtgtggacgatgcagatgtagattctgaaatggacccagaacagccagtcacagaggatgagagtatagaggagatctttgaggaaactcagaccaatgccacctgcaattatgagactaaatcagagaatggtgtaaaagtggccatgggaagtgaacaagacagcacaccagagagtagacacggtgcagtcaaatcgccattcttgccattagctcctcagactgaaacacagaaaaataagcaaagaaatgaagtggacggcagcaatgaaaaagcagcccttctcccagcccccttttcactaggagacacaaacattacaatagaagagcaattaaactcaataaatttatcttttcaggatgatccagattccagtaccagtacattaggaaacatgctagaattacctggaacttcatcatcatctacttcacaggaattgccatttgctaaactgatgcctggtaccgagctgattgaccgtacttctcgttaccggcgaggagcgctcgggctgtctgttgaccctgccgcgtgcaggggtcgcggccggctggagctgggagtgaggcggcggaggagccaggtgaggatggagccaggaaggcagttggtgggaagtccagcttgggtccctgagagctgtgagaaggagatgcggctgctgctggccctgttgggggtcctgctgagtgtgcctgggcctccagtcttgtccctggaggcctctgaggaagtggagcgttgcctggagcagcaagagcaggagctgacagtagcccttgggcagcctgtgcggctgtgctgtgggcgggctgagcgtggtggccactggtacaaggagggcagtcgcctggcacctgctggccgtgtacggggctggaggggccgcctagagattgccagcttcctacctgaggatgctggccgctacctctgcctggcacgaggctccatgatcgtcctgcagaatctcaccttgattacaggtgcaccctactggacacacccccagcgcatggagaagaaactgcatgcagtacctgcggggaacaccgtcaagttccgctgtccagctgcaggcaaccccacgcccaccatccgctggcttaaggatggacaggcctttcatggggagaaccgcattggaggcattcggctgcgccatcagcactggagtctcgtgatggagagcgtggtgccctcggaccgcggcacatacacctgcctggtagagaacgctgtgggcagcatccgttataactacctgctagatgtgctggagcggtccccgcaccggcccatcctgcaggccgggctcccggccaacaccacagccgtggtgggcagcgacgtggagctgctgtgcaaggtgtacagcgatgcccagccccacatccagtggctgaagcacatcgtcatcaacggcagcagcttcggagccgacggtttcccctatgtgcaagtcctaaagactgcagacatcaatagctcagaggtggaggtcctgtacctgcggaacgtgtcagccgaggacgcaggcgagtacacctgcctcgcaggcaattccatcggcctctcctaccagtctgcctggctcacggtgctgccagaggaggaccccacatggaccgcagcagcgcccgaggccaggtatacggacatcatcctgtacgcgtcgggctccctggccttggctgtgctcctgctgctggccaggctgtatcgagggcaggcgctccacggccggcacccccgcccgcccgccactgtgcagaagctctcccgcttccctctggcccgacagttctccctggagtcaggctcttccggcaagtcaagctcatccctggtacgaggcgtgcgtctctcctccagcggccccgccttgctcgccggcctcgtgagtctagatctacctctcgacccactatgggagttcccccgggacaggctggtgcttgggaagcccctaggcgagggctgctttggccaggtagtacgtgcagaggcctttggcatggaccctgcccggcctgaccaagccagcactgtggccgtcaagatgctcaaagacaacgcctctgacaaggacctggccgacctggtctcggagatggaggtgatgaagctgatcggccgacacaagaacatcatcaacctgcttggtgtctgcacccaggaagggcccctgtacgtgatcgtggagtgcgccgccaagggaaacctgcgggagttcctgcgggcccggcgccccccaggccccgacctcagccccgacggtcctcggagcagtgaggggccgctctccttcccagtcctggtctcctgcgcctaccaggtggcccgaggcatgcagtatctggagtcccggaagtgtatccaccgggacctggctgcccgcaatgtgctggtgactgaggacaatgtgatgaagattgctgactttgggctggcccgcggcgtccaccacattgactactataagaaaaccagcaacggccgcctgcctgtgaagtggatggcgcccgaggccttgtttgaccgggtgtacacacaccagagtgacgtacctgtcagcaagcagttcatccccagctgccaatctccttttggccctcagtcttccagaggagctgggagggtctgcatccggcacttgcagacatgtgctaagggcctgttgacttgggagcctccatcactggactgtgggccttggagagcaaaaggcccttccacaaaggcattcttgccccattttccagatgtggacactgaggctctgaaggtggaagtgactggcccagggtcacagggggggaaacagaaaccgccatcatttcctgggtctccttgcacggcccccatcgcatgctgtgtggccctcaatccagttcagctgttaccagtcttgctcctccccgcaaaatccccacccaggtacgggctgatgcgtgagtgctggcacgcagcgccctcccagaggcctaccttcaagcagctggtggaggcgctggacaaggtcctgctggccgtctctgaggagtacctcgacctccgcctgaccttcggaccctattccccctctggtggggacgccagcagcacctgctcctccagcgattctgtcttcagccacgaccccctgccattgggatccagctccttccccttcgggtctggggtgcagacatga

SEQ ID NO: 3941 - DNA, 4286 bp, Homo sapiens
  SIMILAR (3501)..(4286): 841254mologous to Mus musculus NSD1 protein,accession number AF064553,Smith-Waterman Score=1133.
  misc_feature (1)...(4286): n = a,t,c or g
caatcacgcggatgcggagtttgtagggggggcctgttctaaggacaggagtcgcgcttgcgaaccaagggaaaggaggggtcaccccctccccccagctggcccggaagggggcgcggggcacggttgatgccggcccaggatggatcagacctgtgaactacccagaagaaattgtctgctgcccttttccaatccagtgaatttagatgcccctgaagacaaggacagccctttcggatgatccagattccagtaccagtacattaggaaacatgctagaattacctggaacttcatcatcatctacttcacaggaattgccattttgtcaacctaagaaaaagtctacgccactgaagtatgaagttggagatctcatctgggcaaaattcaagagacgcccatggtggccctgcaggatttgttctgatccgttgattaacacacattcaaaaatgaaagtttccaaccggaggccctatcggcagtactacgtggaggcttttggagatccttctgagagagcctgggtggctggaaaagcaatcgtcatgtttgaaggcagacatcaattcgaagagctacctgtccttaggagaagagggaaacagaaagaaaaaggatataggcataaggttcctcagaaaattttgagtaaatgggaagccagtgttggacttgcagaacagtatgatgttcccaaggggtcaaagaaccgaaaatgtattcctggttcaatccaagttggacagtgaagaagatatgccatttgaagactgcacaaatgatcctgagtcagaacatgacctgttgcttaatggctgtttgaaatcactggcttttgattctgaacattctgcagatgagaaggaaaagccttgcgcttaaatctcgagccagaaagagctctgataatccaaaaaggacttagttgtgaaaaagggccacatacaattttgaagcacattaaagatgaacggaggggaaagattcccagagaaccttgggcctaaactttatctctggggatatatctgatacgcaggccctctaatgaacttttccaggatagccaatagcctcacaggggtccaacactgccccaggaagttttctgttttcttcctgtggaaccacacgctgcaaagaaagaatttgaaacttcaaaaagtgactctttattgggcttgcctgagggtgctttgatctcaaagtgttctcgagagaagaataaacaccaacgaagcctggtgtgtggttcaaaagtgaagctctgctatattggagcaggtgatgaggaaaagcgaagtgattccattagtatctgtaccacttctgatgatggaagcagtgacctggattcccatagaaccaccagctcagagtctgataaccagtgtccttggaaattcccagatgcttttcggataggaccagnggaccatgttatctatgcaggaaaattgaaaagattaaagtattcttaggtttgctgccacaaacactaggggtaaaagcaaaacagaagcctctcattagtaactcacatacagaccacttaatgggttgtactaagagtgcagagcctggaaccgagacgtctcaggttaatctctctgatctgaaggcatctactcttgttcacaaaccccagtcagattttacaaatgatgctctctctccaaaattcaacctgtcatcaagcatatccagtgagaactcgttaataaagggtggggcagcaaatcaagctctattacattcgaaaagcaaacagcccaagttccgaagtataaagtgcaaacacaaagaaaatccagttatggcagaacccccagttataaatgaggagtgcagtttgaaatgctgctcttctgataccaaaggctctcctttggccagcatttctaaaagtgggaaagtggatggtctaaaactactgaacaatatgcatgagaaaaccagggattcaagtgacatagaaacagcagtggtgaaacatgttttatccgagttgaaggaactctcttacagatccttaggtgaggatgtcagtgactctggaacatcaaagccatcaaaaccattacttttctcttctgcttctagtcagaatcacatacctattgaaccagactacaaattcagtacattgctaatgatgttgaaagatatgcatgatagtaagacgaaggagcagcggttgatgacttgcttcaaaacctggggtctcttacccggagtcctggtcgtggggactgttctactaatagtcctgtaggagtctctaaggttttggtttcaggaggctccacacacaattcagagaaaaagggagatggcactcagaactccgccaatcctagccctagtgggggtgactctgcattatctggcgagttgtctgcttccctacctggcttactgtccgacaagagagacctccctgcttctggtaaaagtcgttcagactgtgttactaggcgcaactgtggacgatcaaagccttcatccaaattgcgagatgctttttcagcccaaatggtaaagaacacagtgaaccgtaaagccttaaagaccgagcgcaaaagaaaactgaatcagcttccaagtgtgactcttgatgctgtactgcagggagaccgagaacgtggaggttcattgagaggtggggcagaagatcctagtaaagaggatccccttcagataatgggccacttaacaagtgaagatggtgaccatttttctgatgtgcatttcgatagcaaggttaagcaatctgatcctggtaaaatttctgaaaaaggactctcttttgaaaacgggaaaaggccccagagctggactctgtaatgagcagtgagaatgatgaactcaatggtgtaaatcaagtggtgcctaaaaagcggtggcagcgtttaaaccaaaggcgcactaaacctcgtaagcgcatgaacagatttaaagagaaagaaaactctgagtgtgcctttagggtcttacttcctagtgaccctgtgcaggaggggcgggatgagtttccagagcatagaactccttcagcaagcatacttgaggaaccactgacagagcaaaatcatgctgactgcttagattcagctgggccacggttaaatgtttgtgataaatccagtgccagcattggtgacatggaaaaggagccaggaattcccagtttgacaccacaggctgagctccctgaaccagcaaaaagcgagaagacgagcgcaccaccacgcaaggcaaaagagcacacgaagggcagcaggagtctgttgtttgttcgtgtggttttgtggtgtcgaatgtacgttaggttgtgtgtccgttgttctgggcgtcttcctttgtatgcgtcctacgtttttgctcagctgatgaggcacccacttattgagctttttcacttttccaatttgcttcaaatgctgaacgaccgtagaatggtcgacgttgagctcttcgacaacttcttggctgtgcggtcagagaagaaacgccttaggaagccaagcaagtggcttttggaatatacagaagaatatgatcagatatttgctcctaagaaaaaacaaaagaaggtacaggagcaggtgcacaaggtaagttcccgctgtgaagaggaaagccttctagcccgaggtcgatctagtgctcagaacaagcaggtggacgagaattctttgatttcaaccaaagaagagcctccagttcttgaaagggaggctccgtttttggagggccccttggctcagtcagaacttggaggtggacatgctgagttgccgcagctgaccttgtctgtgcctgtggctccggaagtctctccacggcctgcccttgagtctgaggaattgctagttaaaacgccaggaaattatgaaagtaaacgtcaaagaaaaccaactaagaaacttcttgaatccaatgatttagaccctggatttatgcccaagaagggggaccttggcctttctaaaaagtgctatgaagctggtcacctggagaatggcataactgaatcttgtgccacatcttattcaaaagattttggtggaggcactaccaagatatttgacaagccaaggaagcgaaaacgacagaggcatgctgcagccaagatgcagtgtaaaaaagtgaaaaatgatgactcgtcaaaagagattccaggctcagagggagaactaatgcctcacaggacggccacaagccccaaggagactgttgaggaaggtgtagaacacgatcccgggatgcctgcc

SEQ ID NO: 3942 - DNA, 433 bp, Homo sapiens
cttgaggaattcggcacgagtgaagctgtgtaatttgtaatggaaaggggtttaggtggctcacaaatcttcatgctttacaaggaacacggtaccagcatttgcttctggtaaaaggctcagactgcttccacttgtggtggaaggtgaaagggagctgatatgcacagagatcatgtagcaaaaaataggacacgagagagagggaagtaccagtctctttttaacagcaggatctcgaggatatttttatggaaattaatacagaactcaatcattaccgtgaggatggcaccaagacattcataagggatctgcccccatgatcctcacgcttcctcttaggcccacctccatcattgtgaatcagatgtcaacgtgctttctaaactatagtagactccatccagtacattaatagttcagcacttca

SEQ ID NO: 3943 - DNA, 483 bp, Homo sapiens
  SIMILAR (185)..(463): 341254mologous to Homo sapiens Human SREBP-1c protein,accession number Y50701,Smith-Waterman Score=112.
atgaaaaatcctcaagaacacagacagtcccttcacagaccagattatgctcctaaggaaggtgtgagtgaaggaactgtggcacagcccgctctcaacacgaacctctcggatcttggctacaagacaccccacaacccccatagacgttggaattggcaggcaatctacctggagactctaaccagggccagggaaagagcagggtatgtttgtttgccaccccatccgccagcctctcccaaggcccctgcctggcagctcccaccagagcatgcccacagcacaacctccgctgagcagttcaagtgctttgctgccagccctacctgcaggctttccagtgacccagggacagtggacaaagctgcaggttcaggccccagctccctttcaccttccaccacaagtggaagcagtctgagccttttaccagaagcaaatgctggtaccgtgttccttgtaaagcatgaagatttgtga

SEQ ID NO: 3944 - DNA, 397 bp, Homo sapiens
  SIMILAR (1)..(270): 811254mologous to Mus musculus Pro-Pol-dUTPase polyprotein,accession number Y12713,Smith-Waterman Score=409.
aaatggcagaggtttgtcctcactggaatagacacttattccagatatgagtttgcctatcccgcatgccatgcttctaccaagactaccatccatggactcatggaattcctcatccaccatcatggtattccacacagcattgcctctgaccaaggcactcaccttatggctaaagaagtgcggcagtgggctcatgctcatggaattcactggtcttaccatgttccccatcatcctgaagtagctggattgatagaacggtggaatgaatggccttttgaagtcacaattacaacaccaactagtcaacaggctaagaagggagttacagtgttggctggggtgattgacccggactatcacaatgaaatcagtctactactccacaatggag

SEQ ID NO: 3945 - DNA, 1719 bp, Homo sapiens
  SIMILAR (4)..(687): 751254mologous to Mus musculus Pro-Pol-dUTPase polyprotein,accession number Y12713,Smith-Waterman Score=891.
atgtactccagatatgagtttgcctgtcctgcacacaatgcttctgccaagactaccatccatggactcacagaatgcccggtccactgtcatggtatcccacacagcattgcctctgaccaaggcactcactttgtggccaaagaagtgtggcagtgggctcatgctcatggaattcactggtcttaccatgttccccatcatcctgaagcagctggattgacagaatggcagaatggccttttgaagtcacaattaaaatgccaactaggtgacaatactttgcagggctggggcaaagtcctctggaaggctgtgtatgctctgaatcggcgtcctatatatggtactgtttctcccatagccaagattcactggtccaggaatcaaggggtggaagtcgaagtggcagcactcaccatcacccttagtgatccaccagcaaaatttttgcttcctggtaccgcgacattatgttctgctcgcctagaggtcttagttccagagggaggaatgctgccaccaggaaacacaacaataattccattaaactggatgttaagattgccacctggacactttgggctcctcctacctttaagtcaacaggctaagaagggagttacagtgttagctggggtgactgacccagactatcaagatgaaatcagtctactgctccacaatgaagtcaaaacagtgagaaatgtgaaggaggggcttaggcaaaagccagccttgacggcctggggcatcttattggcatttgaattggggaccgagccactcacagacatcaaggaggatgccgtaaagagtcacagaggccgcagccttgacaagcggccgctacagtcatttattcagtacagatataaagacaaaggccttgaggcaacacactttgccatccagtacaacaagagtcgtaaagccaaggagcttccgttcatcacagaggaaatggattatgaaatgtttagtgttgatggatgggatgatctgcaagcctacgtttttatggctttgggacagacaaggaccctgtctttagttgaactaagggactctctggaagagaatatcctccttcacactttgatggaccaaatttcagggggagtggcagagctctgcacttgggacagaggtgtcctcaaggaatgcactaggttagcaagagaaagggccttgattatctaccatagctgtagacctgtaagacttcaatggcaccagggctccatcggaggcataaagctcctctttgtcttgctcacgctccacttgtctgcatatttcattcttcctggactcaggacaagaccttggtacctgctgaatggcaaggctaaaagctgtaatagaaacagggctgaaacatgccccttgcttgccacgttgtgggtgaagagaaggagagaaaagctgtggcccttcagggagcccagctctgggagctccctgagccagggcagtgactccctatttggggccctgaagttcctgacatctccaagcttccaggagctactgcattcgctggtgccagctggagaagctgtttgcagtcctcctggtccagctgtagcctcacagagagccagcacccacactggcacctggaactgcctgccccgcagcagcagcagccagtgtgtcttgctgtgcacactggccagaccccacactcactcacactcaccactccacgcctga

SEQ ID NO: 3946 - DNA, 1632 bp, Homo sapiens
  SIMILAR (829)..(1629): 1001254mologous to Homo sapiens calcium-dependent chloride channel-1,accession number AF039400,Smith-Waterman Score=1413.
atgtcttctgtgttgctccggctcatttatcaactgacccaaaagactgccagttttgaggggggtccagaacagaaggctctgcaacaaatccaggctgctgtgcaagctgctctgccacttgggccatatgacccagcaaatccaatggtgcttgaggtgtcagtggcagatagggatactgtttggagcctttggcaggtccccataggtgaatcacagctaggattttggagcaaggccctgccatcttctgcagataactactctccttttgagagacagctcttggcctgttactgggctttggtggaaactgaatatttgactatgggtcatgaagtcaccatgctccctgaactgcctatcatgacctgggtgctttctgatccatctagttataaacctgcaccaatggcctcatggggagttccctatggtcaacttacagaggaagagaagactagggcctggttcacagatggttctgcaagatacacagaaaccacccgaaagtggacagctgtagcaatacagcccctctctaggacatccttgaaagacagcaatgaagggaaatcttcccatcaacaggctaagaatggaattacagtgttggctggggtgattgacccggactatcaagatgaaattagtctactactccacaatggaggtgtcatcctgggagcagtgtgtggagggcttcttcgcttggcatctcccatccaccctgatgtggttatgttaatagccttcccaggggatatactcatgaggatgctaagaatgctcattctccctctaatcatctccagcttaatcacaggtgctgatgctactaaggatgacggtgtctactcaaggtatttcacaacttatgacacgaatggtagatacagtgtaaaagtgcgggctctgggaggagttaacgcagccagacggagagtgataccccagcagagtggagcactgtacatacctggctggattgagaatgatgaaatacaatggaatccaccaagacctgaaattaataaggatgatgttcaacacaagcaagtgtgtttcagcagaacatcctcgggaggctcatttgtggcttctgatgtcccaaatgctcccatacctgatctcttcccacctggccaaatcaccgacctgaaggcggaaattcacgggggcagtctcattaatctgacttggacagctcctggggatgattatgaccatggaacagctcacaagtatatcattcgaataagtacaagtattcttgatctcagagacaagttcaatgaatctcttcaagtgaatactactgctctcatcccaaaggaagccaactctgaggaagtctttttgtttaaaccagaaaacattacttttgaaaatggcacagatcttttcattgctattcaggctgttgataaggtcgatctgaaatcagaaatatccaacattgcacgagtatctttgtttattcctccacagactccgccagagacacctagtcctgatgaaacgtctgctccttgtcctaatattcatatcaacagcaccattcctggcattcacattttaaaaattatgtggaagtggataggagaactgcagctgtcaatagcctag

SEQ ID NO: 3947 - DNA, 387 bp, Homo sapiens
  SIMILAR (142)..(249): 631254mologous to Mus musculus Pro-Pol-dUTPase polyprotein,accession number Y12713,Smith-Waterman Score=123.
atgtggccgcagtggctattggcattcatctgtggccacgaaaataaccagactcaggatgctgaggccacgagagggaagaaagctgccaccaggagacataatgattccattgaactgaaagttaagattgccgccaggctcatcctacttttaagtcaccaggctaagaagggagttacaatgttggctggggtgactgacccagactatcaagatgaaatcagtctactactccacaatggaggaacagggaagtctccacatatttcggataccttttatgggagcaaggttgcctcatgccaaaacacaggaccagaaaagcaggatgagacacaagcacaggaaactgctgtctacaagagccaaatatttggatcctag

SEQ ID NO: 3948 - DNA, 1274 bp, Homo sapiens
  SIMILAR (3)..(299): 771254mologous to Mus musculus Pro-Pol-dUTPase polyprotein,accession number Y12713,Smith-Waterman Score=408.
agcagaggtttgtcctcactggaatagacacctactctggatatgagtttgcctctcctgcacgcaatgcttctgccaagactaccacccgtggactcgcggaaggccttatccatcatcatgctactccacacagcattgcctctgaacaaggcactcactttacggcaaaagcagtgcggcagtgggctcatgctcatggaattcactattcttaccatgttccccatcatcttgaagcagctggattgacagaatggtggaatgtccttttgaagtcacaattacaacgccaactagccaggattcacaggtccaggaatccaggggtaaaagtggaaatggcatcactcaccatcacccctagtgatccactagaaacatttttgcttcctgtccccatgacattacgttctgctggcctagtggtattagttccagagagacgaacgctgccaccaggagacacaacaatgattccattaaactggaagttaagattgccacttggacactttgggctcctcctacctttaagtcaacaggctaaggagggagttacagtgttggctggggtgactgacccagactatcaagatgaaatcagtctactactccacaatggaggtagaggcaactctaatggtttccatttggcctgtcccaccataatagccctcaccccaccagtcagggagccattgtgggggctctgccagctgttaagtatgtctatgccaattaatgcattctggcactggggaaatgaccacaggatgagtccggggacccactggaccgactcaccagacccgcggacaccgagcggcgacgcgggccaccggctgtgggcggaccctgcgggctgggcctggcgcagaccagtgcgggccgactggaaccggggctcgcgtccagctggcggaggactgggggatcccgaaggcctgagagtaattaacatggaaaaagataaacacagtcatttctacaaccaaaaaagtgacttcagaattgagcatagtatgctagaagaattggaaaatagattgattcacagcaggaaaacagaaaacattccaaaacagagcatccaacgcaacatgtctgccatggaatgcttctgcaacacggacaagagggccacgactgagggctccaacatggctttgaagatgctgcgccagaatagcatcactcaagtctctatttatgaggtggatgagaaagattgtcgcaaatattgcactactggcatcgatggagagccatga

SEQ ID NO: 3949 - DNA, 428 bp, Homo sapiens
  SIMILAR (21)..(161): 311254mologous to Homo sapiens Human secreted protein, SEQ ID NO: 4197,accession number G00116,Smith-Waterman Score=63.
ctggacttggccgcagacagccggcagggtcgtggccagaacgccggccgggaccatctgcacaggcgctcgacagctccaagacgctgcggccaagcagaaagttgaacagaacgcggctcccagccacaccaagttcagggacaaggaagatggggagtatgcatgaaaatcccttctcatagcggaaagtccccagatgtgtctgaagtcagcaagtcaagaaacagcatcataagcacagcagtcacacatgcggtggtggcaccagaaggactgaaaaggaatggtgggggcagccacttaagaagcagcagggggcacagagctgttattttttaaccatgtgttgtatttctttgatttttaaaaagtcgagacaattttaaataaaatctttcttctaattgcaaaaaaaaaaaaaaaaa

SEQ ID NO: 3950 - DNA, 449 bp, Homo sapiens
  SIMILAR (5)..(169): 381254mologous to Oryza sativa putative cinnamoyl-CoA reductase,accession number AC026758,Smith-Waterman Score=82.
tcagtgtggtggaattcgtcaattcaagtcatgcaggctgtgagaaacgcggggtcgcggatcctgcggtcctggacttggccccagacagccggcagggtcgtggccagaacgccggccgggaccatctgcacaggcgctcgacagctccaagacgctgcggccaagcagaaagttgaacagaacgcggctcccagccacaccaagttcagagtccagatattgtctatggttgatgaaataagaaacagaggtttgactgtattttttaaattgtgggaagaggaacctacaaaggatctgaaaataatgaacacgggtatacctgcagggacaaggaagatggggagtatgcatgaaaatcccttctcatagcggaaagtccccagatgtgtctgaagtcagcaagtcaagaaacagcatcataagcacagcagtcacacatgcgg

SEQ ID NO: 3951 - DNA, 599 bp, Homo sapiens
  SIMILAR (91)..(357): 341254mologous to Gallus gallus bHLH transcription factor,accession number AJ292363,Smith-Waterman Score=87.
tttcgtgcagctgtgactgtcgctgtagacggaaactgactggggtcaattcaagtcatgcaggctgtgagaaacgcggggtcgcggttcctgcggtcctggacttggccccagacagccgggtaacaaatgactgccccctcgagcccaccgccacctccaggactatgctcctactcgtgtcccttgagccaccctttctcccagtgaccgttaggccgtggccctcaccgagcttttcttcccagcagggtcgtggccagaacgccggccgggaccatctgcacaggcgctcgacagctccaagacgctgcggccaagcagaaagttgaacagaacgcggctcccagccacaccaagttcaggtgagccccacttggaccagccctctggagacccgcaacccctgactcttgcccgacaccctccagagtcagaaccagtgaattttcagctatgtcacttgctatccgtgggaccttatgcaaataaatctgagcctcagccttctcatctaaaaatgcggataatgctgagagaggttgtgagaatcacatgagccgtggtacagagtaaatgctcagtgaacattcgttaaa

SEQ ID NO: 3952 - DNA, 581 bp, Homo sapiens
  SIMILAR (343)..(2): 491254mologous to Homo sapiens P2ECSL,accession number AF205435,Smith-Waterman Score=211.
  misc_feature (1)...(581): n = a,t,c or g
gctgccaactttgctggggcagtatccaaacatcctggtctccaaacttctctctgactaacaggacaaggttcccgttatagcttcttgttcagggatgttcgggtcattcttttcaatcagcttctgttattgcggagctccaagttttgaactgtagaaatttctgcctcccaaatatcttccaaaatcttgcgccagcaatatatcctgttcattcttcttcatcatgaagggtcagctttcttctttgccagtcgctggttttcatccagnggcacgaagctcgtggtctgaatacagggcttctctctatctcaatctgctgcagtagagacgccatctcttcctgcaatggggtcaacgggcttggagactacaggtggccgctgcaggcacaacgcgcccaacaagcgccatggggatccgttgcagtgagggtgcggctgcaagagccacggctgcgagagcttagactgccggcccagagcctctcgaaccgccgccaaccccccgccacccctaacagcgtccgccttacgggcgccgccatctttcgttctcccacaatgcacacgaaa

SEQ ID NO: 3953 - DNA, 2035 bp, Homo sapiens
  SIMILAR (911)..(976): 1001254mologous to Homo sapiens unnamed protein product,accession number AK026165,Smith-Waterman Score=121.
  misc_feature (1)...(2035): n = a,t,c or g
gtcgccgcggctagggaggaagaccacttgctcttcgtttctttctggaagaaagcccctcaccacccagctgccggtactttgcttccccccaggagccgcagtgcaagtagcagcgcagtgcgggggagggggtggggtttgaggaagctgtttgtgaagtgccccttgaatacttgcctctctgaggccatcagtcctgtccgggtccgtagtcctggcatggtccgccgggtgcaaacacagtcgccgcggctgccgggccagaggagaacagctgctttaaagctgagaccaacccacgggtggcctgtcagggccacggatgttcatgacgtcatcctgaaggcgagcggagaaagcgagtggagaggggggagccgcgcttcacatcaaatgtcccctgtggccatggcaacagctttgggggagggggtgccggtccgcgggccagcagcgggcagcctgcgactcctgccagggtccagcgctccgctgggtagagacgccatctcttcctgcaatggggtcaacggcttggagactacaggtggccgctgcaggcacaacgcgcccaacaagcgccatggggatccgttgcttgagggtgcggctgcaagagccaggctgcgagagcttagactgccggcccagagcctctcgaaccgccgccaaccccccgccacccctaacagcgtccgccttacgggcgccgccatctttcgttctcccacaatgcaccgcggctcccagggatccctcagccgcgggagcggcaaactaggggaaagctcagtcccggaactgctagaacgaaccattcgcatatggagggggcactcatggtaccggcgccggcgcagctgtgactgtcgctgcagacggaaactgactggggtcaattcaagtcatgcaggctgtgagaaacgcggggtcgcggttcctgcggtcctggacttggccccagacagccgggccgtggccctcaccgagcttttcttcccagcagggtcgtggccagaacgccggccgggaccatctgcacaggcgctcgacagctccaagacgctgcggccaagcagaaagttgaacagaacgcggctcccagccacaccaagttcagcatttaccctcccattccaggagaggagagctctctgaggtgggcaggaaagaaatttgaggagatcccaattgcacacattaaagcatcccacaacaacacacagatccagggtagtcttttgttagttaattgaggcccctttgccttttgctttcctgtgggcacagaaggggattttcgggaattgccaaggaaggggcacagggcttcgcaggcacaggacaagcagggcatagccgcagcggccgagagcttaaacaaaaggggcgtgattcacatcccgagtttgtggttgaaagggcctggggccaggacgctttgttctgcccatgcacggacctgatcatgggccggccttgaaagtaatcttcaatcacagacaacacccacccaatcccaacaccaaacggctgccgccccaggaaggctcggaaagctgtgatgggaaggaggcctgcacttggacctgacctcaagcctcagctccagtgggaccttgtaaaatgctccctgtcagagctctccagaatatgcttgttggagatccttcagggagtaacgggagagttttgcctccttacacacgtggcctttgcttgcaccctccagctggagatggcgtgtgcctccagaagtcaagctttgcatcttctttacaagagggggagctacaggggcagccgtgggcttaggccccaaactctgctctgagaaaataaatatctgtaccacctgtnnnnnnnnnnnnnnnnnggggggcccgttttaaagaaaccagttttacgaccccggcctggcaacccaatattttttttatgggggccccaaagatcatttgcgggcccgggttttaaaaccgcctggacgggaaaaaccctggggttacccaattaaatcgcttttgagaaa

SEQ ID NO: 3954 - DNA, 741 bp, Homo sapiens
  SIMILAR (589)..(657): 501254mologous to Homo sapiens Human Protease and associated protein-19 (PPRG-19),accession number Y70025,Smith-Waterman Score= 65.
atgactaaaaggggccatggtacagcttgggctgtggcttcaaaaagtgcaagcccaaagccttggcagcttccacatagtgttgagcctgtgggcacagagaagtcaagaattgaggtttgggaacctctgcctagatttcagaggatgtatggaaacacttggatgtcaggcagcagtttgctacagggaaaccaaaatcttcatgctgaaagatactgcaattctactttagaaagaaatgatacgccaatagaaagcttaaaaccaaaaagggagagtgaagatggactaggagaacacaatggaagtacaatggaagaagtgggtgcagaaactagggtgcagcgccactgggttagggtctccatgactgagctggccttggcaagtgatgcccatatgtggggctcaaacccaggtcaaagggtcaccggagtgatggttggagaatgtggaactatgctgggggacacccaagtactcttaagcaatccctgtggtgacagagctaggagagcgtatagcacagctcctgattatgctgtatgtggaaatgggggaaaagtgaaattaaacgaacagcgatttggaagcacaaataaacaaggcaaagcagcttattggatggaagccctgagacctgagccactatgttggcagtccaactatcctgaagctgctgctgtggggaagcccaaagcagcctatacaaagaaacttcatggagaagactcctga

SEQ ID NO: 3955 - DNA, 711 bp, Homo sapiens
  SIMILAR (277)..(570): 441254mologous to Human endogenous retrovirus K protease,accession number Y10392,Smith-Waterman Score=243.
agtgccacagtagatttatactgcacaaaagctgtgagccttatgcttggggaatccccacaaaaagttccaataggggtctgtggatgcttgccggggggatgataggattacttctaggtagatctagtttaaatttaaaaggagtgcaagtacatacaggagtcattgattcagattacaatggggaaattcaaattgttatatttacttcttttccttggaaagcagagccaggaaagcgtatagcacaacttctgattgtgccgtatgtggaaatggggaaaagtgaaattaaacgaataggagaatttggaacgcacaaataaacaaggcaaagcagcttattgggggaatcaaattactgataaatgtcctatctgtgaaataactgttcagggaaagaaatttaaaagtttggtagatacaggaacagacatttcattcatttctctacagcactggctgtcctcatggccaattcaacctgctcaatttaacatagctgaagttcgtaaagcccctgaagtatatcaaaatagttatatcttgcattgtgaagggcctgatgggacaacctgggactattcaaccaattgtaacttctatacctataaatttatgggggagagatttattacaacaatgaggagaacaagttctaattccagagcaattatacagccctcaaagtcaacatatgatgcatga

SEQ ID NO: 3956 - DNA, 246 bp, Homo sapiens
  SIMILAR (3)..(116): 941254mologous to Homo sapiens dJ1022E24.3 (KIAA0835, similar to myelin transcription factor 1 (MYT1)),accession number AL121581,Smith-Waterman Score=183.
aagaagaagaagaagaagaagaagaagaggaagaggaagaggaagaagaagaagaagaagaagaagaagaagaagaagaagaagaagaagaagaagaagaagaagaagaacaggccatgtgaggttgccacaccacctacaaaacagggataccacagtccccaggtaaggatcacaggagtttcctgcagcagcaacagcagcgacagcagcattttctatgcggttgaggaaaaaagccacagc

SEQ ID NO: 3957 - DNA, 159 bp, Homo sapiens; identical to SEQ ID NO: 2961
  SIMILAR (54)..(113): 601254mologous to Oryza sativa similar to RING-H2 finger protein RHA1a (AF078683),accession number AP000616,Smith-Waterman Score=62.

SEQ ID NO: 3958 - DNA, 353 bp, Homo sapiens
  SIMILAR (193)..(351): 861254mologous to Arabidopsis thaliana putative protein,accession number AL162506,Smith-Waterman Score=230.
acccagtggagaaagcacatagcatctcagctgacttttgcagacagagctaaattgagaggtgtcaccttcgctggcaaggtcagaggaatcgtgtctgctaacctggagaggtgggaattgcaggcagcaaacaaaattgcactgccacttggaaatctgccaactgctacaatcagggtaaaaataattggaaaaacctcatctcttaaaaaagaagaagaagaagaagaagaagaagaagaggaagaggaagaggaagaggaggaggaagaagaagaagaagaagaagaagaagaagaagaagaagaagaagaagaagaagaagaagaagaagaagaagaagaagaaag

SEQ ID NO: 3959 - DNA, 201 bp, Homo sapiens
  SIMILAR (7)..(129): 751254mologous to Arabidopsis thaliana putative protein,accession number AL162506,Smith-Waterman Score=163.
ttacgcaaaaaagaagaagaggaagaagaagaagaagaagaagaagaagaagaagaagaagaagaagaagaagaagaagaagaagaagaagaagaagacctaaacaaaagaacaaaaagctttgcatattcttttccatgtttttttgtggttattttgatcgtgattcttaaccttgtctttgctacctggcgggaggag

SEQ ID NO: 3960 - DNA, 210 bp, Homo sapiens
  SIMILAR (46)..(207): 791254mologous to Arabidopsis thaliana putative protein,accession number AL162506,Smith-Waterman Score=203.
atgcattcctacttcacacatcccagtgaacctcagcacattagctggttactgagaagaaaagaaggagaaggagaaggagaaggagaaggagaaggagaagaagaagaagaagaagaagaagaagaagaagaagaagaagaagaagaagaagaagaagaggaagaggaagaagaagaagaagaagaagaagaagaagaagaagaataa

SEQ ID NO: 3961 - DNA, 174 bp, Homo sapiens
  SIMILAR (28)..(156): 741254mologous to Homo sapiens Human secreted protein HCHPF68, SEQ ID NO:163,accession number Y86248,Smith-Waterman Score =148.
atgaatcgatgtgtcccaaatttcagtgtcagtgctagaggcatatttacagctcaaatgaagtccattaaaaagaagaagaagaagaagaagaagaagaagaagaagaagaagaagaagaagaagaagaagaagaagaagaagaagaagaagaaattccactttcttctctag

SEQ ID NO: 3962 - DNA, 278 bp, Homo sapiens
  SIMILAR (107)..(33): 361254mologous to Schizosaccharomyces pombe putative glucoamylase,accession number AL031262,Smith-Waterman Score=40.
atgacaagctataagttcacagagcccaagaacgggatctggcaacttcatgaagcagcacaactagatacaacatataacaagttaaacaaaaaagaagaggaagaggaagaaggaggaagaagaagaggaagaagaggaagaagaaagaagaaggagaaggagaagaagaagaagaagaagaagaagaagaagaagaagaagaagaagaagaagaagaagaagaagaagaagaagaagaagaagaagaagaaggagtcatacttctatccccaaag

SEQ ID NO: 3963 - DNA, 429 bp, Homo sapiens
  SIMILAR (196)..(411): 551254mologous to Homo sapiens Human secreted protein HCHPF68, SEQ ID NO:163,accession number Y86248,Smith-Waterman Score =162.
atgggctccaggttaaactggatggaagtgattccagagcagtgcacctaccttcatgtccttataaaatgcatgtttttctggaaccgacagcacagaggtggcatccaggagaaggcagcactgaagcagagaactcctaggatcttccacgagaagaatacgccctgctacctgctggtccaagaagaaggtgcagacacacgcataggtatgaacccaacccagagtttggagccaagcacagctgccctgcagcctgacacagagctgccccagccacctcagacacccaagagtgacacagatcaaatgctttcggtgaagaagaagaagaagaggaagaagaagaagaagaagaagaagaagaagaagaagaagaagaagaagaagaagaagaagaagaagaaactctattttcaaacatga

SEQ ID NO: 3964 - DNA, 767 bp, Homo sapiens; identical to SEQ ID NO: 2960
  SIMILAR (4)..(111): 801254mologous to Homo sapiens Human secreted protein HCHPF68, SEQ ID NO:163,accession number Y86248,Smith-Waterman Score =152.

SEQ ID NO: 3965 - DNA, 300 bp, Homo sapiens
  SIMILAR (89)..(12): 881254mologous to Oryza sativa similar to RING-H2 finger protein RHA1a (AF078683),accession number AP000616,Smith-Waterman Score=135.
atgaagaagaagaagaagaagaagaagaagaagaagaagaagaagaagaagaagaagaagaagaagaagaagaagaactcacaaatagattatttccaaacatttttgggtgacacaactagggaactgctaccagcatctagtggggaggaacaagggatggtgctgaacattcgagatgcacaggacgacccccacagcaaagaattatgtggcccagatgtgaatggtgctgaggttgagacacactggtttaccgtttctaatggaagtgtaattgttttgggaatccttaagtga

SEQ ID NO: 3966 - DNA, 1233 bp, Homo sapiens
  SIMILAR (960)..(1214): 361254mologous to Plasmodium falciparum glutamic acid-rich protein,accession number AF251290,Smith-Waterman Score=147.
atgcctagcagcaaaggtgtacatgtacacagccccccaagatacctagcagcaaaggactttaaaatgataaataaagaattaacagcagctacatttatggaggtcatagcagaggataatcgtttcatatatgatggaattgacagcaactttgaacctgagctggttttcctggaattctttgaagctctcttaagctttgcattcatctgtgttactgaccaaatgactaaatcctatacaaatgttccagctgatgatgtgtctggaaataaacatgaaactatttatacaatactaaatcaggacgcccagaacaagagtcccagcgcggtcatgagccacgaatcggatgctgctcactctgacagtgccaggtcatcttccagcaagttagaactctcgcctgatgttaacaaaataaggaaatcagaggcaatggtgaaagaaaagaaaaaagcagacaaaaaaggggagaagtctgcccgctctccctcatctctctctgataatctagacttttccaaacaagatggcaacaccactaggcaagagatgtccccagctggtgtcccattgctgggaatgcagctcaacgaagtgaaacccaaaaaagaccgccaaaacgttcagcagaacgaagatgccacccaatacgaagagtccattctgaccaaactcatagtggaaagctatgaaggggaaaaggttcgtgggctgtatgagggagaaggcttcgcagcctttcaaggcggttgtacctatcgtgtaagttgcccatttgagaacctgcaggaaggggaggaagggcgactttgtgaagaatgtcccgatgaaccacggcgtgtacacgtggccggacggagcatgtatgaaggcgaagtggtcaacggcatgaggaacggattcgggatgttcaagtgcagcacccagcctgtgtcctacatcggccactggtgcaatggcaagcggcacgggaaggtgggcgaggtggccacgtggagggcagagaagaagaagaaagaagaagaagaagaggaagaggaagaagaagaagaagaaggaagaggaagaagaagaagaagaggaggaagaagaagaagaggaagaggaagaagaagaagaagaagaaagaagaagaagaagaagaagaagaagaagaagaagaagaagaagaagaagaagaagaagaagaagaagaagaagaaaaaatacgtccttgaggactaa

SEQ ID NO: 3967 - DNA, 708 bp, Homo sapiens
  SIMILAR (7)..(189): 1001254mologous to Homo sapiens steroid receptor TR2- 9,accession number M29959,Smith-Waterman Score=304.
atggtggctgaatcatgtcagggagatttaagtacattggccaatgtggttacatcattagcgaatcttggaaaaactaaagatctttctcaaaatagtaatgaaatgtctatgattgaaagcttaagcaatgatgatacctctttgtgtgaatttcaagaaatgcagaccaacggtgatgtttcaagaataatgtcccccgacacatttccatcaggagcacaggagcagccaagacatacagggagacttgcacgtggctttgcgcaggagccttttctgccaaatcaaacagagcagagatacaaaacacaaaagcaagccatcagaaaagatctgtgtgactgggcacgatggatcatgtctgtaatcccagtgctttgggaggctgaggaaacaccatcagcatccattcaccctttagaattacagccaactcaagctcttcctgacttctcagtattgtacaagcagaggcagtgtcagaaaattcccatccaattttgccaagagtctctagaagtggttggggacagaaggaggaagaagaagaagaagaaagaagaagaagaagaagaagaagaagaagaagaagaagaagaagaagaagaagaagaagaagaagaagaaggaagaagaagaagaagaagcagcccatcttgttattctataacccctgaactaagttgtaaacttggccatcgttga

SEQ ID NO: 3968 - DNA, 708 bp, Homo sapiens
  SIMILAR (199)..(438): 651254mologous to Homo sapiens Human thyrotropin GPR N- terminal sequence,accession number W03626,Smith-Waterman Score=246.
atggtgtctgccctcccagaggtaggtcgtgctcagattttaaggctgatagcttatattcgttcccctgcccctcccgttgtgggagttgagagagcagcacgcagacctgctcaggcttttggactggttgcactgccctccaccgttggagaggaatgcctgaaagatgccctccggagtccagagactcctaaactcggttccctcagtcctccctgccaggacacaagacctggagaaggaggaggaggagaatcggaaagaggaggaggaggaggagaaggagaaggagaaggagaagaagaagaagaagaagaagaagaagaagaagaagaagaagaagaagaagaagaagaagaagaaaaagaagaagaagaagaagaagaagaagaacaagaagaagaagaagacgacgaagaagaagaggaagaaaaatcctgtagtgtcaatgtctcactgatagaattaccctgggaccccaaggcctacagcaggctagctcctctatcctcacagcctggccctgctgtcaaggtgcccactgagcacctcattgcaaaactcgaggactgtgtccagggcttcacttacttgaccgtggaaaagcgttgggcccgggctgtcactggtgcccaggaacttggagttgattatcctagaaacgagaaatgcaagcctcataacaatggttatgacaatgactaa

SEQ ID NO: 3969 - DNA, 3192 bp, Homo sapiens
  SIMILAR (1087)..(2478): 961254mologous to Homo sapiens unknown,accession number AF148856,Smith-Waterman Score=2341.
atgggagactttaacaccccactgtcaacattagacagatcaatgagacagaaagtcaaaaaggatacccaggaattgaactcagctctgcaccaagcagacctaatagacatctacagaactctccaccccaaatcaacagaatatacatttttttcagcaccacaccacacctattccaaaattgaccacatacttggaagtaaagctctcctcagcaaatgtaaaagaacagaaattataacaaactatctctcagacggcagtgcaatcaaactagaactcaggattaagaatctcactcaaaaccgctcaactacatggaaactgaacaacctgctcctgaatgactactgggtacctaacgaaatgaaggcagaaataaagatgttctttgaaaccaacgagaacaaagacacaacataccagaatctctgggacgcattcaaagcagtgtgtagagggaaatttatagcactaaatgcccacaagagaaagcaggaaagatccaaaattgacaccctaacatcacaattaaaagaactagaaaagcaagagcaaacacattcaaaagctagcagaaggcaagaaataactaaaatcagagcagaactgaaggaaatagagacacaaaaaacccttcaaaaaattaatgaatccaggagctggttttttgaaaggatcaacaaaatagatagaccgctagcaagactaataaagaaaaaaagagagaagaatcaaatagatacaataaaaaatgataaaggggatatcaccaccaatcccacagaaatacaaactaccatcagagaatactacaaacacctctacgcaaataaactagaaaatctagaagaaatggataaattccttgacacatacactctcccaagactaaaccaggaagaagttgaatctctgaatagaccaataacaggatctgaaattgtggcaataatcaatagcttaccaaccaaaaagagtccaggaccagatggattcacagccgaattctaccagaggtacaaggaggaactggtaccattccttctgaaactattccaatcaatagaaaaagagggaatcctcctgttggaagttctggccagggcaattaggcaggagaaggaaataaagggtattcaattaggaaaagaggaagtcaaattttccctgtttgcagacgacatgattgtatatctagaaaaccccattgtctcagcccaaaatctccttaagctgataagcaacttcagcaaagtctcaggatacaaaatcaatgtacaaaaatcacaagcattcttatacaccaacaacagacaaacagagagccaaatcatgagtgaactcccattcacaattgcttcaaagagaataaaatacctaggaatccaacttacaagggatgtgaaggacctcttcaaggagaactacaaaccactgctcaaggaaataaaagaggatacaaacaaatgcaagaacattccatgctcatgggtaggaagaatcaatatcgtgaaaatggccatactgcccaaggtaatttacagattcaatgccatccccatcaagctaccaatgcctttcttcacagaattggaaaaaactactttaaagttcatatggaaccaaaaaagagcccgcatcgccaagtcaatcctgagccaaaagaacaaagctggaggcatcacgctacctgacttcaaaccatactacaaggctacagtaaccaaaacagcatggtactggtaccaaaagagagatatagatcagtggaacagaacagagccctcagaaataacgccgcatatctacaactatctgatctttgacaaacctgagaaaaacaagcaatggggaaaggattccctatttaataaatggtgctgggaaaactggctggccatatgtagaaagctgaaactggatcccttccttacaccttatacaaaaatcaattcaagatggattaaagacttaaacgttagacctaaaaccataaaaaccctagaagaaaacctaggcaataccattcaggacataggcatgggcaaggacttcatgtctaaaacaccaaaagcaatggcaacaaaagacaaaattgacaaatgggatctaattaaacttaagagcttctgtacagcaaaagaaactaccatcagagtgaacaggcaacctacaaaatgggagaaaattttcacaacctactcatctgacaaagggctaatatccagaatctacaatgaactcaaacaaatttacaagaaaaaaacaaacaaccccatcaaaaagtgggcgaaggacatgaacagacacttctcaaaagaagacatttatgcagccaaaaaacacatgaaaaaatgctcatcatcactggccatcagagaaatgcaaatcaaaaccacaatgagataccatctcacaccagttagaatggcgatcattaaaaagtcaggaaacaacagggtcagcaatggccagttgagtctttctcctgatgacagctctttgattctagctctcctgcctcctgcttcttcatttaaggagtcttgtggttacactgggaccacctgcataactccacggattagcagtcttaattcccggggcgaggagggagcgcatcggagaggtacctgtgcgatgggcagcggtgcttggcacctgagcgtaggtacgatactcagcaaggcacctgggtgggacataggagaaggaaatctccaccccaaccccccaaaacaccgcccagaagtgggcggtgaggcccagtgccgcagccccagggaaatggcagtgacacaggtggcagccaccttcagagcgccaggcccccgccagcacatctgcagatttgctcctgggacacgcgttggccaggagcatgagggacacccagtggtgtccacccagcagtttgcagcagcagcctgtgggcagcttcccactgagttccaccagcatcccaggacacagctccctgcttaccagcactggctggtggcacttcggcaaacgtctccaccatccgaaaacaaaatgagacagacatgtacttccccaaaggagccccctgacactgctgagcagggtgtaagaggtgacactgaagagttggaaggaggagagatgagagaagagaaaatcatggaacttgagttggtctttgcagatgattggtgtctctga

SEQ ID NO: 3970 - DNA, 5130 bp, Homo sapiens; identical to SEQ ID NO: 2332
  SIMILAR (2614)..(4473): 941254mologous to Homo sapiens putative p150,accession number U93572,Smith-Waterman Score=3044.

SEQ ID NO: 3971 - DNA, 3819 bp, Homo sapiens
  SIMILAR (1084)..(2460): 571254mologous to Mus musculus reverse transcriptase,accession number U15647,Smith-Waterman Score=1502.
atggaagacgaaatgaatgaaatgaagcgagaagggaagtttagagaaaaaagaataaaaagaaatgaacaaagccaccaagaaatatgggactatgtgaaaacaccaaatctacgtctgattggtgtacctgaaactgacggggagaatggaaccaagttggaaaacactctgcaggatattatccaggagaacttccccaatctagcaaggcaggccaacattcagattcaggaaatacagagaacaccacaaagatactcctcgagaagagcaactccaagacacataatcatcagattcaccaaagttgaaatgaaggaaaaaatgttaagggcagccagagagaaaggtcaagttacccacaaagggaagcccatcagactaaaagcggatctctcggcagaaactctacaagccagaagacagagctggttttttgaaaagatcaacaaaatcgatagaccacaagcaagactaataaagaagaaaagagagaagaatcaaatagacacaataaaaaatgataaaggggatatcaccaccgatcccacagaaatacaaattaccatcagagaatactacaaacacctctatgcaaataaactagaaaatctagaagagatggataaattcctcgacacatacaccctcccaagactaaaccaggaagaagttgaatctgtgaatagaccaataacaggctctgaaattgaggcaataaccaatagcttaccaaccaaaaaaagtccaggaccagatggattcacagccgaattctaccagaggtacaaggaggagctggtaccattccttctgaaactattccaaccaatagaaaaagagggaatcctccctaactcattttatgaggccagcatcatcctgataccaaaacctggcagagacacaaccaaaaaagggaattttagaccaatatccttgatgaacattgatgcaaaaatcctcaataaaatactggcaaaccaaatccagcagcacatcaaaaagcttatccaccatgatcaagtgggcttcatccctgggatgcaaggctgtgttggaagttctggccagggcaataggcaggagaaggaaataaagggtattcaattaggaaaagaggaagtcaaattgtccctgtttgcagatgacatgattgtatatctagaaaaccccactgtctcagcccaaaatctccttaagctgataagcaacttcagcaaagtctcaggatacaaaatcaatgtacaaaaatcacaagcattcttatacaccaacaacagacaaacggagagccaaatcatgagtgaactcccattcacaattgcttcaaagagaataaaatacctaggaatccaacttacaagggatgtgaaggacctcttcaaggagaactacaaaccactgctcaatgaaataaaagaggatacaaacaagtggaagaacattccatgctcatggataggaagaatcaatatcgtgaaaatggccatactgcccaaggtaatttatacattcaatgccatccccatcaagctaccaatgactttcttcacagaattggaaaaaactactttaaagttcatatggaaacaaaaaagatcccacatcgccaagtcaatcctaagccaaaagaacaaagctggagacatcacactacctgacttcaaactacactacaaggctacagtaaccaaaacagcatggtactggtaccaaaacagagatatagatcaatggaacacaacagagccctcagaaataatgctgcatatctacaaccatctgatctttgacaaacctgacaaaaacaagcaatggggaaatgattccctatttaataaatggtgctgggaaaactggctagccatatgtagaaagctgaaactggatcccttccttacatcttatacaaaaatcaattcaagatggattaaagacttaaatgttagacctaaaaccataaaaaccctagaagaaaacctaggcaataccattcaggacataggcatgggcaaggacttcatgtctaaaacaccaaaagcagtggcaacaaaagccaaaattgacaaatgggatgtaattaaactaaagagcttctgcacagcaaaggaaactaccatcagagtgaacaggcaacctacagaatgggagaaaattttcgcaacctactcatcggacaaagggctaatatccagaatctacaatgaactcaaacaaatttacaagaaaaaaacaaacaaccccatcaaaaagtgggcaaaggatatgaacagacacttctcaaaagaagacatttatgcagccaaaagacacatgaaaaaatgctcatcatcactggccatcagagaaatgcaaatcaaaaccacaatgagataccatctcacaccaattagaatggtgatcattaaaaagtcaggaaacaacagagcacctgggggaaggggtggctgtgggtgcagctttggcagacttaaacgttcctgcgtgccagctctgaaaagagtagcagatctcccagcacaacgctcgagctctgctaagggagagactgcctcctcaagtgggtccctgaaccccgtgccccctgactgggagaaacctcccagcaggggtcgacagacacctcatactggagaactccggctagcatctgacgggtgcctctctgggatgaagcttccagaggaaggaataggcagcagtctttgctgttctgcagcctctgctggtgatacccaggcaaatggggtccggagtggactgccagcaaactccagcagacctgcagcagaggggcctgttagaaggaaaactaacagacagaaaggaatagtatcaacttcaacaaaaaggacgtccacaccaaaaccccatccaaaggatcacaactcctcgccagcaatggaacaaaactggatggagaatgcgtttgacgaattgacagaagtaggcttcagaaggtgggtaataacaaacttctccaagctaaaggagcatgttctaactcaatgcaaggaagctaagaagcttgaaaaaaggttagaggaattgctaactagaataaccagtttagagaagaacataaatgacctgatggagctgaaaaacacatcacaagaacttcgtgaagcatacacaacggaagaaaggatatcagagattgaagatcaacttaatgaaataaagcatgaagacaggattagagaaaaaaatgaaaaggaacgaacaaagcctccaagaaatatgggactacgtgaaaagaccaaacctacatttgactgtgtacctgaaagtgatggggagaatggaaccaagttggaaaacactctgcaggatattatccaggagaacttccccaacctagcaaggcaggccaacattcaaattcaggaaatacagagaacaccacaaagatactcctcgagaagagcaaccccaagacacataatcatcagattcaccaaagttgaaatgaaggaaaaaatgttaagggcagccagagagaaaggtcaggttacccacaaagggaagcccatcagactaacagctgaccccttggcagaaactctacaagccagaagagagtgggggccaatattcaacattcttaaagaaaagaattttcaacacagaatgtcatatccagccaaactaagcttcataagtgtgggagaaataaaatactttacagacaagcaaatgctgagagattttgtcaccaccaggcctgccctacaagagctcctgaaggacgcgctaaacatggaaaggaacaaccagaaccagtcactgcaaaaacatgccaaattgtaa

SEQ ID NO: 3972 - DNA, 3570 bp, Homo sapiens; identical to SEQ ID NO: 2157
  SIMILAR (790)..(2313): 951254mologous to Homo sapiens putative p150,accession number U93572,Smith-Waterman Score=2493.

SEQ ID NO: 3973 - DNA, 3441 bp, Homo sapiens
  SIMILAR (574)..(1962): 951254mologous to Homo sapiens putative p150,accession number U93563,Smith-Waterman Score=2340.
atggagctgaaaaccaaggcacgagaactacatgacgaatgcacaagcctcagtagccgatttgatcaactagaagaaagggtatcagtgatggaagatgaaatgaatgaaatgaacttaccaaccaaaaaaagtccaggaccagatggattcacagccgaattctaccagaggtacaaggaggagctggtaccattccttctgaaattattccaatcaatagaaaaagagggaatcctccctaactcattttatgagcccagcatcatcctgatagcaaagcctggcagagacacaacaaaaaaagagaactttagacccatatccctgatgaacatcaatgcaaaaatcctcaataaaatgctggcaaaccaaatccagcagcacatcaaaaagcttatccaccatgatcaagtgggcttcatccctgggatgcaaggctggttcaatatacgcaaatcaataaatgtaatccagcatataaacagaaccaaagacaaaaaccacatgattatctcaatagatgcagaaaaggcctttgacaaaattcaacaacacttcatgctaaaaactctcaataaattagtgttggaagttctggccagggcaatcaggcaggagaaggaaataaagggtattcaattaggaaaagaggaagtcaaagtgtccctgtttgcagatgacatgattgtatatctagaaaaccccactgtctcagcccaaaatctccttaagctgataggcaacttcagcaaagtctcaggatacaaaatcaatgtgcaaaaatcacaagcattcttatacaccaataacagacaaacagagagacaaatcatgagtgaactcccattcacaattgcttcaaagagaataaaatacctaggaatccaacttacaagggacgtgaaggaccttttcaaggagaacaacaaaccactgctcaaggaagtaaaagaggatacaaacgaatggaagaacattccatgctcatgggtaggaagaatcaatatcgtgaaaatggccatactgcccaaggtaatttacagattcaatgccatccccatcaagctaccaatgactttcttcacagaattggaaaaaactactttaaagttcatatggaaccaaaaaagagcctgcattgccaagtcaatcttcagccaaaagaacaaagctggaggcatcacgctacctgacttcaaactatactacaaggctacagtaaccaaaacagcatggtactggtaccaaaacagagatatagctcaatggaacagaacagagccctcagaaataatgctgcatatctacaactatctgatctttgacaaacctgagaaaaacaagcaatggggaaaggattccctatttaataaatggtgctgggaaaactggctagccatatgtagaaaggtgaaactggatcccttccttacaccttatacaaaaatgaattcaagatggattaaagatttaaacgttagacctaaaaccataaaaaccctagaagaaaacctaggcattaccattcaggacataggcgtgggcaaggacttcatgtccaaaacaccaaaagcaatggcaacaaaagccaaaattgacaaatgggatctaattaaactaaagagcttctgcacagcaaaagaaactaccatcagagtgaacaggcaacctacaacatgggagaaaattttcgcaacctactcatctgacaaagggctaatatccagaatctacaatgaactcaaacaaatttacaagaaaaaaacaaacaaccccatcaaaaagtgggcgaaggacgtgaacagacacttctcaaaagaagacatttatgcagccaaaaaacacatgaaaaaatgctcatcatcactggccatcagagaaatgcaaatcaaaaccactatgagatatcatctcacaccagttagaatggcaatcattaaaaagtcaggaaacaacaggaaaatccaagtggaatatggtgtgacaggatcctttaaagataaaccacttgcagagtggctaaggaaatacaatccctctgaagaagaatatgaaaaggcttcagagaactttatctattcctgtgctggatgctgtgtagccacctatgttttaggcatctgtgatcgacacaatgacaatataatgcttcgaagcacgggacacatgtttcacattgactttggaaagtttttgggacatgcacagatgtttggcagcttcaaaagggatcgggctccttttgtgctgacctctgatatggcatatgtcattaatgggggtgaaaagcccaccattcgttttcagttgtttgtggacctctgctgtcaggcctacaacttgataagaaagcagacaaacctttttcttaacctcctttcactgatgattccttcagggttaccagaacttacaagtattcaagatttgaaatacgttagagatgcacttcaaccccaaactacagacgcagaagctacaattttctttactaggcttattgaatcaagtttgggaagcattgccacaaagtttaacttcttcattcacaaccttgctcagcttcgtttttctggtcttccttctaatgatgagcccatcctttcattttcacctaaaacatactcctttagacaagatggtcgaatcaaggaagtctctgtttttacatatcataagaaatacaacccagataaacattatatttatgtagtccgaattttgagggaaggacagattgaaccatcatttgtcttccgaacatttgacgaatttcaggaacttcacaataagctcagtattatttttccactttggaagttaccaggctttcctaataggatggttctaggaagaacacacataaaagatgtagcagccaaaaggaaaattgagttaaacagttacttacagagtttgatgaatgcttcaacggatgtagcagagtgtgatcttgtttgtactttcttccaccctttacttcgtgatgagaaagctgaagggatagctaggtctgcagatgcaggttccttcagtcctactccaggccaaataggaggagctgtgaaattatccatctcttaccgaaatggtactcttttcatcatggtgatgcatatcaaagatcttgttactgaagatggagctgacccaaatccatatgtcaaaacatacctacttccagataaccacaaaacatccaaacgtaaaaccaaaatttcacgaaaaacgaggaatccgacattcaatgaaatgcttgtatacagtggatatagcaaagaaaccctaagacagcgagaacttcaactaagtgtactcagtgcagaatctctgcgggagaattttttcttgggtggagtaaccctgcctttgaaagatttcaacttgagcaaagagacggttaaatggtatcagctgactgcggcaacatacttgtaa

SEQ ID NO: 3974 - DNA, 5076 bp, Homo sapiens
  SIMILAR (1774)..(4986): 911254mologous to Homo sapiens putative p150,accession number U93563,Smith-Waterman Score=5076.
atggctcagttccatgtctctcatcctccagcagagtggcccagacatgttctcctgctgatggcagacagcaagaatgagcttcagaatatgaatacaggccagacctgtgggacaagacagaccctgaagtcaaagctgcagggttggaacaagccagggattcagtctgatcctggaagtcaggggcatcccaggtgcctgaagacctttcctcttgttgctcaatctagcacacaggaaagaaatcatgtcatggaaaaggcagttttgaagagtcagaattgggctataattgaagagttcattaccaagatcggttggttccctgattacagtggcaaggtgaaatatttatcctctccaaaaagctcctgcacaactgttctccaagtcacccacttctcactcttttttcatccgaacccggatgagcttgtcagcaaaattaaagtgtggtctaagcatcgtctgtatcagaacaattcagaggctttcttagaagtgcagattccagagcccaaatgtgaggtgtacagcatgagaacaatgggaagaagacagccggggactgctatggacctgaatgcagggggctccatctgcaatgtcccacgcaccttactgcatctcacaggggaatccacttttcgtgataggcagagggtaggggcttatcttgacattcggggttggtatatcttggttttggtggttgataaagaaaaactggggattcctggacagaaacagaattcttccaagatcctctttgggtcagagaagctgaaacagtgggtctatgtgaagaatcatgcaaaggagtcaattacacaagaagcaatgggaatctgggtagggcagcagaggaagagacagcctttaggatatgaagaacgaaaactaacaaacaggaaggacatccacatcaaaaacccatctgtatgtcaccatcatcaaagaccaaaggtagataaaaccacaaagatggggaaaaaacagagcagaaaaactggaaactctaaaaatcagagcacatctcctactctaaaggaaagcagctcctcaccagcaacagaacaaagctggacagagaatgactttgacgagttgagagaagaaggcttcagaagatcagactactccgagctacaggaggaagttcaaaacaatggcaaagaagttaaaaactttggaaaaaaattagatgaatggataactagaataaccaatgcaaagaagtccttaaaggacctgatggagctgaaaaccaaggcacgagaactatgtgatgaacgcacaagcctcagtagccaatgcaatcaactggaagaaagggtatcagtgatggaagatgaaatgaatgaaataaagcaagaagagaagtttagagaaaaaagaataaaaagaaacgaacaaagcctccaagaaatatgggactatatgaaaagaccaaatctacgtctgattggtgtacctgaaagtgacggggagaatggaaccaagttggaaaacactctgcaggatattatccaggagaacttccccaatctagcaaggcaggccaacattcaaattcaggaaatacagagaacgccacaaagatactccttgagaagagcaaccccaagacacataattgtcagattcaccaaagttgaaatgaaggaaaaaatgttaagggtagccagagagaagggtcgggttacccacaaagggaagcctgtcagactaacagctgatctcttggcagaaactctacaagccagaagacaagacacacataggctcaaaataaagggatggaggaagatttaccaagcaaatggaaaacagaaaaaggcaggggttgcaatcctagtctcagataaaacagaatttaaaccaacaaagatcaaaagagacaaagaaggccattacataatggtaaagggatcaattcaacaagaagagctaactatcctaaatatatatgcacccaatacaggagcacccagattcacaaagcaagtccttagagacctacaaagagacttagactccaacacaataataacgggagactttaacaccccactgtcaacattagacagatcaatgagacagaaagttaacaaggatatccaggaattgaactcagctctgcaccaagcagacctaatagacatctacagaactctccaccccaaatcaacagaaaatacattcttttcggcaccacaccacacctattccaaaattgaccacatagtgggaagtaaagcactcctcagcaaatgtaaaagaaaagaaattataacaaactgtctctcagaccacagtgcaatcaaactagaactcaggattaagaaactccctcaaaactgctcaactatatggaaactgaacaacctgctcctgaatgactactgggtacataacgaaatgaaggcagaaataaagatgttgtttgaaaccaatgagaacaaagacacaacataccagaatctctgggacacattgaaagcagtgtgtagagggaaatttatagcactaaatgcccacgggagaaaacaggaaagatctaaaattgacaccctaacatcacaattaaaagaactagcaaagcaagagcaaacacattcaaaagctagcagaaggcaagaaataactaagatcagagcagaactgaaggaaatagagacacaaaaaacccttcaaaaaattaatgaatccaggagctggtttttaccactagcaagactaataaagaagaaaacagagaagaatcaaatagacgcaataaaaaatgacaaaggggatatcaccaccaatcccacagacatacaaactgccatcagagaatactataaacacctctatgcaaataaactagaaaatctagaagaaatggataaactcctcaacacatataccatcccaagactaaaccaggaagaagttgaacctcggaatagaccaataacaggctctgaaattgaggcaataatcaatagattaccaaccaaaaaatgtccaggaccagatggattcacagccgaattctaccagaggtacaagcaggtaccattccttctgaaactattccaatcaacagaaaaagggggaatcctccctaagtcattttatgaggccagcatcatcctgataccaaagcctggcaaagacacaacaaaaaaagagaattttagaccaatatccctgatgaacattgatgtaaaaatcctcaataaaatactggcaaagcaaatccagcagcacatcaaaaagcttatccaccatgatcaagtgggcttcatccctgggatgcaacgctggttcaacatacgcaaatcaataaatgtaatccagcatataaacagaaccaaagacaaaaaccgcatgattatctcaatagatgcagaaaaggcctttgacaaaattcaacaacgcttcatgctaaaaactctcaataaattaggtattgatgggacgtatctcaaaacaataagagctatctatgacaaacccacagccaatatcatactgaatgggcaaaaactggaagcattccctttgaaaactggcacaagacagggatgccctctctcaccactcctattcaacatggtgttggaagttctggccagggcaattagtcaggagaaggaaataaaggatattcaattaggaaaagaggaagtcaaattgtccctgtttgcagatgacatgattgtatatctagaaaaccccattgtctcagcccaaaatcgccttaagctgataagcaacttcagaaaagtctcaggatacaaaatcaatgtacagaaatcacaagcattcttatacaccaataacagccaaacagagagccaaatcatgagtgaactcccgttcacaactgcttcaaagagaataaaatacctaggaatccaacttacaagggatgtgaaggacctcttcaaggagaactacaaaccactgctcagtgaaataaaagaggatacaaacaaatgcaagaacgttccatgctcatgggtaggaagaatcaatatcatgaaaatggccatactgcccaaggtaatttatagattcaatgccatccccatcaagctaccaatgactttcttcacagaattggaaaaaactactttaaagttcatatggaaccaaaaaagagcctgcatagccaagtcaatcctaagccaaaagaacaaagctggaggcatcacgctacctgacttcaaactatactacaaggccacagtaaccaaaacaacatggtactggtaccaacacagagctgtagaccaatggaacagaacagggccctcagaaataatgccgcatatctacaactatctgatctttgacaaacctgacaaaaacaagcaatggggaaaggattccctatttaataaatggtgctgggaaaactggctagccatatgtagaaagctgaaactgaatcccttccttacaccttatacaaaaattaattcaagatggattaaagacttacatgttagacctaaaaccataaaaaccttagaagaaaacctaggcaataccattcaggtcataggcatgggcaaggacttcatgtctaaaacaccaaaagcaatggcaacaaaagccaaaattgacaaatgggatctaattaaactaaagagtttctgcacagcaaaagaatctaccatcagagtgaacaggcaacctacagaatgggagaaaatttttgcaacctactcatctgacaaagggcaaatatccagaatctacaatgaactcaaacaaatttacaagaaaaaaacaaacaaccccatcaaaaagtgggcaaaggataggaacagacacttctcagaagaagacatttatgcagccaaaaaacacatgaaaaaatgctcaccatcactggccatcagagaagtgcaaatcaaaaccacaatgagataccatctcacaccagttagaatggcgatcattaaaaagtcaggaaccaacagggaagccagctgccatgtcatgaggacactcaagcagcccatgttggaagaactgaggcgctatggagaggcctatgctaagaagaactga

SEQ ID NO: 3975 - DNA, 3300 bp, Homo sapiens
  SIMILAR (277)..(2088): 971254mologous to Homo sapiens putative p150,accession number U93563,Smith-Waterman Score=3088.
atgaaaaatgataaaggggatatcaccactgatcccacagaaatacaaactaccttcagagaatactacaaacacctctatgcaaataaactagaaaatctagaagaaatggataaattcctcgatacatacagtctcccaagactaaaccaggaagaagttgaatctctgaatagaccaataacgggagctgaaattgtggcaataatcaatagtttaccaaccaaaaagagtccaggaccagatggattcacagccgaattctaccagaggtacaaggaggaactgaattttagaccaatatccttgatgaacattgatgcaaaaatcctcaataaaatactggcaaaccgaatccagcagcacatcaaaaagcttatccaccatgatcaagtgggcttcatccctgggatgcaaggctggttcaatatacgcaaatcaataaatgtaatccagcatataaacagagccaaagacaaaaaccacatgattatctcaatagatgcagaaaaagcctttgacaaaattcaacaacccttcatgctaaaaactctcaataaattaggtattgatgggacgtatttcaaaataataagagctatctatgacaaacccacagccaatatcatactgaatgggcaaaaactggaagcattccctttgaaaactggcacaagacagggatgccctctctcaccactcctattcaacatagtgttggaagttctggccagggcaaataggcaggagaaggaaataaagggtattcaattaggaaaagaggaagtcaaattgtccctctttgcagatgacatgattgtatatctagaaaaccccattgtctcagcccaaaatctccttaagctgataagcaacttcagcaaagtctcaggatacaaaatcaatgtacaaaaatcacaagcattcttatacaccaataacagacaaacagagagccaaatcatgagtgaactcccattcacaattgcttcaaagagaataagatacctaggaatccaacttacaagggatgtgaaggacctcttcaaggagaactacaaaccactgctcaaggaaataaaagaggatacaaacaaatggaagaacattccatgctcatgggtaggaagaatcaatatcgtgaaaatggccatactgcccaaggtaatttacagattcaatgccatccccatcaagctaccaatgactttcttcacagaattggaaaaaactactttcaagttcatgtggaaccaaaaaagagcctgcatggccaaggcaatcctaagccaaaagaacaaagctggaggcatcacactacctgacttcaaactatactacaaggctacagtaaccaaaacagcatggtactggtaccaaaacagagatatagatcaatggaacagaacagagccctcagaaataacgccgcatatctacaactatctgatctttgacaaacctgagaaaaacaagcaatggggaaaggattccctatttaataaatggtgctgggaaaactggctagccatatgtagaaagctgaaactggatcccttccttacaccttacacaaaaatcaattcaagatggattaaagacttaaacgttagacctaaaaccataaaaaccctagaagaaaacctaggcattaccattcaggacataggcatgggcaaggacttcatgtctaaaacaccaaaagcaatggcaacaaaagacaaaattgacaaatgggatctaattaaactaaagagcttctgcacagccaaagaaactaccatcagagtgaacaggcaacctacaaaatgggaaaaaattttcgcaacctactcatctgacaaagggctaatatccagaatctacaatgaactcaaacaaatttacaagaaaaaaacaaacaaccccatcaaaaagtgggcaaaggacatgaacagacacttctcaaaagaagacatttatgcagccaaaaaacacatgaaaaaatgctcatcatcactggccatcagagaaatgcaaatcaaaaccacaattagataccatctcacaccagttagaatggcaagcattaaaaagtcaggaaacaacagtctcgtttctgatgcccccaacatactccatcagaaaaatcaatctgaacttcagctgaggacagagttaaagctttccctaggatcatgtgtggttggattgggggttgaagtctttctttcagagcaaggcactattaccatgaggactatgctaagaatgtatgagagaaagcaagagagagctgtctcagacaacctctcattcccatctggatctcccactgaacaagaatacgataagtgcatggattctacgtgtttccagtccttgagcagtgattgctcatggccagtgcacaaagtggctttggattgtttggctcccgagcagtctgacaacaaccagagaaggcttggagcatgggcccagaatgtcaggatacccaagagagtggaggaagaattgggagaactaaatataggcctcctttggcctaagcatgcaactgctgcaaaggttactctgatggagcccatcaatgttgatgtgagggaaagaggggcatctatattccactgctggcttgagctgggtcctgaacactgtcctttcctggtcttgctggcgaaggcatcctgtgccagcaggcagcttcattgccttcctctcctctccgagcccctacgtagccatcctgcttatcaggtgcacacagttctggtcagcagccttgcccatgaagtcatgcctgtggctccactgagaaattcgattaagtattccaatactgctgtgaaacgaagtgatctgattccggtgcacaggagagagggtgcgtgcacctttgtacagtggagaagcacacacctgcttcctgcaccccctggtgtctctcagaaccaccagccagaggagagggtaccgggaagcaaatgggggctaggtttgacaaacgctggatgcctgtgttcagtgatggtggacatcaatggtggaaggcttccaaccttcatgcgacaagcagaccaagcactgggtttaacagttgaagatgagaagctacaaggcaagcaaaaaccagcagccaaggttaatggtcagaattcatgctgtggagtgaacagcccatcacagtctgaggcattaccatggaggatgagctttagggaacaatgggataaagacagaccagacaggacaggccgtccagaacactgcccagaaaaattcccaccacctctgccagctcctaaactgcccgtgtag

SEQ ID NO: 3976 - DNA, 3543 bp, Homo sapiens
  SIMILAR (1447)..(3276): 981254mologous to Homo sapiens putative p150,accession number U93574,Smith-Waterman Score=3162.
atggagctgaaaaccaaggctcgagaactacgtgaagaatgcagaagccttaggagccgatgcgatcaactggaagaaagggtatcagcaatggaagatgaaatgaatgaaatgaagcgagaagggaagtttagagaaaaaagaataaaaagaaatgagcaaagcctccaagaaatatgggactatgtgaaaagaccaaatctacgtctgattggtgtacctgaaagtgatgtggagaatggaaccaagttggaaaacactctgcaggatattatccaggagaacttccccaatctagcaaggcaggccaacattcagattcaggaaatacagagaacgccacaaagatactccttgagaagagcaactccaagacacataattgtcagattcaccaaagttgaaatgaaggaaaaaatgttaagggcagccagagagaaagacagatcaacgagacagaaagtcaacaaggatacccaggaattgaactcagctctgcaccaagcggacctaatagacatctacagaactctccaccccaaatcaacagaatatacatttttttcagcaccacaccacacctattccaaaactgaccacatagttggaagtaaagctctcctcagcaaatgtaaaagaacagaaattataacaaactatctctcagaccacagtgcaatcaaactagaactcaggattaagaatctcactaaaagccgctcaactacatggaaactgaacaacctgctcctgaatgactactgggtacataacgaaatgaaggcagaaataaagatgttctttgaaaccaacgagaacaaagacaccacataccagaatctctgggacgcattcaaagcagtgtgtagagggaaatttatagcactaaatgcctacaagagaaagcaggaaagatccaaaattgacaccctaacatcacaattaaaagaactagaaaagcaagagcaaacacattcaaaagctagcagaaggcaagaaataactaaaatcagagcagaactgaaggaaatagagacacaaaaaacccttcaaaaaatcaatgaatccaggagctggttttttgaaaggatcaacaaaattgatagaccgctagcaagactaatgaagaaaaaaagagagaagaatcaaatagacacaataaaaaatgataaaggggatatcaccaccaatcccacagaaatacaaactaccatcagagaatactacaaacacctctatgcaaataaactagcaaatctagaagaaatggatacattcctcgacacatacactctcccaagactaaaccaggaagaagttgaatctctgaatagaccaataacaggatctgaaattgtggcaataatcaatagtttaccaaccaaaaagagtccaggaccagatggattcacagccgaattctaccagaggtacaaggaggaactgccgggcagagacacaaccaaaaaagagaattttagaccaatatccttgatgaacattgatgcaaaaatcctcaataaaatactggcaaaccgaatccagcagcacatcaaaaagcttatccgccatgatcaagtgggcttcatccctgggatgcaaggctggttcaatatacgcaaatcaataaatgtaatccagcatataaacagagccaaagacaaaaaccacatgattatctcaatagatgcagaaaaagcctttgacaaaattcaacaacccttcatgctaaaaactctcaataaattaggtattgatgggacgtatttcaaaataataagagctatctatgacaaacccacagccaatatcatactgaatgggcaaaaactggaagcattccctttgaaaactggcacaagacagggatgtcctctctcaccgctcctattcaacatagtgttggaagttctggccagggcaatcaggcaggagaaggaaataaagggtattcaattaggaaaagaggaagtcaaattgtccctgtttgcagacgacatgattgtttatctagaaaaccccattgtctcagcccaaaatctccttaagctgataagcaacttcagcaaagtctcaggatacaaaatcaatgtacaaaaatcacaagcattcttatacaccaacaacagacaaacagagagccaaatcataagtgaactcccattcacaattgcttcaaagagaataaaatacctaggaatccaacttacaagggatgtgaaggacctcttcaaggagaactacaaaccactgctcaaggaaataaaagaggacacaaacaaatggaagaacattccatgctcatgggtaggaagaatcaatatcgtgaaaatggccatactgcccaaggtaatttacagattcaatgccatccccatcaagctaccaatgactttcttcacagaattggaaaaaactactttaaagttcatatggaaccaaaaaagagcccgcatcgccaagtcaatcctaagccaaaagaacaaagctggaggcatcacactacctgacttcaaactatactacaaggctacagtaaccaaaacagcatggtactggtaccaaaacagagatatagatcaatggaacagaacagagccctcagaaataatgccgcatatctacaactatctgatctttgacaaacctgagaaaaacaagcaatggggaaaggattccctatttaataaatggtgctgggaaaactggctagccatatgtagaaagctgaaactggatcccttccttacaccttatacaaaaatcaattcaagatggattaaagatttaaacgttagacctaaaaccataaaaaccctagaagaaaacctaggcattaccattcaggacataggcgtgggcaaggacttcatgtccaaaacaccaaaagcaatggcaacaaaagccaaaattgacaaatgggatctaattaaactaaagagcttctgcacagcaaaagaaactaccatcagagtgaacaggcaacctacaacatgggagaaaattttcgcaacctactcatctgacaaagggctaatatccagaatctacaatgaactcaaacaaatttacaagaaaaaaacaaacaaccccatcaaaaagtgggtgaaggacatgaacagacacttctcaaaagaagacatttatgcagccaaaaaacacatgaaaaaatgctcatcatcactggccatcagagaaatgcaaatcaaaaccactatgagatatcatctcacaccagttagaatggcaatcattaaaaagtcaggaaacaacaggatgcagagccacaaaaactttccaacaatcgctgatgggactgcaaaaggtagagacactatggaaaacagggtagcagtttctcataaaggtgtacatggaagaggaacatggcatacaagtcaagaggacctgctcaaagatgttggctgcttcaagcagtacacagccgaactgggtcctgttacaactgcagctgcttcccatatctacgggatccccattggtgtggtgctgaccgcctggaagtcctgcagggactcctaa

SEQ ID NO: 3977 - DNA, 3291 bp, Homo sapiens; identical to SEQ ID NO: 2324
  SIMILAR (1099)..(2649): 961254mologous to Homo sapiens putative p150,accession number U93564,Smith-Waterman Score=2592.

SEQ ID NO: 3978 - DNA, 3693 bp, Homo sapiens
  SIMILAR (836)..(976): 911254mologous to Homo sapiens unknown,accession number AF148856,Smith-Waterman Score=227.
atggggaaaaaacaggacagaaaaactggaaactgtaaaacgcagagcgcctctcctcctccaaaggaacgcagttcctcaccagcaacggaacaaagctggatggagaatgactttgacgagctgagagaagaaggcttcagacgatcaaattactctgagctacgggaggacattcaaacgaaaggcaaagaagttgaaaactttgaaaaaaatttagaagaatgtataactagaagaaccaatacagagaagtgcttaaaggagctgatggagctgaaaaccaaggctcgagaactacaaatatgggactatgtgaaaagaccaaatctacgtctgattggtgtacctgaaagtgatgcggagaatggaaccaagttggaaaacactctacaggatattatccaggagaacttccccaatctagcaaggcaggccaacgttcagattcaggaaatacagagaacgccacaaagatactcctcgagaagagcaactccaagacacataattgtcagattcaccaaagttgaaatgaaggaaaaaatgttaagggcagccagagagaaaggtcgggttaccctcaaagggaagcccatcagactaacagcggatctctcggcagaaaccctacaagctagaagagagtgggggccaatattcaacattcttaaagaaaagaattttcaacccagaatttcatatccagccaaactaagcttcataagtgaaggagaaataaaatactttacagacaagcaaatgctgagagattttgtcaccaccaggcctgccctaaaagagctcctgaaggaagcgctaagcatggaaaggaacaaccgacagatcaacgagacagaaagtcaacaaggatacccaggaattgaattcagctctgcaccaagcggacctaatagacatctacagaactctccaccccaaatcaacagaatatacattttttcagcaccacaccacacctattccaaaattgaccacatagttggaagtaaagctctcctcagcaaatgtaaaagaacagaaattataacaaactatctctcagaccacagtgcaatcaaactagaactcaggattaagaatttcactcaaagccgctcaactacatggaaactgaacaacctgctcctgaatgactactgggtacataacgaaatgaatgcagaaataaagatgttctttgaaaccaacgagaacaaagacacaacataccagaatctctgggacgcattcaaagcagtgtgtagagggaaatttatagcactaaatgcccacaagagaaagcaggaaagatccaaaattgacaccctaacatcacaattaaaagaactagaaaagcaagagcaaacacattcaaaagctagcagaaggcaagaaataactaaaatcagagcagaactgaaggaaatagagacacaaaaaacccttcaaaaaattaatgaatccaggagctggttttttgaaaggatcaccaaaagtgataggccgctagcaagactaataaagaaaaaaagagagaagaatcaaatagacacaataaaaaatgataaaggggatatcaccactgatcccacagaaatacaaactaccatcagagaatactacaaacaactctatgcaaataaactagaaaatctagaagaaatgaataaattcctcgacacatacactctcccaagactaaaccaggaagaagttgaatctctgaatagaccaataacaggatctgaaattgtggcaataatcaatagtttaccaaccaaaaagagtccaggaccagatggattcacagccgaattctaccagaggtacaaggaggaactggtaccattccttctgaaactattccaatcaatagaaaaagagggaatcctccctaactcattttatgaggccagcatcattctgataccaaagccgggcagagacacaaccaaaaaagagaattttagaccaatatccttgatgaacattgatgcaaaaatcctcaataaaatactggcaaaccgaatccagcagcacatcaaaaagcttatccaccatgatcaagtgggcttcatccctgggatgcaaggctggttcaatatacgcaaatcaataaatgtaatccagcatataaacagagccaaagacaaaaaccacatgattatctcaatagatgcagaaaaagcctttgacaaaattcaacaacccttcatgctaaaaactctcaataaattaggtactgatgggacatatctcaaaataataagagctatctatgacaaacccacagccaatatcatactgaatgggcaaaaactggaagcattccctttgaaaactggcacaagacagggatgccctctctcaccgctcctattcaacatagtgttggaagttctggccagggcaatcaggcaggagaaggaaataaagggtattcaattaggaaaagaggaagtcaaattgtccctgtttgcagacgacatgattgtttatctagaaaaccccattgtctcagcccaaaatctccttaagctgataagcaacttcagcaaagtctcaggatacaaaatcaatgtacaaaaatcacaagcattcttatacaccaacaacagacaaacagagagccaaatcatgagtgaactcccattcacaattgcttcaaagagaataaaatacctaggaatccaacttacaagggatgtgaaggacctcttcaaggagaactacaaaccactgctcacggaaataaaagaggatacaaacaaatggaagaacattccatgctcatgggtaggaagaatcaatatcgtgaaaacggccatactgcccaaggtaatttatagagtcaatgccatccccatcaagctaccaatgactgtcttcacagaattggaaaaaactactttaaagttcatatggaaccaaaaaagagcccgcattgccaagtcaatcctaagccaaaagaacaaagctggaggcatcacactacctgacttcaaactatactacaaggctacagtaaccaaaacagcatggtactggtaccaaaacagagatatagatcaatggaacagaacagagccctcagaaataacgccgcatacctacaactatctgatctttgacaaacctgagaaaaacaagcaatggggaaaggattccctatttaataaatggtgctgggaaaactggctagccatatgtagaaagctgaaactggatcccttccttacaccttatacaaaaatcaattcaagatggattaaagatttaaacgttagacctaaaaccataaaaaccctagaagaaaacctaggcattaccattcaggacataggcatgggcaaggacttcatgtccaaaacaccaaaagcaatggcaacaaaagctaaaattgacaaatgggatctaattaaactaaagagcttctgcacagcaaaagaaactaccatcagagtgaacagatgttcaaaaggaattccaaagagtgaaagaagaaattatcttgccacagcttgtgaagatattttgggtcaaaaactttgtaaccaaggaaaagaaagaaaggaagaaaggaagaaggaaagaaggagagaaagagaaggaaaagagagagagagagagagaaagaaaaagaaaggaaggaaggaaggagagaaagagaaagaaagaaaggtgaagaag

SEQ ID NO: 3979 - DNA, 3765 bp, Homo sapiens
  SIMILAR (994)..(2463): 951254mologous to Homo sapiens putative p150,accession number U93572,Smith-Waterman Score=2459.
atgagacagaaagtcaacaaggatacccaggaattgaactcagctctgcaccaagcagacctaatagacatctacagaactctccacccgaaatcaacagaatatacatttttttcagcaccacaccacacctattccaaaattgaccacatagttggaagtaaagctctcctcagcaaatgtaaaataacagaaattataacaaactatctctcagaccacagtgcaatcaaactagaactcaggattaagaatcccactcaaagccgctcaactacatggaaactgaacaacctgcccctgaatgactactgggtacataacgaaatgaaggcagaaataaagatgttctttgaaaccaacgagaacaaagacacaacataccagaatctctgggacacattcaaagcagtgtgtagagggaaatttatagcactaaatgcccacaagagaaagcaggaaagatccaaaattgacaccctagcatcacaattaaaagaactagaaaagcaagagcaaacacattcaaaagctagcaggaggcaagaaataactaaaatcagagcagaactgaaggaaatagagacacaaaaaacccttcaaaaaatcaatgaatccaggagctggttttttgaaaggatcaacaaaattgatagaccgctagcaagactaataaagaaaaaaagagagaagaatcaaatagacacgataaaaaatgataaaggggatatcaccactgatcccacagaaatacaaactagcatcagagaatactacaaacacctctacgcaaataaactagaaaatctagaagaaatggataaattcctcgacacatacaccctcccaagactaaaccaggaagaagttgaatctctgaatagaccaataacaggagctgaagttgtggcaataatcaatagtttaccaaccaaaaagagtccaggaccagagaattttagaccaatatccttgatgaacattgatgcaaaaatcctcaataaaatactgggagccaaagacaaaaaccacatgattatctcaatagatgcagaaaaagcctttgacaaaattcaacaacccttcatgctaaaaactctcaataaattaggtattgatgggacgtatttcaaaataataagagctatctatgaccaacccacagccaatatcatactgaatgggcaaaaactggaagcattccctttgaaaactggcacaagacagggatgccctctctcaccactcctattcaacatagtgttggaagttctggccagggcaattaggcaggagaaggaaataaagagtattcaattaggaaaagaggaagcgaaattgtccctgtttgcagacaaaatgattgtatatctagaaaaccccattgtctcagcccaaaatctccttaagctgataagcaacttcagcaaagtctcaggatacaaaatcaatgtacaaaaatcacaagcattcttatacaccaacaacagacaaacagagagccaaatcatgagtgaactcccattcacaattgcttcaaagagaataaaatacctaggaatccaacttacaagggatgtgaaggacctcttcaagcagaactacaaaccactgctcaaggaaataaaagaggatacaaacaaatggaagaatattccatgctcatgggtaggaagaatcaatatcgtgaaaatggccatactgcccaaggtaatttacagattcaatgccatccccatcaagctaccaatgcctttcttcacagaattggaaaaaactactttaaagttcatatggaaccaaaaaagagcccgcatcgccaagtcaatcctaagccaaaagaacaaagctggaggcatcacactacctgacttcaaactatactacaaggctacagtaaccaaaacagcatggtactggtaccaaaacagagatatagatcaatggaacagaacagagccctcagaaataatgccgcatatctacagctatctgatctttgacaaacctgagaaaaacaagcaatggggaaaggattccctatttaataaatggtgctgggaaaactggctagccatatgtagaaagctgaaactggatcccttccttacaccttatacaaaaatcaattcaagatggattaaagacttaaacgttagacctaaaaccataaaaaccctagaagaaaacctaggcatcaccattcaggacctaggcatgggcaaggacttcatgtccaaaacaccaaaagcaatggcaacaaaagacacaattgacaaatgggatctaattaaactaaagagcttctgcacagcaaaagaaactaccatcagaatgaacaggcaacctacaaaatgggagaaaattttcacaagctactcatctgacaaagggctaatatccagaatctacaatgaactcaaacaaatttacaagaaaaaaacaaacaaccccatcaaaaaatgtcaacaggcctcacagctgaaggctttacccacccaatcctgctccccctcttctaacagctatgaaaccttcctagtttcaccccttcacccgttccagttttacataagttttcctcactacacagagatggttcctcccttgacacctgaggattacaattcgagaggagattttggtggggacacagagacaaaccatattatttcaaagttccacaggtctctagagcaggtgcaaaatgctgccagtcggaggagccaagatggccgaataggaacagctccggtctacagctcccagcgtgagcgacgcagaagacgggtgatttctgcatttccatctgaggaacgcagttcctcaccagcaatggaacaaagctggatggagaatgactttgaggagctgagagaagaaggcttcagacgatcaaattactctgagctacgggaggacattcaaaccaaaggcaaagaagttgaaaactttgaacaaaatttagaagaatgtataactagaataaccaatacagagaagtgcttaaaggagctgatggagctgaaaaccaaggctcgagaactacgtgaagaatgcagaagcctcaggagccgatgtgatcaactggaagaaaggatatcagtgatggaagatgaaatgaatgaaatgaagcgagaagggaagtttagagaaaaaagaataaaaagaaatgagcaaagcctccaagaaatatgggactatgtgaaaagaccaaatctacgtctgattggtgtacctgaaagtgatggggagaatggaaccaagttggaaaacactctgcagcatattatccaggagaacttccccaatctagcaaggcaggccaacgttcagattcaggaaattcagagaacgccacaaagatactcctcgagaatagcaattccaagacacataattgtcagattcaccaaagttgaaatgaaggaaaaaatgttaagggcagccagagagaaaggtcgggttaccctcaaagggaagcccatcagactaacagcagatctctcggcagaaaccctacaagccagaagagagtgggggccaatattcaacattcttaaagaaaataattttcaacccagaatttcatatccagccaaactaagcttcataagtgaagaagaaataaaataccttacagacaagcaaatggtgagagattttgtcaccaccaggcctgccctaaaagagctcctgaaggaagcactaaacatggaaaggaacaaccggtaccagctgctgcaaaatcatgccaaattctaa

SEQ ID NO: 3980 - DNA, 4794 bp, Homo sapiens
  SIMILAR (1435)..(2874): 971254mologous to Homo sapiens putative p150,accession number U93563,Smith-Waterman Score=2534.
atgggagactttaacaccccactgtcaacattagacagatcaacgagacagaaagtcaacaaggatacccaggaactgaactcagctctgcaccaagcggacctaatagacatctacagaacactccaccccaaatcaacagaatatacatttttttcagcaccacaccacacctattccaaaattgaccacatactgggaagtaaagctctcctcagcaaatgtaaaagagcagaaattataacaaactatctctcagaccacagtgcaatcaaactagaactcaggattaagaatctcactcaaagccgctcaactacatggaaactgaacaacctgctcctgaatgactactgggtaaataacgaaatgaaggcagaaataaagatgttctttgaaaccaaagagaacaaagacacaacataccagaatctctgggacgcattcaaagcagtgtgtagagggaaatttatagcactaaatgcgcacaagagaaagcaggaaagatctaaaattgacaccctaacatcacaattaaaagaactagaaaagcaagagcaaacacattcaaaagctagcagaaggcaagaaataactaaaatcagagcagaactgaaggaaatagagacacaaaaaacccttcaaaaaatcaatgaatccaggagctggttttttgaaaggatcaacaaaattgatagaccgctagcaagactaataaagaaaaaaagagagaagaatcaaatagacacaataaaaaatgataaaggggatatcaccactgatcccacagaaatacaaactaccatcagagaatactacaaacacctctacgcaaataaactagaaaatctagaacaaatggatgcattcctcgacacatacactctcccaagactaaaccaggaagaagttgagtctctgaatagaccaataacaggagctgaaattgtggcaataatcaatagtttaccaaccaaaaagagtccaggaccagatggattcacagccgaattctcccagaggtacaaggaggaactggtaccattccttctgaaactattccaatcaatagaaaaagagggaatcctccctaactcattttatgaggccagcatcattctgataccaaagccaggcagagacacaaccaaaaaagagaattttagaccaatatccttgatgaacatcgatgcaaaaatcctcaataaaatactggcaaaccgaatccagcagcacatcaaaaagcttatccaccatgatcaagtgggcgtcatccctgggatgcaaggctggttcagtatacgcaaatcaataaatgtaatccagcatataaacagagccaaagacaaaaaccatatgattatctcaatagatgcagaaaaagcctttgacaaaattcaacaacccttcatgctaaaaactctcaataaattagcccaaaatctccttaagctgataagcaacttcagcaaagtctcaggatacaaaatcaatgtacaaaaatcacaagcattcctatacaccaacaacagacaaacagagagccaaatcatgagtgaactcccattcacaattgcttcaaagagaataaaatacctaggaatccaacttacaagggatgtgaaggacctcttcaaggagaactacaaaccactgctcaaggaaataaaagaggatacaaacaaatggaagaacattccatgctcatgggtaggaagaatcaatatcgtgaaaatggccatactgccccaggtaatttacagattcaatgccatccccatcaagctaccaatgactttcttcacagaattggaaaaaactactttcaagttcatatggaaccaaaaaagagcccgcatcgccaagtcaatcctaagccaaaagaacaaagctggaggcatcacactacctgacttcaaactatactacaaggctacagtaaccaaaacagcatggtactggtaccaaaacagagatatagatcaatggaacagaacagagccctcagaaataacgccgcttacctacaactatctgatctttgacaaacctgacaaaaacaagcaatggggaaaggattccctatttaataaatggtgctgggaaaactggctagccatatgtagaaagctgaaactggatcccttccttatgccttatacaaaaattaattcaagatggattaaagatttaaacattagacctaaaaccataaaaaccctagaagaaaacctaggcattaccattcaggacataggcatgggcaaggacttcatgtccaaaacaccaaaagcaatggcaacaaaagccaaaattgacaaatgggatctaattaaactaaagagcttctgcacagcaaaagaaactaccatcagagtgaacaggcaacctacaacatgggagaaaattttcgcaacctactcatctgacaaagggctaatagccagaatctacaatgaactcaaacaaatttacaagaaaaaaacaaacaaccccatcaaaaagtgggcgaaggacatgaacagacacttctcaaaagaagacatttatgcagccaaaaaacacatgaagaaatgctcatcatcactggccatcagagaaatgcaaatcaaaaccactatgagatatcatctcacaccagttagaatggcaatcatgaaaaagtcaggaaacaacaggtgctggagaggatgtggagaaataggaacacttttacactgttggtgggactgtaaactagttcaaccattgtggaagtcagtgtggcgattcctcagggatctagaactagaaataccatttgacccagccatcccattactgggtatatacccaaaggactataaatcatgctgctataaagatacatgcacacctctcaagaaacacatcagctttcatctttatcagtatgacactgacatgataggaaatgctgggctggtgattcagcagccatccattttacagtcagaggacaagtcgtacaatggtggaggaataggttcttcaaataggatcatggacttcttggaggagccaatccctggtgtagggacctatgatgatttcaatacaattgattgggtgagagagaagtctcgagaccgggataggcaccgagagggagcctttgcctacatagtcaattatttcatgtacgtcctctgggctctcctatttgccttccttgccgtatctcttgtcaaggtgtttgcgccttatgcctgtggctctggaatccctgagataaaaactatcttgagtggtttcattattaggggctatttgggtaagtggactctggttatcaaaaccatcaccttggtgctggcagtgtcgtctggcttgagcctgggcaaagagggccctctagtgcacgtggcttgctgctgtgggaacatcctgtgccactgcttcaacaaatacaggaagaatgaagccaagcgcagagaggtcttgtcggctgcagcagcagctggtgtatctgtagcctttggagcacctataggtggagtattattcagccttgaagaggtcagctactattttcccctcaaaacattgtggcgttcattctttgctgccttggtggcagcattcactctacgctccatcaatccatttgggaacagccgcctggtactattttatgtggagtttcacaccccatggcatctctttgagctcgtgccattcattctgctgggcatatttggtggtctgtggggagcactgtttatccgcacaaacattgcctggtgtcggaagcgaaagaccacccagttgggcaagtatcctgttatagaggtactcgtcgtgacagccatcactgccatcctggctttccccaatgaatacactcggatgagcacaagtgagctcatttctgagctgtttaatgactgtggccttctggactcctccaagctctgtgattatgagaaccgtttcaacacaagcaaagggggtgaactgcctgacagaccggctggcgtgggagtctacagtgcaatgtggcagctggctttaacactcatactgaaaattgtcattactatattcacctttggcatgaagatcccttctggcctctttatccctagcatggctgttggtgctatagcaggtcgacttctaggagtaggaatggaacagctggcttattaccaccaggaatggaccgtcttcaatagctggtgtagtcagggagctgattgcatcacccccggcctttatgcaatggttggggctgcagcctgcttagccaaagaagagtttgctcataagaccctggcaatggatgtgatgaaaccccggagaaatgatcctttgttgactgtccttactcaggacagtatgactgtggaagatgtagagaccataatcagtgaaaccacttacagtggcttcccagtggtggtatcccgggagtcccaaagacttgtgggctttgtcctccgaagagatctcattatttcaattgaaaatgctcgaaagaaacaggatggggttgttagcacttccatcatttatttcacggagcattctcctccattgccaccatacactccacccactctaaagcttcggaacatcctcgatctcagccccttcactgtgactgaccttacacccatggagatcgtagtggatattttccgaaagctgggactgcggcagtgcctggttacacacaacgggcgattgcttggaatcattaccaaaaaggatgtgttaaagcatatagcacagatggcgaaccaagatcctgattccattctcttcaactag

SEQ ID NO: 3981 - DNA, 3300 bp, Homo sapiens
  SIMILAR (1627)..(3297): 971254mologous to Homo sapiens putative p150,accession number U93563,Smith-Waterman Score=2950.
atgggagactttaacaccccactgtcaacattagacagatcaacgagacagaaagtcaacaaggatacccaggaattgaactcagctctgcaccaagcagacctaatagacatctacagaactctccaacccaaatcaacagaatatacatttttttcagcaccacaccacacctattccaaaattgaccacatagttggaagtaaagctctcctcagcaaatgtaaaagaacagaaattataacaaactatctctcagaccacagtgcaatcaaactagaactcaggattaagaatctcactcaaagccgctcaactacatggaaactgaacaacctgctcctgaatgactactgggtacataacgaaatgaaggcagaaataaagatgttctttgaaaccaacgagaacaaagacacaacataccagaatctctgggacgcattcaaagcagtgtgtagagggaaatttatagcactaaatgcccacaagagaaagcaggaaagatccaaaattgacaccctaacatcacaattaaaagaactagaaaagcaagagcaaacacattcaaaagctagcagaaggcaagaaataactaaaatcagagcagaactgaaggaaatagagacacaaaaaacccttcaaaaaatcaatgaatccaggagctggttttttgaaaggatcaacaaaattgatagaccactagcaagactaataaagaaaaaaagagagaagaatcaaatagacacaataaaaaatgataaaggggatatcaccactgatcccacagaaatacaaactaccatcagagaatactacaaacacctctacgcaaataaactagaaaatctagacgaaatggataaattcctccacacatacactctcccaagactaaaccaggaagaagttgaatctctgaatggaccaataacaggagctgaaattgtggcaataatcgatagtttaccaaccaaaaagagtccaggaccagatggattcacagctgaattctaccagaggtacaaggaggaactggtaccattccttctgaaactattccaatcaatagaaaaagagggaatcctccctaactcattttatgaggccagcatcattctgataccaaagctgggcagagacacaaccaaaaaagagaattttagaccactatccttgatgaacattgatgcaaaaatcctcaataaaatactggcaaaacgaatccagcagcacatcaaaaagcttatccaccatgatcaagtgggcttcatccctgggatgcaaggctggttcaatatacgcaaatcaataaatgtaatccagcatataaacagaggcaaagacaaaaaccacatgattatctcaatagatgcagaaaaagcctttgacaaaattcaacaacccttcatgctaaaaactctcaataaattaggtattgatgggacgtatttcaaaataataagagctatctatgacaaacccacagccaatatcatactgaatgggcaaaaactggaagcattccctttgaaaactggcacaagacagggatgccctctctcaccactcctattcaacatagtgttggaagttctggccagggcaattaggcaggagaaggaaataaagctgataagcaacttcagcaaagtctcaggatacaaaatcaatgtacaaaaatcacaagcattcttatacaccaacaacagacaaacagagagccaaatcatgagtcaactcccattcacaattgcttcaaagagaataaaatacctaggaatccaacttacaagggatgtgaaggacctcttcaaggagaactacaaaccactgctcaaggaaataaaagaggatacaaacaaatggaagaacattccatgctcatgggtaggaagaatcaatatcatgaaaatggccatactgcccaaggtaatttacagattcaatgccatccccatcaagctaccaatgactttcttcacagaattggaaaaaactactttcaagttcatatggaaccaaaaaagagcctgcatcaccaagtcaatcctaagccaaaagaacaaagctggaggcatcacgctacctgacttcaaactatactacaaggctacagtaaccaaaacagcatggtactggtaccaaaacagagatatagatcaatggaacagaacagagccctcagaaataatgctgcatatctacaactatctgatctttgacaaacctgagaaaaacaagcaatggggaaaggattccctatttaataaatggtgctgggaaaactggctagccatatgtagaaagctgaaactggatcccttccttacaccttatacaaaaatcaattcaagatggattaaagatttaaacgttagacctaaaaccataaaaaccctagaagaaaacctaggcattaccattcaggacataggcatgggcaaggacttcatgtccaaaacaccaaaagcaatggcaacaaaagccaaaattgacaaatgggatctaattaaactaaagagcttctgcacagcaaaagaaactaccatcagagtgaacaggcaacctacaaaatgggagaaaattttcgcaacctactcatctgacaaagggctaatatccagaatctacaatgaactcaaacaaatttacaagaaaaaaacaaacaaccccatcaaaaagtgggcgaaggacatgaacagacacttctcaaaagaagacatttatgcagccaagaaacacatgaaaaaatgctcatcatcactggccatcagagaaatgcaaatcaaaaccacaatgagataccatctcacaccagttagaatggcaatcattaaaaagtcaggaaacaacaggtgctggagaggatgtggagaaataggaacacttttacactgttggtgggactgtaaactagttcaaccattgtggaagtcagtgtggcgattcctcagggatctagaactagaaataccatttgacccagccatcccattactgggtatatacccaaaggactataaatcatgctgctataaagacacatgcacacgtatgtttattgcggcattattcacaatagcaaagacttggaaccaacccaaatgtccaacaatgatagactggattaagaaaatgtggcacatatacaccatggaatactatgcagccataaaaaatgatgagttcatgtcctttgtagggacatggatgaaattggaaatcatcattctcagtaaactatcacaagaacaaaaaaccaaacacggcatattctcactcataggtgggaattga

SEQ ID NO: 3982 - DNA, 5175 bp, Homo sapiens
  SIMILAR (1)..(3096): 971254mologous to Homo sapiens unknown,accession number AF149422,Smith-Waterman Score=5241.
atggtaaagggatcaattcaacaagaggagctaactatcctaaatatttatgcacccaatacaggagcacccagattcataaagcaagtcctgagtgacctacaaagagacttagactcccacacattaataatgggagactttaacaccccactgtcaacattagacagatcaacgagacagaaagtcaacaaggatacccaggaattgaactcagctctgcaccaagcagacctaatagacatctacagaactctccaccccaaatcaacagaatatacatttttttcagcaccacaccacacctattccaaaattgaccacatacttggaagtaaagctctcctcagcaaatgtaaaagaatagaaattataacaaactatctctcagaccacagtgcaatcaaactagaactcaggattaagaatctcactcaaagccgctcaactacatggaaactgaacaacctgctcctgaatgactactgggtacataacgaaatgaagacagaaataaagatgttctttgaaaccaacgagaacaaagacaccacataccagaatctctgggacgcattcaaagcagtgtgtagagggaaatttatagcactaaatgcctacaagagaaaggaggaaagatccaaaattgacaccctaacatcacaattaaaagaactagaaaagcaagagcaaagacattcaaaacctagcagaaggcaagaaataactaaaatgagagcagaactgaaggaaatagagacacaaaaaacccttcaaaaaatcaatgaatccagtagctggttttttgaaaggatcaacaaaattgatagaccgctagccagactaataaagaaaaaaagagagaagaatcaaatagacacaataaaaaatgataaaggggatatcaccaccgatcccacagaaatacaaactaccatcagagaatactacaaacacctctacacaaataaactagaaaatctagaagaaatggatacattcctcgacacatacactctcccaagactaaaccaggaagaagttgaatctctgaatagaccaataacaggctctgaaattgtggcaataaccaatagcttaccaaccaaaaagagtccaggaccagaaggattcacagccgaattctaccagaggtacaaggaggaattggtaccattccttctgaaactattccaatcaatagaaaaagagggaatcctccctaactcattttatgaagccagcatcattctgataccaaagccgggcagagacacaaccaaaaaagagaattttagaccaatatccttgataaacattgatgcaaaaatcctcaataaaatactggcaaaccgaatccagcagcacatccaaaagcttatccaccatgatcaagtgggcttcatccctgggatgcaaggctggttcaatatacgcaaatcaataaatgtaatccagcatataaacagagccaaagacaaaaaccacatgattatctcaatagatgcagaaaaagcctttgacaaaattcaacaacgcttcatgctaaaaactctcaataaattaggtattgatgggacgtatttcaaaataataagagctatctatgacaaacccacagccaatatcatactgaatgggcaaaaactggaagcattccctttcaaaactggcacaagacagggatgccctctctcaccactcctattcaacatagtgttggaagttctggccagggcaatcaggcaggagaaggaaataaagggtattcaattaggaaaagaggaagtcaaattgtccctgtttgcagacgacatgattgtttatctagaaaaccccatcgtctcagcccaaaatctccttaagctgataagcaacttcagcaaagtctcaggatacaaaatcaatgtacaaaaatcacaagcattcttatacaccaacaacagacaaacagagagccaaatcatgagtgaactcccattcacaattgcttcaaagagaataaaatacctaggaatccaatttacaagggatgtgaaggacctcttcaaggagaactacaaaccactgctcaaggaaataaaagaggacacaaacaaatggaagaacattccatgctcacgggtaggaagaatcaatatcgtgaaaatggccatactgcccaaggtaatttacagattcaatgccatccccatcaagctaccaatgactttcttcacagaattggaaaaaactactttaaagttcatatggaaccaaaatagagcccgcatcgccaagtcaatcctaagccaaaagaacaaagctggaggcatcacactacctgacttcaaactatactacaaggctacagtaaccaaaacagcatggtactggtaccaaaacagagatatagatcaatggaacagaacagagccctcagaaataatgccgcatatctacaactgtctgatctttgacaaacctgagaaaaacaagcaatggggaaaggattccctatttaacaaatggtgctgggaaaactggctagccatatgtagaaagctgaaactggatcccttccttacaccttataccaaaatcaattcaagatggattaaagatttaaacgttagacctaaaaccataaaaaccctagaagaaaacctaggcattaccattcaggacataggcgtgggcaaggacttcatgtccaaaacaccaaaagcaatggcaacaaaagccaaaattgacaaatgggatctaattaaactaaagagcttctgcacagcaaaagaaactaccatcagagtgaacaggcaacctacaacatgggagaaaattttcgcaacctactcatctgacaaagggctaatatccagaatctacaatgaactcaaacaaatttacaagaaaaaaacaaataaccccatcaaaacgtgggcgaaggacatgaacagacacttctcaaaagaagacatttatgcagccaaaaaacacatgaagaaatgctcatcatcactggccatcagagaaatgcaaatcaaaaccactatgagatatcatctcacaccagttagaatggcaatcattaaaaagtcaggaaacaacaggtggaatattggtggacttgtccccaagttaaattatgatttaaagagacacttagaaaaagaggaaaagcctactaaaactgagcaggctatcagcaaagacaaaaatgcagagaagaacaaccgtttatctcttcagggagaaattattattgcaattatattgataacagaacctgggttgaaagggagaggaatcccaattttcataattgaagatggaggaacaagttatgtggttgctctgcagatactatgcaaattagttgaactaactcagaaaccagttgatcagccctttgattacatttgtggtgtgagcacagctttactcctgaagtcagcaagaccacgaacccactggaaggaagaagctccagacacatctgaacatctgaaggaacaaactccggacacaccatctttaagaactgtaacactcactgctagagtctgcggcttcattcttgaagtcagcgagaccaagaactcaccggaaggaaccaattccggacatattttgacatcccagatgggactatcacctattgccaagcggagggaaactagtgcttctgctgctgcgttggtgagtgcaactattccaatctgcagggtccagggaccattgcgggttcttgggcaagaggtgtttctgctgctgcttcgccttcctacagctccccttcctattaatgataagcctcctctaatctcccctgcccagaaggaaacaagcaaagaaatctccaaaggaccacaaaaacccctgggctatcggttatgtccccttcaagcagtagggggaggggaatttggcctaacccgggtacatgtccccttctccctctatgatttaaagcagatcaaggcagacttggggaagttttcagatgatcctgataggtacatagatgtcctacagggtctagggcaaactttctatctcacttggagagatgtcatgctattgttagatcaaaccctggcctttaatgaaaagaacgcagctttagctgcagcccgagagtttggagatatctgggaccaaggggaacagtccaaaaaggaaaagcaagatcagagaaagaccgtagccttagtcatggccctcagacaaataaaccttggtggttcagagaggacagaaaatggagcaggtcaatcagccgggtttagggatagccctcaactgtttggtcaggcactggcccaagatctaggccacttctcaagtccaggcactcttgtccttcaatatgtggatgatttacttttggctaccagtttggaagcctcatgccagcaggctactctagatctcttgaactttctagctaatcaagggtacaaggtgtctaggtcgaaggcccagctttgcctacagcaggtcaaatatctaggcctaatcttagccagagggaccagtgcccagttagcagaactactggcacttaccctagccttagaactgggaaatggaaaaagaataaatgtgtatacagatagcaagtatgcttatctaatcctgcatgatcatgctgcaatatggaaagaaagggcgttcttaacctctgggggaacccccattaaataccacaaggaaattatggagttattgcacacagtgcaaaaacccaaggaagtggcagtcttacactgccaaagccatcaacaagctcaaggctctgtggctctacaatcagcagatggaaaaggcagccaggcttttgtcattttcttcaagtcagcaggttccctctggccaaagatatgttcagaaatgccatccaggatccatggcctggaaatggaagccttcagaatccacttggtgctctattccactgtggctgaggtggaacccaaaaaacaagacaaaattcttctcactattcccacccatttttataagcacatgagtctctctccacgaccaccactggcccaggcccacagaatggagcttcctgagagtcgaactgcagtgattgtttttgctcttctggatctagccacccagtggagctaccgagctctgggctggtactggggactgtctgcaaagagtcctgtgatgtaa

SEQ ID NO: 3983 - DNA, 3033 bp, Homo sapiens
  SIMILAR (712)..(2907): 941254mologous to Homo sapiens putative p150,accession number U93563,Smith-Waterman Score=3584.
atggggaaaaaacagagcagaaaaaccggaaactctaaaaagcagagcgcctctcctcctccaaaggaatgcagctcctcaccagcaacggaacaaagctggacggagaatgactttgacgagttgagagaagaagacttcagacgatcaaactactccgagctacaggaggaaattcaaaccaaaggcaaagaagttgaaaactttgaaaaaaattcagacgaatgtataactggaataaccaatacagagaagtgcttaaaggagctgacggagctgaaagccaaggctcgagaactacatgaagaacgcagaagcctcaagagccgatgcgatcaactggaagaaagggtatcagtgatggaagacaaaatgaatgaaatgaagcgagaagggaagtttagagaaaaaagaataaaaagaaacaaacaaagcctccaagaaatatgggactatgtgaaaagaccaaatctacgtctgattagtgtacctgaaagtgacagggagaatggaaccaagttggaaaacactctgcaggatattatccaggagaacttccccaatctagcaaggcaggccaacattcagattcaggaaatacagagaacgccacaaagatactcctcgagaagagcaactccaaggcacataattgtcagattcagcaaagttgaaatgaaggaaaaaatgttaagggcagccagagagaaagaaatacaaactaacatcagagaatactacaaacaccgctacgcaaataaactagaaaatctagaagaaatggataaattcctcaacatatacacccttcgaagactaaaccaggaagaagttgaatctctgaacagaccaataagaggctctgaaattgtggcaataatcaatagtttaccaaccaaaaagagtccaggaccagatggattcacagccgaatactaccagaggtataaggaggaactggtaccattccttctgaaactattccaatcaatagaaaaagagggaatcctccctaactcattttatgaggccagcatcatcctgataccaaagccgggcagagacacaaccaaaaaagagaattttagaacaatatccttgatgaacattgatgcaaaaatcctcaataaaatactggcaaaccgaatccagcagcacatcaaaaagcttatccaccatgatcaagtgggcttcatccctgggatgcaaggctggttcaatatacgcaaatcaataaatgtaatccagcatataaacagaaccaaagacaaaaaccacgtgattatctcaatagatgcagaaaaggcctttgacaaaattcaacaactcttcttgctaaaaactctcaataaattaggtattgatgggacatatctcaaaataaaaagagctatctatgacaaacccacagccaatatcatactgaatgggcaaaaactggaagcattccctttgaaaactggcacaagacagggatgccctctctcaccactcctattcaacatagtgttggaagttctggccagggcaattaggcaggagaaggaaataaagggtattcaattaggaaaagaggaagtcaaattgtccctgtttgcagatgacatgattgtatatctagaaaaccccattgtctcagcccaaaatctccttaagctgataagcaacttcagcaaagtctcaggatacaaaatcaatgtacaaaaatcacaagcattcttatacaccaataacagacaaacagaaacccaaatcatgagtgaactcccattcacaattgcttcaaagagaataaaatacctaggaatccaacttacaagggacgtgaaggacctcttcaaggagaactacaaaccactgctcaatgaaataaaagaggatacaaagaaatggaagaatattccatgctcatgggtaggaagaatcaatatcatgaaaatggccatactgcacaaggtaatttatagattcaatgccatccccatcaagctaccaatgactttcttcacagaattggaaaaaactactttaaagttcacatggaaccaaaaaagagcccgcattgccaagtcaatcctaagccaaaagaacaaagctggaggcatcatgctacctgacttcaaactatactacaaggctacagtaaccaaaacagcatggtactggtaccaaaacagagatatagatcaatggaacagaacagagccctcagaaataacgccgcatatctacaactatctgatctttgacaaacctgagaaaaacaagcaatggggaaaggattccctattcaataaatggtgctgggaaaactggctagccatatggagaaagctgaaactggatcccttctttacaccttatacaaaaattaattcaagatggattaaagacttaaacgttagacctaaaaccataaaaaccctagaagaaaacctaggcattaccattcaggacataggtatgggcaaggacttcatgtctaaaacaccaaaagcaatagcaacaaaagccaaaattgacaaattggatctaattaaactaaagagcttctgcacagcaaaagaaactaccatcagagtgaacaggcaacctacagaatgggagaaaattttcgcaacctactcatctgacaaagggctaatatccagaatctacaatgaactcaaacaaatttacaagaaaaaaacaaacaaccccatcaaaaagtgggcaaaggacatgaacagacacttctcaaaagaagacatttatgcagccaaaaaacacatgaaaaaatgctcaccatcactggctatcagagaaatgcaaatcaaaaacacaatgagataccatctcacaccacttagaatggcaatcattaaaaagtcaggaaacaacagagcctcaaggtcagccagaggtgagagcttagggccttctcaatcctttcctgagcacgtgcattgccctgggccgttgcacacagccctacacagacccatgacctttcagattcccagggatatgttggaagtttctagtgcccactag

SEQ ID NO: 3984 - DNA, 3471 bp, Homo sapiens
  SIMILAR (1)..(2922): 961254mologous to Homo sapiens unknown,accession number AF148856,Smith-Waterman Score=4909.
atgggagaattgatcaccccactgtcaacattagacagatcaacaagacagaaagtcaacaaggatacccaggaattgaactcagctctgcaccaaggggacctaatagacatctacagaactctccaccccaaatcaacagaatatacatttttttcagcaccacaccacacctattccaaaattgaccacatacttggaagtaaagctctcctcagcaaatgtaaaagaacagagattataacaaactatctctcagaccacagtgcaatcaaactagaactcaggattaagaatctcactcaaaaccgctcaactacatggaaactgaacaacctgctcctgaatgactactggatacataacgaaatgaaggcagaaataaagatgttctttgaaaccaatgagaacaaagacacaacataccagaatctctgggacgcattcaaagcagtgtgtagagggaaatttatagcactaaatgcccacaagagaaagcaggaaagatccaaaattgacaccctaacatcacaattaaaagaactagaaaagcaagagcaaacacattcaaaagctagcagaaggcaagaaataactaaaatcagagcagaactgaaggaaatagagacacaaaaaacccttcaaaaaattaatgaatccaggagctggttttttgaaaggatcaacaaaattgatagaccgctagcaagactaataaagaaaaaaagagagaagaatcaaatagacacaataaaaaatgataaaggggatatcgccaccaatcccacagaaatacaaactaccatcagagaatactacaaacacctctacgcaaataaactagaaaatctagaagaaatggataaattcctcgacacatacactctcccaagactaaaccaggaagaagttgaatctctgaatagaccaataacaggagctgaaattgtggcaataatcaatagtttgccaaccaaaaagagtccaggaccagatggattcacagccgaatcctaccagaggtacaaggaggaactggtaccattccttctgaaactattccaatcaatagaaaaagagggaatcctccctaactcattttatgaggccagcatcattctgataccaaagccgggcagagacacaaccaaaaaagagaattttagactaatatccttgatgaacattgatgcaaaaatcctcaataaaatactggcaaaccgaatccagcagcacatcaaaaagcttatccaccatgatcaagtgggcttcatccctgggatgcaaggctggttcaatatacgcaaatcaataaatgtaatccagcatataaacagagccaaagacaaaaaccacatgattatctcaatagatgcagaaaaagcctttgacaaaattcaacaacccttcatgctaaaaactctcaataaattaggtattgatgggacatatttcaaaataataagagctatctatgacaaacccacagccaatatcatactgaatgggcaaaaactggaagcattccctttgaaaactggcacaagacagggatgccctctctcaccactcctattcaacatagtgttggaagttctggccagggcaattaggcaggagaaggaaataaagggtattcaatcaggaaaagaggaagtcaaattgtccctgtttgcagacgacatgattgtatatctagaaaaccccattgtctcagaccaaaatctccttaagctgataagcaacttcagcaaagtctcaggatacaaaatcaatgtacaaaaatcacaagcattcttatacaccaataacagacaaacagagagccaaatcatgagtgaactcccattcacaattgcttcaaagagaataaaatacctaggaatccaacttacaagggatgtgaaggacctcttcaaggagaactacaaaccactgctcaaggaaataaaagaggatacaaacaaatggaagaacattccatgctcatgggtaggaagaatcagtatcgtgaaaatggccatactgcccaaggtaatttacagattcagtgccatccccataaagctaccaatgactttcttcacagaattggaaaaaactactttaaagttcatatggaaccaaaaaagagcccgcatcgccaaggcgatcctaagccaaaagaacaaagctggaggcatcacactacctgacttcaaactatactacaaggctacagtaaccaaaacagcacggtactggtaccaaaacagagatatagatcaatggaacagaacagagccctcagaaataacgccacatatctacaactatctgatctttgacaaacctgagaaaaacaagcaatggggaaaggattccctatttaataaatggtgctgggaaaactggctagccatatgtagaaagctgaaactggatcccttccttacaccttatacaaaaattaattcaagatggattaaagacttaaacattagacccaaaaccataaaaaccctagaagaaaacctaggcagtaccattcaggacataggcatgggcaaggacttcatgtccaaaacaccaaaagcaatggcaacaaaagacaaaattgacatatgggatctaattaaactaaagagcttctgcacagcaaaagaaactaccatcagagtgaacgggcaacctacaaaatgggagaaaattttcgcaacctactcatctgacaaagggctaatatccagaatctgcaatgaactcaaacaaatttacaagaaaaaaacaaacaaccccatcaaaaagtgggcgaaggatatgaacagacacttctcaaaagaagacatttatgcagccaaaaaacacatgaaaaaatgctcatcatcactggccatcagacaaatgcaaatcaaaaccacaatgagataccatctcacaccagaaagttccgctccacatcccatcaatcaccctaaagagaagccaggggacccgggccactcgccaatgcagggtctcctgggctcaggcagatacccgaaacttgccacctcaagcacccacttggaatgcttctgctgtcacatcactctgctctatctgccacccacaacccaaccccatgcaagctccaatcttcagtcatgtttactacatcagcagccatgcttagcgatccctggggacttaggaaggggctggggagagagatgttcagctgcaagaccaccgaaggtaaccaactggaagctggagcagctgagcaaagtctctatgcccttcccaaaccttcagaccttcagacctagcttggtgcttttccttgagcatcctagctcacatcctagtgagaccgctcctggggctgccgctgctggcacagatgggacccatgctaacacaggggaaagaagtggttctgacaagagaactagaattgctggaaaactacaaaccacacgtcatgttggtgtccatgaaacattttga

SEQ ID NO: 3985 - DNA, 3576 bp, Homo sapiens
  SIMILAR (1)..(2958): 961254mologous to Homo sapiens putative p150,accession number U93563,Smith-Waterman Score=4954.
atgggagactttaacaccccactgtcaacattagacagatcaacgaggcagaaagtcaaaaaggataaccaggaattaaactcagctctgcaccaagtggacctaatagacatctacagaactctccaccccaaatcaacagaatatacatttttttcagcaccacaccacacctattccaaaattgaccacatagttggaagtaaagctctcctcagcaattgtaaaagaacagaaattataacaagctatctctcagaccacagtgcaatcaaactagaactcaggattaagaatctcactcaaaaccgctcaactacatggaaactgaacaacctgctcctgaatgactactgggtacataacgaaatgaaggcagaaataaagatgttctttgaaaccaacgagaacaaagacacaacataccagaatctctgggacgcattcaaagcagtgtgtagagggaaatttatagcactaaatgcccacaagagaaagcaggaaagatccaaaattgacaccctaacatcacaattaaaagaactagaaaagcaagagcaaacacattcaaaagctagcagaaggcaagaaataactaaaatcagagcagaactgaaggaaatagagacacaaaaaaccctgcaaaaaattaatgaatccaggagctggttttttgaaaggatcaacaaaattgatagaccgctagcaagactaataaagaaaaaaagagagaagaatcaaatagacgcaataaaaaatgataaaggggataccaccaacgatcccacagaaacacaaactaccatcagagaatactacaaacacctctatgcaaataaactagaaaatctagaagaaatggataaattcctcgacacatacactctcccaagactaaaccaggaagaagttgaatatctgaatagaccaataacaggatctgaaattgtggcaataatcaatagcttaccaaccaaaaagagtccaggaccagatggattcacagccgaattctaccagaggtacaaggaggaactggtaccattccttctgaaactattccaatcaatagaaaaagagggaatcctccctaactcattttatgaggccagcatcattctgataccaaagccaggcagagacacaacaaaaaaagagaattttagaccaatatccttgatgaacatggatgcaaaaatcctcaataaaatactggcaaaccgaatccagcagcatatcaaaaagcttatccaccatgatcaagtgggcttcatccctgggatgcaaggctggttcaatatacgcaaatcaagaaatgtaatccagcatataaacagagccaaagacaaaaaccacatgattttctcaatagatgcagaaaagccctttgacaaaattcaacaacctttcatgctaaaaactctcaataaattaggtattgatgggacgtatttcaaaataataagagctatctatgacaaacccacagccaatatcatactgaatgggcaaaaactggaagcattccctttgaaaactggcacaagacagggatgccctctctcaccactcctattcaacatagtgctggaagttctggccagggcaattaggcaggagaaggaaataaagggtattcaattaggaaaagaagaagtcaaattgtccctgtttgcagacgacatgattgtatatctagaaaaccccattgtctcagcccaaatcttctttaagctgataagcaacttcagcaaagtctcaggaaacaaaatcaatgtacaaaaatcacaagcattcttatacaccaacaacaggcaaacagagagccaaatcatgagtcaactcccatacacaattgcttcaaagagaataaaatacctaggaatccaacttacaagggatgtgaaagacctcttcaaggagaactacaaaccactgctcaaggaaataaaagaggacacaaacaaatggaagaacattccatgctcatgggtaggaagaatcaatatcgtgaaaatggccatactgcccaaggtaatttacagattcaatgccatccccatcaagctaccaatgactttcttcacagaattggaaaaaactaccttaaagttcatatggaaccaaaaaagagcccacatcgccaagtcaatcctaagccaaaagaacaaagctggaggcatcacactacctgacttcaaactatactacaaggctacagtagccaaaacagcatggtactggtaccaaaacagagatatagatcaatggaacagaacagagccctcagaaataacgccacatatctacaactatctgatctttgacaaacctgagaaaaacaagcaatggggaaaggattccctatttaataaatggtgctgggaaaactggctaaccatatgtagaaagctgaaactggatcccttccttacaccttatacaaaaatcaattcaagatggattaaagacttaaacgttagacctaaaaccataaaaaccctagaagaaaacctaggcattaccattcaggacataggcatgggcaaggacttcatgtctaaaacaccaaaagcaatggcaacaaaagacaaaattgacaaacgggatctaattaaactaaagagcttctgcacagcaaaagaaactaccatcagagtgaacaggcaacctacaaaatgggagaaaattttcgcaacctactcatctgacaaagggctaatatccagaatctacaatgaactcaaacaaatttacaagaaaaaaacaaacaaccccatcaaaaagtgggcaaaggacatgaacagacacttctcaaaagaagacatttatgcagccaaaaaacacatgaaaaaatgctcatcatcactggccatcagagaaatgcaaatcaaaaccacaatgagataccatctcacaccagttagaatggcaatcattaaaaagtcaggaaacaacagctattcagctagtgggttttctattatgacggtaaaagtgccctttacactggcgtccaaggtgtgtccttctaaatctttccttttgcaagtcttcccagactcacagtgtaatgaaggcgataaagatgaaagcactggttttgatgataacaacctccttctgccctggatctctccagtcagttctgcacactacagcccaaaccccagcaggtcagggccatctcttgtagaagatgctctcacggcttcctggctctcaggattaagacacaacactggccggagctggtcaggcactctcccccaatggaccaagggagcagatgggggtaaagctgtgcctggctgtacacttaaggagcacttaagactgactgtaaaagtgtcagaaagctttacagagaaggtttttgaaaggagggttaaaagatgcaaaggaattttcaagactattgaggaagccagggtatggagggagtatctccaggaagagggtcgttcgtgggcaggcacagagctgtgtgaggacatgagttgttctgaggctagcagtgtgggagatgaggccaaaaagaggctctggcagcaagaatttgatagagtattttga

SEQ ID NO: 3986 - DNA, 4251 bp, Homo sapiens
  SIMILAR (1288)..(2931): 901254mologous to Homo sapiens putative p150,accession number U93572,Smith-Waterman Score=2605.
atggcgcgatctcggctcaccgcaacctccgcctcccgggttcaagcgattcttctgcctcatcctcccaacccggtgtcgttccccgcggtaggtggtccccgacgagctgcagccatgggaaacaccaccagcgaccgggtgtccggggagcgccacggcgccaaggctgcacgctccgagggcgcaggcggccatgccccggggaaggagcacaagatcatggtggggagtacggacgaccccagcgtgttcagcctccctgactccaaggtggaagagccaatgattccacgacttgtttactcctcagtagtacttcaaaatgttgcgtggctaaaaaaacgacaacccacagctgccctgaagaccttgctctcaattccaaggactttcaggaagagaacaacttgttttcactctctccctggggacaaagagtttgtatcatggcagcaggatttggaggactccgtaaagcccacacagcaggcccggcccactgttatccgctggtctgaaggaggcaaggaggtcttcatctctgggtccttcaacaattggagcaccaagattccactgattaagaggattaagaaacccactcaaaaccgctcaactacatggaaactgaacaacctgctcctgaatgactactgggtacttaacaaaatgaaggcagaaataaagatgttctttgaaaccaacgagaacaaagacacaacataccagaatctctgggacacattcaaagcagtgtgtagagggaaatttatagcactaaatgcccacaagagaaagcaggaaagatccaaaattgacaccctaacatcacaattaaaagaactagaaaagcaagagcaaacacattcaaaagctagcagaaggcaagaaataactaaaatcagagcagaactgaaggaaattgagacacaaaaaacccttcaaaaaattaatgaatccaggagctggttttttgaaaagatcaacaaaatcgatagactgctagcaagactagtaaagaagaaaagagagaggaatcaaatagatgcaataaaaaatgataaaggggatatcaccaccaatcccacagaaatacaaactaccatcagagaatactacaaacacctctatgcaaataaactagaaaatctagaagaaatggataaattcctcaacacatacaccctcccaagactaaaccaggaagaagttgaatctctgaatagaccaataacaggatctgaaattgtggcaataatcaatagcttaccaaccaaaaaaagtccaggaccagatggattcacagccgaattctaccagaggtacaaggaggaactgcatataaacagagccaaagacaaaaaccacatgattatctcaatagatgcagaaaaagcctttgacaaaattcaacaacccttcatgctaaaaactctcaataaattaggtattgatgggacgtatctcaaaataataagagctatctatgacaaacccacagccaatatcatactgaatgggcaaaaactggaagtattccctttgaaaactggcacaagacagggatgtcctctctcaccactgctattcaacatagtgttggaagttctggccagggcaattaggcaggagaaggaaataaagggtattcaattaggaaaagaggaagtcaaattgtccctgtttgcacatgacatgattgtatatctagaaaaccccattgtctcagcccaaaatctccttaagctgataagcaacttcagcaaagtcttaggatacaaaatcaatgtacaaaaatcacaagcattcttatacaccaataacagacaaacagagacccaaatcatgagtgaactcccattcacaattgcttcaaagagaataaaatacctaggaatccaacttacaagggatgtgaaggacctcttcaaggagaactacaaaccattgctcaaggaaataaaagaggatacaaacaaatggaagaacattccatgctcatgggtaggaagaatcaatatcgtgaaaatggccatactgcccaaggtaatttatagattcaatgtcatccccatcaagctaccaatggctttcttcacagaattgggaaaaactactttaaagttcacatggaaccaaaaaagagcctgcattgccaagtcaatcttaagcaaaaagaacaaagccagaggcgtcacgctacctgacttcaaactatactacaaggctacagtaaccaaaacagaatggtactggtaccaaaacagacatatagatcaatggaacagaacagagccctcagaaataatgccgcatatctacaaccatctgatctttgacaaacctgagaaaaacaagaaatggggaaaggattccctatttaataaatggtgctgggaaaactggctagccatatgtacaaagctgaaactggatcccttccttacaccttatacaaaagttaactcaagatggattaaagacttacatgttagacctaaaaccataaaaaacctagaagaaaacctaggcaataccattcaggacataggcatgggcaaggacttcatgtctaaaacaccaaaagccatggcaacaaaagccaaaattgacaaatgggatttaattaagctaaagagcttctgcacagcaaaagaaactaccatcagagtgaacaggaaacctacagaatgggagaaaatttttgcaaactactcatctgacaaagggctaatatccagaatctacaatgaactcaaacaaatttacaagaaaaaaacaaacaaccccatcaaaaagtggacgaaggatatgaacagacacttctcaaaagaagacttttacgcagcccaaagacacatgaaaaaatgttcatcatcactggccatcagagaaatgcaaatcaaaaccacataccatgctggaccagatggatttacagccgaattctaccagaggtacaaggaggaactggtaccattccttctgaaactattccaatcaatagaaaaagagggaatcctccctaactcattttatgaggccagcatcatcctgataccaaagcctggtagagacacaaccaaaaaagagaattttagaccaatatccttgatgaacattgatgcaaaaatcctcaataaaatactggcaaaacgaatccagcagcacatcaaaaagcttatccaccatgatcaagtgggtttcatccctgggatgcaaggctggttcaatatatgcaaatcaataaacgtaatccagcatataaacagaaccaaagacaaaaaccacatgattatctcaatagatgcagaaaaggcctttgacaaaattcaacaactcttcatgctaaaaactctcaataaattaggtattgatgggacgtatctcaaaataataagagctatctatgacaaacccacagccaatatcatactgaatgggcaaaaactggaagcattccctttgaaaactggcacaagacagggatgccctctctcaccactcctattcaacatagtgtgggaagttctggccagggcaatgaggcaggagaaggaaataaagggtattcaattaggaaaagaggaagtcaaattgtccctgtttgcagacgacatgattgtgtatctagaaaaccccattgtctcagcccaaaatctccttaagctgataagcaacttcagcaaagtctcaggatacaaaatcaatgtacaaaaatcacaagcattcttatacaccaataacagacaaacagagagccaaatcatgagtgaactcccattcacaactgcttcaaagagaataaaatacctaggaatccaacttacaagggatgagaaggacctcttcaaggagaactacaaaccactgctcaatgaaataagaggatacaaacaaatggaagaacattccatgctcacgggtaggaagaatcaatatcgtgaaaatgctcatactgcccaagctaaggcgaaccacaggccagccacatccaaaaaggtttacctgattacggcaatgaagccactgtccagtcctattcctgaaggtttggggctagaaaacagaacaggaaaggaaatcaagagtagagaatggaccaccatgttaagattggctgtagctgctgaactaacctttagagattggaaggagcggtctcggaggactttggacacacatgaaacaaaggggattcccttaagtaaaagcagagcaggcattctggtgattgacattagatag

SEQ ID NO: 3987 - DNA, 3195 bp, Homo sapiens
  SIMILAR (424)..(3150): 951254mologous to Homo sapiens putative p150,accession number U93563,Smith-Waterman Score=4504.
atgtatgatgtatcacgttttcagacatatcagagccttgctgctgaatggagaagaaattatcaaaaatcattaagcctgaaaaggtcctattatgaaagtcttccacaagtcttacttggatacactcgtaaagagggttcgggagctgccaccatctccttaatgacagacgagcctggcctagacaaccctgcctacgtgtcctcggcagaggacgggcagccagcaatcagcccagtggactctggccggagcaaccgaactagggcacggccctttgagagatccactattagaagcagatcatttaaaaaaataaatcgagctttgagtgttcttcgaaggacaaagagcgggagtgcagttgccaaccatgccgaccagggcagggaaaattctgaaaacaccactgcccctgaagcaccacaccacacctattccaaaattgaccacatagttggaagtaaagctctcctcagcaaatgtaaaagaacagaaattataacaaactatctctcagaccacagtgcaatcaaactagaactcaggattaagaatctcactcaaaaccactcaactacatggaaactgaacaacctgctcctgaatgactactgggtacataacgaaatgaaggcagaaataaagatgttctttgaaaccaatgagaacaaagacacaacataccagaatctctgggacgcatgcaaagcagtgtgtagagggaaatttatagcactaagtgcccacaagagaaagcaggaaagatctaaaattgacaccctaacatcacaattaaaagaactagaaaagcaagagcaaacacattccaaagctagcagaaggcaagaaataactaaaatcagagcagaactgaaggaaatagagacacaaaaaacccttcaaaaaattgatgaatccaggagctggtttattgaaaggatcaacaaaattgatagactgctaacaagactaataaagaaaaaaagagagaagaatcaaatagatgcaataaaaaatgataaaggggatatcaccaccgatcccacagaaatacaaactaccatcagagaatactacaaacacctctatgcaaataaactagaaaatctagaagaaatggataaattccttgacacatacactctcccaagactaaaccaggaagaagttgaatctctgaatagaccaataacaggatctgaaattgtggcaataatcagtagcttaccacccaaaaggagtccaggaccagatggattcacagccgaattctaccagaggtacaaggaggaactggtaccattccttctgaaactattccaattgatagaaaaagagggaatcctccctaactcattttatgaggccagcttcattctgataccaaagccgggcagagacacaaccaaaaaagagaattttagaccaatatccttgatgaacattgatgcaaaaatcctcaataaaatactggcaaaccaaatccagcagcacatcaaaaagcctctccaccatgatcaagtgggcttcatccctgggatgcaaggctggttcaatatacgcaaatcaataaatgtaatccagcatataaacagagccaaagacaaaaaccacatgattatctcaatagatgcagaaaaggcctttgataaaattcaacaacctttcatgctaaaaactctcaataaattaggtattgatgggacatatttcaaaataataagagctatctatgacaaacctacagccaatatcatactgaatgggcaaaaactggaagcattccctttgaaaacgggcacaagacaggggggcacaagacagggatgccctctctcaccactcctattcaacatagtgttggaagttctggccagggcaattaggcaggagaaggaaataaagggtattcaattaggaaaaaaggaagtcaaattgtccctgtttgcagatgacatgattgtatatctagaaaaccccattgtctcagcccaaaatctccttaagctgataagcgacttcagcaaagtctcaggacacaaaatcaatgtgcaaaaatcacaagcattcttatacaccaataacagacaaacagagagccaaatcatgagtgaactcccattcacaattgcttcaaagagaataaaatacctaggaatccatcttacaagggatgtgaaggacctcttcaaggagaactacaaaccactgctcaaggaaataaaagaggatacaaacaaatggaagaacattccatgctcatgggtaggaagaatcaatatcgtgaaaatggccatactgcccaaggtaatttacagattcagtgccatccccatcaagctaccaatgcctttcttcacagaattggaaaaaactactttaaagttcatatggaaccaaaaaagagcccccattgccaagtcaatcctaagccaaaggaacaaagctggaggcatcacactacctgacttcaaactatactacaaggctacagtaaccaaaacagcatggtactggtaccaaaacagagatatagatcaatggaacagaacagagccctcagaaataacgccgcatatctacaactatctgatctttgacaaacctgagaaaaacaagcaatggggaaaggattccctatttaataaatggtgctgggaaaactggctagccatatgtagaaagctgaaactggatcccttccttacaccttatacaaaaatcaattcaagatggattaaagacttaaacgttagacctaaaaccataaaaaccctagaagaaaacctaggcattaccattcaggacataggcatgggcaaggacttcatgtttaaaacaccaaaagcaatggcaacaaaagacaaaattgagaaatgggatctaattaaactaaagagcttctgcacagcaaaagaaactaccatcagagtgaacaggcaacctacaaaatgggagaaaatttttgcaacctactcatctgacaaagggctaatatccagaatctacaatgaactcaaacaaatttacaagaaaaaaacaaacaaccccatcaaaaagtgggcgaaggacatgaacagacacttctcaaaagaagacatttatgcagcccagaaacacatgaaaaaatgctcaccattactgggagataaatatttatatacagagagaaaaggggggagagagtga

SEQ ID NO: 3988 - DNA, 4092 bp, Homo sapiens
  SIMILAR (1129)..(3936): 981254mologous to Homo sapiens putative p150,accession number U93563,Smith-Waterman Score=4773.
atggggaaaaaacagaacagaaaaactggaaactctaaaacgcagagtgcctctcctcctccaaaggaacgcagttcctcaccagcaacggaaaaaagctggatggagaatgactttgacgagctgagagaagaaggtttcagacgatcaaattactctgagctacgggaggacattcaaaccaaaggcaaagaagttgaaaactttgaaaaaaatttagaagaatgtataactagaataaccaatacagagaagtgcttaaaggagctgatggagctgaaaaccaaggctcgagaactacgtgaagaatgcagaagcctcaggagccgatgtgatcaactggaagaaagggtatcagcaatggaagatgaaatgaatgaaatgaagcgagaagggaagtttagagaaaaaagaataaaaagaaatgagcaaagcctccaagaaatatgggactatgtgaaaagaccaaatctacgtctgactggtgtacctgaaagtgacggggagaatggaaccaagttggaaaacactctgcaggatattatccaggagaacttccccaatctagcaaggcaggtcaatgttcagattcaggaaatacagagaacgccacaaagatactcctcgagaagagcaactccaagacacataattgtcagattcaccaaagttgaagtgaaggaaaaaatgttaagggcagccagagagaaaggtcgggttaccctcaaagggaagcccatcagactaacagcggatctctcggcagaaaccctacaagccagaagagagtgggggccaatattcaacattcttaaagaaaagaattttcaacccagaatttcatatccagccaaactaagcttcataagtgaaggagaaataaaacactttacagacaagcaaatgctgagagattttgtcaccaccaggcctgccctaaaagagctcctgaaggaagtgctaaacatggaaaggaacaaccagtaccagccgctgcaaaatcatgccaaaatacagatcaacgagacagaaagtcaacaaggatacccaggaattgaactcagctctgcaccaagcggacctaatagacatctacagaactctccacaccaaatcaacagaatatactttttttcagcaccacaccacacctattccaaaattgaccacatagttggaagtaaagctctcctcagcaaatgtaaaagaacagaaattataacaaactatctctcagaccacagtgcaatcaaactagaactcaggattaagaatctcaatcaaagccgctcaactacatggaaactgaacaacctgctcctgaatgactactgggtacataacgaaatgaaggcagaaataaagatgttctttgaaaccaacgagaacaaagacacaacataccagaatctctgggacgcattcaaagcagtgtgtagagggaaatttatagcactaaatgcccacaagagaaagcaggaaagatccaaaattgacaccctaacatcacaattaaaagaactagaaaagcaagagcaaacacattcaaaagctagcagaaggcaagaaataactaaaatcagagcagaactgaaggaaatagagacacaaaaaacccttcaaaaaatcaatgaatccaggagctggttttttgaaaggatcaacaaaattgatagaccgctagcaagactaataaagaaaaaaagagaggagaatcaaatagacacaataaaaaatgataaaggggatatcaccaccgatcccacagaaatacaaactaccatcagagaatactacaaacacctctatgcaaataaactagaaaatctagaagaaatggataaattccttgacacatacactctcccaagactaaaccaggaagaagttgaatctctgaatagaccaataacaggagctgaaattgtggcaataatcaatagtttaccaaccaaaaagagtccaggaccagatggattcacagctgaattctaccagaggtacaaggaggaactggtaccattccttctgaaactattccaatcaatagaaaaagagggaatcctccctaactcattttatgaggccagcatcattctgataccaaagccgggcagagacacaaccaaaaaagagaattttagaccaatatccttgatgaacattgatgcaaaaatcctcaataaaatactggcaaaccgaatccagcagcacatcaaaaagcttatccaccatgatcaagtgggcttcatccctgggatgcaaggctggttcaatatacgcaaatcaataaatgtaatccagcatataaacagagccaaagacaaaaaccacatgattatctcaatagatgcagaaaaagcctttgacaaaattcaacaacccttcatgctaaaaactctcaataaattaggtattgatgggacgtatttcaaaataataagagctatctatgacaaacccacagccaatatcatactgaatgggaaaaaactggaagcattccctttgaaaactggcacaagacagggatgccctctctcactgctcctattcaacatagtgttggaagttctggccagggcaatcaggcaggagaaggaaataaagggtattcagttaggaaaagaggaagtcaaattgtccctgtttgcagacgacatgattgtttatctagaaaaccccatcgtctcagcccaaaatctccttaagctgataagcaacttcagcaaagtctcaggatacaaaatcaatgtacaaaaatcacaagcattcttatacaccaacaacagacaaacagagagccaaatcatgagtgaactcccattcacaattgcttcaaagagaataaaatacctaggaatccaacttacaagggatgtgaaggacctcttcaaggagaactacaaaccactgctcaaggaaataaaagaggatacaaacaaatggaagaacattccatgctcatgggtaggaagaatcaatatcgtgaaaatggccatactgcccaaggtaatttacagattcaatgccatccccatcaagctaccaatgactttcttcacagaattggaaaaaactactttaaagttcatatggaaccaaaaaagagcccgcatcgccaagtcaatcctaagccaaaagaacaaagctggaggcatcacactacctgacttcaaactatactacaaggctacagtaaccaaaacagcatggtactggtaccaaaacagagatatagatcaatggaacagaatagagccctcagaaataacgccgcatacctacaactatctgatctttgacaaacctgagaaaaacaagcaatggggaaaggattccctatttaataaatggtgctgggaaaactggctagccatatgtagaaaactgaaactggatcccttccttacaccttatacaaaaatcaattcaagatggattaaagatttaaacgttagacctaaaaccataaaaaccctagaagaaaacctaggcattaccattcaggacataggcgtgggcaaggacttcatgtccaaaacaccaaaagcaatggcaacaaaagccaaaattggcaaatggtacctaattaaactaaagagcttctgcacagcaaaagaaactaccatcagagtgaacaggcaacctacaacatgggagaaaattttcgcaacgtactcatctgacaaagggctaatatccagaatctacaatgaactcaaacaaatttacaagaaaaaaacaaacaaccccatcaaaaagtgggcgaaggacatgaacagacacttctcaaaagaagacatttatgcagccaaaaaatacgtgaaaaaatgctcatcatcactggccatcagagaaatgcaaatcaaaaccactatgagataccatctcacaccagttagaatggcaatcattaaaaagtcaggaaacaacagtgatctctaccttatgtctgcaggaaccagttgtttaatgggcagacactgggacagtggacaagaaacgtgtgtccaaaatgtcgtgctggacacgtgcagcccctctgaacaactcttaagagctattgctgatcttgtcccgcaaccctga

SEQ ID NO: 3989 - DNA, 3984 bp, Homo sapiens
  SIMILAR (535)..(3468): 981254mologous to Homo sapiens unknown,accession number AF149422,Smith-Waterman Score=5036.
aaatatgggactatgtgaaaagaccaaatctacgtctgattggtgtacctgaaagtgatgcggagaatggaaccaagttggaaaacactctacaggatattatccaggagaacttccccaatctagcaaggcaggccaacgttcagattcaggaaatacagagaacgccacaaagatactcctcgagaagagcaactccaagacacataattgtcagattcaccaaagttgaaatgaaggaaaaaatgttaagggcagccagagagaaaggtcgggttaccctcaaagggaagcccatcagactaacagcggatctctcggcagaaaccctacaagctagaagagagtgggggccaatattcaacattcttaaagaaaagaattttcaacccagaatttcatatccagccaaactaagcttcataagtgaaggagaaataaaatactttacagacaagcaaatgctgagagattttgtcaccaccaggcctgccctaaaagagctcctgaaggaagcgctaagcatggaaaggaacaaccgacagatcaacgagacagaaagtcaacaaggatacccaggaattgaattcagctctgcaccaagcggacctaatagacatctacagaactctccaccccaaatcaacagaatatacatttttttcagcaccacaccacacctattccaaaattgaccacatagttggaagtaaagctctcctcagcaaatgtaaaagaacagaaattataacaaactatctctcagaccacagtgcaatcaaactagaactcaggattaagaatctcactcaaagccgctcaactacatggaaactgaacaacctgctcctgaatgactactgggtacataacgaaatgaagacagaaataaagatgttctttgaaaccaacgagaacaaagacaccacataccaaaatctctgggacgcattcaaagcagtgtgtagagggaaatttatagcactaaatgcctacaagagaaagcaggaaagatccaaaattgacaccctaacatcacaattaaaagaactagaaaagcaagagcaaacacattcaaaagctagcagaaggcaagaaataactaaaatcagagcagaactgaaggaaatagagacacaaaaagcccttcaaaaaatcaatgaatccaggagctggttttttgaaaggatcaacaaaattgatagaccgctagcaagactaataaagaaaaaaagagagaagaatcaaatagacacaataaaaaatgataaaggggatatcaccaccgatcccacagaaatacaaactaccatcagagaatactacaaacacctctacgcaaataaactagaaaatctagaagaaatggatacattcctcgacacatacactctcccaagactaaaccaggaagaagttgaatctctgaatagaccaataacaggctctgaaattgtggcaataatcaatagtttaccaaccaaaaagagtccaggaccagatggattcacagccgaattctaccagaggtacaaggaggaactggtaccattccttctgaaactattccaatcaatagaaaaagagggaatcctccctaactcattttatgaggccagcatcattctgataccaaagccgggcagagacacaaccaaaaaagagaattttagaccaatatccttgatgaacattgatgcaaaaatcctcaataaaatactggcaaaccgaatccagcagcacatcaaaaagcttatccaccatgatcaagtgggcttcatccctgggatgcaaggctggttcaatatacgcaaatcaataaatgtaatccagcatataaacagagccaaagacaaaaaccacatgattatctcaatagatgcagaaaaagcctttgacaaaattcaacaacccttcatgctaaaaactctcaataaattaggtattgatgggacgtatttcaaaataataagagctatctatgacaaacccacagccaatatcatactgaatgggcaaaaactggaagcattccctttgaaaactggcacaagacagggatgccctctctcaccgctcctattcaacatagtgttggaagttctggccagggcaatcaggcaggagaaggaaataaagggtattcaattaggaaaagaggaagtcaaattgtccctgtttgcagacgacatgattgtttatctagaaaaccccattgtctcagcccaaaatctccttaagctgataagcaacttcagcaaagtctcaggatacaaaatcaatgtacaaaaatcacaagcattcttatacaccaacaacagacaaacagagagccaaatcatgagtgaactcccattcacaattgcttcaaagagaataaaatacctaggaatccaacttacaagggatgtgaaggacctcttcaaggagaactacaaaccactgctcaaggaaataaaagaggacacaaacaaatggaagaacattccatgctcatgggtaggaagaatcaatattgtgaaaatggccatactgcccaaggtaatttacagattcaatgccatccccatcaagctaccaatgactttcttcacagaattggaaaaaactactttaaagttcatatggaaccaaaaaagagcccgcatcgccaagtcaatcctaagccaaaagaacaaagctggaggcatcacactacctgacttcaaactatactacaaggctacagtaaccaaaacagcatggtactggtaccaaaacagagatatagatcaatggaacagaacagagccctcagaaataatgctgcgtatctacaactatctgatctttgacaaacctgagaaaaacaagcaatggggaaaggattccctatttaataaatggtgctgggaaaactggctagccatatgtagaaagctgaaactggatcccttccctacaccttatacaaaaatcaattcaagatggattaaagatttaaacgttagacctaaaaccataaaaaccctagaagaaaacctaggcattaccattcaggacataggcgtgggcaaggacttcatgtccaaaacaccaaaagcaatggcaacaaaagccaaaattgacaaatgggatctaattaaactaaagagcttctgcacagcaaaagaaactaccatcagagtgaacaggcaacctacaaaatgggagaaacttttcgcaacctactcatctgacaaagggctaatatccagaatctacaatgaactcaaacaaatttacaagaaaaaaacaaacaaccccatcaaaaagtgggcgaaggacatgaacagacacttctcaaaagaagacatttatgcagccaaaaaacacatgaagaaatgctcatcatcactggccatcagagaaatgcaaatcaaaaccactatgagatatcatctcacaccagttagaatggcaatcattaaaaagtcaggaaacaacaggaaggaggaaaaaggtgctagagatataaacaaacaattcacagaagaagcaacactgatggctaatcaacctatgaaaaggtgtttaaccttcccagcaatcacagagaggcaaacacctgctctttcaccccagccacatggaatctttttggtcaacctgataaaagcatttattgcctcacctgtgtctgtgcagccatctagagttctaatggccctcagacccacaaccccagtgcaggtgtgcaataaagaagcaggcaacatggcgctggccaggacttcaggctccctggagctgaagggtttccaaggacaaacaaacccatgtggacaaacccatggggacatgaccatgtgcggaagcctggaccgacttgctgggctctacctgctgcaggccctggcacggtacctgaaaaatgaaaggatccacttccaagatgcttcgctcatgtcaatgtcagcaggaagactcagttcctcaccagcagctccttcaaaggctgcttga

SEQ ID NO: 3990 - DNA, 3432 bp, Homo sapiens
  SIMILAR (1)..(2961): 961254mologous to Homo sapiens putative p150,accession number U93567,Smith-Waterman Score=4958.
atgggagactttaacaccccactgtcaacattagacagatcaacgagacagaaagtcaacaaggatacccaggaattgaactcagctctgcaccaagcagacctaatagacatctacagaactctccaccccaaatcaacagaatatacatttttttcagcaccacaccacacctattccaaaattgaccacatactgggaagtaaagctctcctcagcaaatgtaaaagaacagaaattatagcaaactatctctcagaccacagtgcaatcaaactagaactcaggattaagaatctcactcaaaaccgctcaactacatggaaactgaacaacctgctcctgaatgactactgggtacataacgaaatgaaggcagaaataaagatgttctttgaaaccaacgagaacaaagacacaacataccagaatctctgggacgcattcaaagcagtgtgtagagggaaatttatagcactaagtgcccacaagagaaagcaggaaagatccaaaattgacaccctaacatcacaattgaaagaactagaaaagcaagagcaaacacattcaaaagctagcagaaggcaagaaataactaaaatcagagcagaactgaaggaaatagagacacaaaaaacccttcaaaaaattaatgaatccaggagctggttttttgaaaggatcaacaaaattgatagaccactagcaagactaataaagaaaaaaagagagaagaatcaaatagatgcaataaaaaatgataaaggggatatcaccatcgatcccacagaaatacaaactaccatcagggaatactacaaacacctctacgcaaataaactagaaaatctagaagaaatggataaattcctggacacatacactctcccaagactaaaccaggaagaagttaaatctctgaatagaccaataacaggagctgaaattgtggcaataatcaatagcttagcaatcaaaaagagtccaggaccagatggattcacagccgaattctaccagcggtacaaggaggaactggtaccattccttctgaaactattccaatcaatagaaaaagagggaatcctccctaactcattttatgaggccagcatcattctgataccaaagccaggcagagacacaacaaaaaaagagaattttagaccaatatccttgatgaacattgatgcaaaaatcctcaataaaatactggcaaaccgaatccagcagcacatcaaaaagcttatccaccatgatcaagtgggcttcatccctgggatgcaaggctggttcaatatacacaaatcaataaatgtaatccaacatataaacagagccagagacaaaaaccacatgattatctcaatagatgcagaaaaagcatttgacaaaattcaacaacccttcatgctaaaaactctcaataaattaggtattgatgggacgtatctcaaaataataagagctatctatgacaaacccacagccaatatcatactgaatgggcaaaaactggaagcattccctttgaaaactggcacaagacagggatgccctctctcaccactcctattcaacatagtgttggaagttctggccagggcaattaggcaggagaaggaaataaagggtattcaattaggaaaagaggaagtcaaattgtccctgtttgcagacgacatgattgtatatctagaaaaccccattgtctcagcccaaaatctccttaagctgataagcaacttcagcaaagtctcaggatacaaaatcaatgtacaaaaatcacaagcattcttatacaccaacaacagacaaacagagagccaaatcatgagtgaactcccattcacaattgcttcaaagagaataaaatacctaggaatccaacttacaagggatgtgaaggacctcttcaaggagaactacaaaccactgctcaaggaaataaaagaggatacaaacaaatggaagaacatgccatgctcatgggtaggaagaatcaatatcgtgaaaatggccatactgcccaaggtaatttacagattcaatgccatccccatcaagctaccaatggctttcttcacagaattggaaaaaactactttaaagttcatatggaaccaaaaaagagcccgcatcgccaagtcaatcctaagtcaaaagaacaaagctggaggcatcacactacctaacttcgaactatactacaaggctacagtaaccaaaacagcatggtactggtaccaaaacagatatatagaccaatggaacagaacagagccctcagaaataacaccgcatatctacaactatctgatctttgacaaacctgggaaaaacaagcaatggggaaaggattccctatttaataaatggtgctgggaaaactggctagccatatgtagaaagctgcaactggatcccttccttacaccttatacaaaaatcaattcaagatggattaaagacttaaacgttagacctaaaaccataaaaaccctagaagaagacctaggcattaccattcaggacataggcatgggcaaggacttcatgtctaaaacaccaaaagcaatggcaacaaaagacaaaattgacaaatgggatctaattaaactcaagagcttctgcacagcaaaagaaaccaccatcagagtgaacaggcaacctacaaaatgggagaaaattttcgcaacctactcatttgacaaagggctaatatccagaatctacaatgaactccaacaaatttacaagaaaaaaacaaacaaccccatcaaaaagtgggcgaaggacatgaacagacacttctcaaaagaagacatttatgcagccaaaaaacacatgaaaaaatactcatcatcactggccattagagaaatgcaaatcaaaaccacaatgagataccatctcacacccgttagaatggcaaccattaaaaactcaggaaacaacaggtcattgtgtttttataaggaaaacctaagcctttgtctggcgatccttctctctgttcctgtgcaagaaggaggggccagaagttttctggccccagcaggaggcgtggcaggccgagcaacaagtcactatggcggacacatggcgactgcagagaggctgtcagtggagctatctgggcaagccctgaaggaattccaaaagggccctttatctccaaaacagtttaagggtcatcacagccagcagctccgatggactcatagattaaacccctcctatggccaatcaaagacccccaagaacacactgttgaagatgagagggcccaccacttgggcccttggagggaccgatgtggcagcttccactgataataatggaaacgcacattttgagacgttgcaagtcatggacatgcccaggccatggtgctgcctgttggacggtgctttgcttgtttctgtctga

SEQ ID NO: 3991 - DNA, 3159 bp, Homo sapiens
  SIMILAR (469)..(2925): 981254mologous to Homo sapiens putative p150,accession number U93563,Smith-Waterman Score=4170.
atggtaaagggatcaattcaacaagaggagctaactatcctaaatatttatgcacccaatacaggagcacccagattcataaagcaactcctgagtgacctacaaagagacttagactcccacacattaataatgggagactttaacaccccactgtcaacattagacagatcaacgagacagaaagtcaacaaggatacccaggaattgaactcagctctgcaccaagcagacctaatagacatctacagaactctccaccccaaatcaacagaatatacattgttttcagcaccacaccacacctattccaaaattgaccacatacttggaagtaaagctctcctcagcaaatgtaaaagaacagaaattataacaaactatctctcagaccacagtgcaatcaaactagaactcaggattaagaatctcactcaaagccgctcaactacatggaaactgaacaacctgctcctgaatgactactggagaaagcaggaaagatccaaaactgacaccctaacatcacaattaaaagaactagaaaagcaagagcaaacacattcaaaagctagcagaaggcaagaaataactaaaatcagagcagaactgaaggaaatagagacacaaaaaacccttcaaaaaatcaatgaatccaggagctggttttttgaaaggatcaacaaaattgatagaccgctagcaagactaataaagaaaaaagagaagaatcaaatagacacaataaaaaatgataaaggggatatcaccaccgatcccacagaaatacaaactaccatcagagaatactacaaacacctctacgcaaataaactagaaaatctagaagaaatggatacattcctcgacacatacactctcccaaggctaaaccaggaagaagttgaatctctgaatagaccaataacaggctctgaaattgtggcagtaatcaatagtttaccaaccaaaaagagtccaggaccagatggattcacagccgaattctaccagaggtacaaggaggaactggtaccattccttctgaaactattccaatcaatagaaaaagagggaatcctccctaactcattttatgaggccagcatcattctgataccaaagtcgggcagagacacaaccaaaaaagagaattttagaccgatatccttgatgaacattgatgcaaaaatcctcaataaaatactggcaaaccgaatccagcagcacatcaaaaagcttatccaccatgatcaagtgggcttcatccctgggatgcaaggctggttcaatatacgcaaatcaataaatgtaatccagcatataaacagagccaaagacaaaaaccacatgattatctcaatagatgcagaaaaagcctttgacaaaattcaacaacccttcatgctaaaaactctcaataaattaggtattgatgggacgtatttcaaaataataagagctatctatgacaaacccacagccaatatcatactgaatgggcaaaaactggaagcattccctttgaaaactggcacaagacagggatgccctctctcaccgctcctattcaacatagtgttggaagttctggccagggcaatcaggcaggagaaggaaataaagggtattcaattaggaaaagaggaagtcaaattgtccctgtttgcagacgacatgattgtttatctagaaaaccccattgtctcagcccaaaatctccttaagctgataagcaacttcagcaaagtctcaggatacaaaatcaatgtacaaaaatcacaagcattcttatacaccaacaacagacaaacagagagccaaatcatgagtgaactcccattcacaattgcttcaaagagaataaaatacctaggaatccaacttacaagggatgtgaaggacctcttcaaggagaactacaaaccactgctcaaggaaataaaagaggacacaaacaaatggaagaacattccatgctcatgggtaggaagaatcaatatcgtgaaaatggccatactgcccaaggtaatttacagattcaatgccatccccatcaagctaccaatgactttcttcacagaattggaaaaaactactttaaagttcatatggaaccaaaaaagagcccgcatcgccaagtcaatcctaagccaaaagaacaaagctggaggcatcacactacctgacttcaaactatactacaaggctacagtaaccaaaacagcatggtactggtaccaaaacagagatatagatcaatggaacagaacagagccctcagaaataatgccgcatatctacaactatctgatctttgacaaacctgagaaaaacaagcaatggggaaaggattccctatttaataaatggtgctgggaaaactggctagccatatgtagaaagctgaaactggatcccttccttacaccttatacaaaaatcaattcaagatggattaaagatttaaacgttagacctaaaaccataaaaaccctagaagaaaacctaggcattaccattcaggacataggcgtgggcaaggacttcatgtccaaaacaccaaaagcaatggcaacaaaagccaaaattgacaaatgggatctaattaaactaaagagcttctgcacagcaaaagaaactaccatcagagtgaacaggcaacctacaacatgggagaaaattttcgcaacctactcatctgacaaagggctaatatccagaatctacaatgaactcaaacaaatttacaagaaaaaaacaaacaaccccatcaaaaagtgggcgaaggacatgaacagacacttctcaaaagaagacatttatgcagccaaaaaacacatgaagaaatgctcatcatcactggccatcagagaaatgcaaatcaaaaccactatgagatatcatctcacaccagccaaaattcagaatgggtcgagaaatatagttaagagcaacatgaattgcttaatatcgcaaaacagtcctcaggtaccgtgtacaactgttgcaaaatatcatcctaattcccgtgtaactccagaaccacgaagtggaacaccaaaggaagacagaagatggatacttatgacttctgggaaattatacttccttattcaaaaatctactgaacacatgctgtctgggagaaaagattga

SEQ ID NO: 3992 - DNA, 4945 bp, Homo sapiens
  SIMILAR (2)..(3241): 971254mologous to Homo sapiens unknown,accession number AF148856,Smith-Waterman Score=5485.
agacacacataggctcaaaataaagggatggaggaagatttaccaagcaaatggaaaacagaaaaaggcaggggttgcaatcctagtctcagataaaacagaatttaaaccaacaaagatcaaaagagacaaagaaggccattacataatggtaaagggatcaattcaacaagaagagctaactatcctaaatatatatgcacccaatacaggagcacccagattcacaaagcaagtccttagagacctacaaagagacttagactccaacacaataataacgggagactttaacaccccactgtcaacattagacagatcaatgagacagaaagttaacaaggatatccaggaattgaactcagctctgcaccaagcagacctaatagacatctacagaactctccaccccaaatcaacagaaaatacattcttttcggcaccacaccacacctattccaaaattgaccacatagtgggaagtaaagcactcctcagcaaatgtaaaagaaaagaaattataacaaactgtctctcagaccacagtgcaatcaaactagaactcaggattaagaaactccctcaaaactgctcaactatatggaaactgaacaacctgctcctgaatgactactgggtacataacgaaatgaaggcagaaataaagatgttgtttgaaaccaatgagaacaaagacacaacataccagaatctctgggacacattgaaagcagtgtgtagagggaaatttatagcactaaatgcccacgggagaaaacaggaaagatctaaaattgacaccctaacatcacaattaaaagaactagcaaagcaagagcaaacacattcaaaagctagcagaaggcaagaaataactaagatcagagcagaactgaaggaaatagagacacaaaaaacccttcaaaaaattaatgaatccaggagctggttttttgaaaggatcaacaaaattgatagaccgctagcaagactaataaagaaaaaaagagagaagaatcaaatagacacaataaaaaatgataaaggggatatcaccaccgatcccacagaaatacaaactaccatcagagaatactacaaacacctctacgcaaataaactagaaaatctggaagaaatggatacattcctcgacacatacactctcccaagactaaaccaggaagaagttgaatctctgaatcgaccaataacaggctctgaaattgtggcaataatcaatagtttaccaaccaaaaagagtccaggaccagatggattcacagccgaattctaccagaggtacaaggaggaactggtaccattccttctgaaactattccaatcaatagaaaaagagggaatcctccctaactcattttatgagaccagcatcattctgataccaaagccgggcagagacacaaccaaaaaagagaattttagaccaatatccttgatgaacattgatgcaaaaatcctcaataaaatactggcaaaccgaatccagcagcacatcaaaaagcttatccaccatgatcaagtgggcttcatccctgggatgcaaggctggttcaatatacgcaaatcaataaatgtaatccagcatataaacagagccaaagacaaaaaccacatgattatctcaatagatgcagaaaaagcctttgacaaaattcaacaacccttcatgctaaaaactctcaataaattaggtattgatgggacgtatttcaaaataataagagctatctatgacaaacccacagccaatatcatactgaatggacaaaaactggaagcattccctttgaaaactggcacaagacagggatgccctctctcaccgctcctattcaacatagtgttggaagttctggccagggcaatcaggcaggagaaggaaataaagggtattcaattaggaaaagaggaagtcaaattgtccctgtttgcagacgacatgattgtttatctagaaaaccccatcgtctcagcccaaaatctccttaagctgataagcaacttcagcaaagtctcaggatacaaaatcaatgtacaaaaatcacaagcattcttatacaccaacaacagacaaacagagagccaaatcatgagtgaactcccattcacaattgcttcaaagagaataaaatacctaggaatccaacttacaagggatgtgaaggacctcttcaaggagaactacaaaccactgctcaaggaaataaaagaggagacaaacaaatggaagaacattccatgctcatgggtaggaagaatcaatatcgtgaaaatggccatactgcccaaggtaatttacagattcaatgccatccccatcaagctaccaatgactttcttcacagaattggaaaaaactactttaaagttcatatggaaccaaaaaagagcccgcattgccaagtcaatcctaagccaaaagaacaaagctggaggcatcacactacctgacttcaaactatactacaaggctacagtaaccaaaacagcatggtactggtaccaaaacagagatatagatcaatggaacagaacagagccctcagaaataatgccgcatatctacaactatctgatctttgacaaacctgagaaaaacaagcaatggggaaaggattccctgtttaataaatggtgctgggaaaactggctagccatatgtagaaagctgaaactggatcccttccttacaccttatacaaaaatcaattcaagatggattaaagatttaaacgttaaacctaaaaccataaaaaccctagaagaaaacctaggcattaccattcaggacataggcgtgggcaaggacttcatgtccaaaacaccaaaagcaatggcaacaaaagacaaaattgacaaatgggatctaattaaactaaagagcttctgcacagcaaaagaaactaccatcagagtgaacaggcaacctacaacatgggagaaaatttttgcaacctactcatctgacaaagggctaatatccagaatctacaatgaactcaaacaaatttacaagaaaaaaacaaacaaccccatcaaaaagtgggcgaaggacatgaacagacacttctcaaaagaagacatttatgcagccaaaaaacacatgaagaaatgctcatcatcactggccatcagagaaatgcaaatcaaaaccactatgagatatcatctcacaccagttagaatggcaatcattaaaaagtcaggaaacaacaggccagaaaagaccaaaagttttttacctcctttgccaacacaaagttcaattcacagtggtttcctagagcattgtgttgaacaggattctgaggctctgtctggagaggctggtaaaagtctgatgtttgccatgggtgtaggaagtgaacgagcaaagcatagcctcagtgacgatggccagctccgtggtgccaaggtggctacagcactgacaccctctccaacgccgcattctgatgcagatgataacacccacctcgccctccgccacgatgagcaaatgagcgcgagcgagggcatgaaatttaaattccactcaggggagaaagtgctgtgcttcgagcctgaccccaccaaggcgcgagtgctgtacgatgccaagattgttgatgttattgttgggaaagacgaaaaaggcagaaagatcccagaatatctgatccattttaatggttggaacagaagctgggatagatgggcagcagaagatcatgtgcttcgtgataccgatgaaaatcgtagattacagcgtaaattggcaagaaaagctgtagctcgcctgaggagcacaggaagaaagaagaagcgctgcaggttgcctggtgtggactctgtcttaaaaggcctccccactgaagaaaaagatgaaaatgatgaaaactcattaagcagttcctctgactgtagtgaaaacaaggatgaagaaataagtgaagaaagtgatattgaagaaaagactgaagtgaaagaagaaccagagcttcaaacaagaagggaaatggaagaaagaacaataactatagaaatccctgaagttctgaagaagcagctggaggatgattgttactacattaacaggaggaaacggttagtgaaacttccatgccagaccaacatcataacgattttggaatcctatgtgaagcattttgctatcaatgcagccttttcagccaatgagaggcctcgtcaccatcacgttatgccacatgccaacatgaacgtgcattatatcccagcagaaaagaatgttgacctttgtaaggagatggtggatggattaagaataacctttgattacactctcccgttggttttactctatccatatgaacaagctcagtataaaaaggtgacttcgtctaaattttttcttccaattaaggaaagtgccacaagcactaacaggagccaggaggaactctctcccagtccgcctttgttgaatccatccacgccacagtccacagagagtcagccgaccaccggtgaaccagccacccccaaaaggcgcaaagctgagccagaagcattgcagtctctgaggcggtccacgcgccacagtgccaactgtgacaggctttctgagagcagcgcttcacctcagcccaagcgccggcagcaggacacatccgccagcatgcccaagctcttcctgcacctggaaaagacctcgcctgctgtgctgactccttcaggggtccttctaagcatcatcctgttggaactcccaaaagtcatcccagtgccattctgtgttcaggtgcccatttccttgtgtacatcctgtccctgccacatccataagctcctgagagaaaggtttttagcagaataccacgatgacttcttcccagagtcggcttatgtcgctgcctgtgaggcacattacagcaccaagaacccccgggcaatttattaa

SEQ ID NO: 3993 - DNA, 6750 bp, Homo sapiens
  SIMILAR (1)..(3045): 981254mologous to Homo sapiens putative p150,accession number U93565,Smith-Waterman Score=5181.
atggtaaagggatcaattcaacaagaggagctaactatcctaaatatttatgcacccaatacaggagcacccagattcataaagcaagtcctgagtgacatacaaagagacttagactcccacacattaataatgggagactttaacaccccactgtcaacattagacagatcaacgagacagaaagtcaacaaggatacccaggaattgaactcagctctgcaccaagcggacctaatagacatctacagaactctccaccccaaatcaacagaatatacatttttttcagcaccacaccacacctattccaaaattgaccacatagttggaagtaaagctctcctcagcaaatgtaaaagaacagaaattataacaaactgtctctcagaccacggtgcaatcaaactagaactcaggattaagaatctcactcaaagccgctcaactacatggaaactgaacaacctgctcctgaatgactactgggtacataacgaaatgaaggcagaaataaagatgttctttgaaaccaacgagaacaaagacaccacataccagaatctctgggacgcattcaaagcagtgtgtagagggaaatttatagcactaaatgcctacaagagaaagcaggaaagatccaaaatcgacaccctaacatcacaattaaaagaactagaaaagcaagagcaaacacattcaaatgctagcagaaggcaagaaataactaaaatcagagcagaactgaaggaaatagagacacaaaaaacccttcaaaaaatcaatgaatccaggagctggttttttgaaaggatcaacaaaattgatagaccgctagcaagactaataaagaaaaaaagagagaagaatcaaatagacacaataaaaaatgataaaggggatatcaccaccgatcccacagaaatacaaactaccatcagagaatactacaaacacctctacgcaaataaactagaaaatctagaagaaatggatacattcctcgacacatacactctcccaagactagaccaggaagaagttgaatctctgaatagaccaataacaggctctgaaattgtggcaataatcaatagtttaccaaccaaaaagagtccaggaccagatggattcacagccgaattctaccagaggtacaaggaggaactggtaccattccttctgaaactattccaatcaatagaaaaagagggaatcctccctaactcattttatgaggccagcatcattctgataccaaagccgggcagagacacaaccaaaaaagagaattttagaccaatatccttgatgaacattgatgcaaaaatcctcaataaaatactggcaaaacgaatccagcagcacatcaaaaagcttatccaccatgatcaagtgggcttcatccctgggatgcaaggctggttcaatatatgcaaatcaataaatgtaatccagcatataaacagagccaaagacaaaaaccacatgattatctcaatagatgcagaaaaagcctttgacaaaattcaacaacccttcatgctaaaaactctcaataaattaggtattgatgggacgtatttcaaaataataagagctatctatgacaaacccacagccaatatcatactgaatgggcaaaaactggaagcattccctttgaaaactggcacaagacagggatgccctctctcaccgctcctattcaacatagtgttggaagttctggccagggcaatcaggcaggagaaggaaataaagggtattcaattaggaaaagaggaagtcaaattgtccctgtttgcagacgacatgattgtttatctagaaaaccccatcgtctcagcccaaaatctccttaagctgataagcaacttcagcaaagtctcaggatacaaaatcaatgtacaaaaatcacaagcattcttatacaccaacaacagacaaacagagagccaaatcatgagtgaactcccattcacaattgcttcaaagagaataaaatacctaggaatccaacttacaagggatgtgaaggacctcttcaaggagaactacaaaccactgctcaaggaaataaaagaggacacaaacaaatggaagaacattccatgctcatgggtaggaagaatcaatattgtgaaaatggccatactgcccaaggtaatttacagattcaatgccatccccatcaagctaccaatgactttcttcacagaattggaaaaaactactttaaagttcatatggaaccaaaaaagagcccgcatcgccaagtcaatcctaagccaaaagaacaaagctggaggcatcacactacctgacttcaaactatattacaaggctacagtaaccaaaacagcatggtactggtaccaaaacagagatatagatgaatggaacagaacagagccctcagaaataatgccgcatatctacaactatctgatctttgacaaacctgagaaaaacaagcaatggggaaaggattccctatttaataaatggtgctgggaaaactggctagccatatgtagaaagctgaaactggatccctttcttacaccttatacaaaaatcaattcaagatggattaaagatttaaacgttagacctaaaaccataaaaaccctagaagaaaacctagacattaccattcaggacataggcgtgggcaaggacttcatgtccaaaacaccaaaagcaatggcaacaaaagacaaaattgacaaatgggatctaattaaactaaagagcttctgcacagcaaaagaaactaccatcagagtgaacaggcaacctacaacatgggagaaaattttcgcaacctactcatctgacaaagggctaatatccagaatctacaatgaactcaaacaaatttacaagaaaaaaacaaacaaccccatcaaaaagtgggtgaaggacatgaacagacacttctcaagagaagacatttatgcagccaaaaaacacatgaaaaaatgctcatcatcactggccatcagagaaatgcaaatcaaaaccactatgaggttttactgggatttaataatgcttataatgatggttggaaatctagtcatcataccagttggaatcacattctttacagagcaaacaacaacaccatggattattttcaatgtggcatcagatacagttttcctattggacctgatcatgaattttaggactgggactgtcaatgaagacagttctgaaatcatcctggaccccaaagtgatcaagatgaattatttaaaaagctggtttgtggttgacttcatctcatccatcccagtggattatatctttcttattgtagaaaaaggaatggattctgaagtttacaagacagccagggcacttcgcattgtgaggtttacaaaaattctcagtctcttgcgtttattacgactttcaaggttaattagatacatacatcaatgggaagaggaacgcagctcctcaccagcaacagaacaaagctggacggagaatgactttgacgagctgagagaagaaggtttcagacgatcaaattactctgagctacgggaggacattcaaaccaaaggcaaagaagttgaaaactttgaaaaaaatttagaagaatgtataactagaataaccaatacagagaagtgcttaaaggagctgatggagctgaaaaccaaggctcgagaactacgtgaagaatgcagaagcctcaggagccgatgcgatcaactggaagaaagggtatcagcaatggaagatgaaatgaatgaaatgaagcaagaagggaagatcaaaagagacaaagaaggccattacataatggtaaagggatcaattcaacaagaagagctaactatcctaaatatatatgcacccaatacaggagcacccagattcataaagcaagttctgagtgacctacaaagagacttagactcccacacattaataatgggagactttaacacctcactgttaacattagacagatcaatgagacagaaagtcaacaaggatacccaggaattgaactcatctctgcaccaagcggacctaatagacatctacagaactctccaccccaaatcaatagaatatacatttttttcagcaccacaccacacctattccaaaattgaccacatagttggaagtaaagctctcctcagcaaatgtaaaagaacagaaattataacaaactatctctcagaccacagtgcaatcaaactagaactcaggattaagaatctcactcaaagccgctcaactacatggaaactgaacaacctgctcctgaatgactactgggtacataacgaaatgaaggcagaaataaagatgttctttgaaaccaacgagaacaaagacacaacataccagaatctctgggacgcattcaaagcagtgtgtagagggaaatttatagcactaaatgcccacaagagaaagcaggaaagatccaaaattgacaccctaacatcacaattaaaagaactagaaaagcaagagcaaacacattcaaaagctagcagaaggcaagaaataactaaaatcagagcagaactgaaggaaatagagacacaaaaaacccttcaaaaaatcaatgaatccaggagctggttttttgaaaggatcaacaaaattgatagaccgctagcaagactaataaagaaaaaaagagaggagaatcaaatagacacaataaaaaatgataaaggggatatcaccaccgatcccacagaaatacaaactaccatcagagaatactataaacacctctacgcaaataaaccagaaaatctagaagaaatggataaattcctcgacacatacactctcccaagactaaagcaggaagaagttgaatctctgaatagaccaataacaggagctgaaattgtggcaataatcaatagtttaccaaccaaaaagagtccaggaccagatggattcacagccgaattctaccagaggtacaaggaggaactggtaccattccttctgaaactattccaatcaatagaaaaagagggaatcctccctaactcattttatgaggccagcatcattctgataccaaagccgggcagagacacaaccaaaaaagagaattttagaccaatatccttgatgaacattgatgcaaaaatcctcaataaaatactggcaaaccgaatccagcagcacatcaaaaagcttatccaccatgatcaagtgggcttcatccctgggatgcaaggctgccaatatcatactgaatgggcaaaaactggaagcattcctttgaaaactggcacaagacagggatgccctctctcaccactcctattcaacacagtgttggaagttctggccagggcaatcaggcaggagaaggaaataaagggtattcaattaggaaaagaggaagtcaaattgtccctttttgcagacgacatgattgtttatctagaaaaccccatcgtctcagcccaaaatctccttaagctgataagcaacttcagcaaagtctcaggatacaaaatcaatgtacaaaaatcacaagcattcttatacaccaacaacagacaaacagagagccaaatcatgagtgaactcccattcacaattgcttcaaagagaataaaatacctaggaatccaatttacaagggatgtgaaggacctcttcaaggagaactacaaaccactgctcaaggaaataaaagaggatacaaacaaatggaagaacattccatgctcatgggtaggaagaatcaatatcgtgaaaatggccatactgcccaaggtaatttacagattcaatgccatccccatcaagctaccaatgactttcttcacagaattggaaaaaactactttaaatttcatatggaaccaaaaaagagcccgcatcgccaagtcaatcctaagccaaaagaacaaagctggaggcatcacactacctgacttcaaactatactacaaggctacagtaactaaaacagcatggtactggtaccaaaacagagatatagatcaatggaacagaacagagccctcagaaataacgccgcatacctacaattatctgatctttgacaaacctgagaaaaacaagcaacggggaaaggattccctatttaataaatggtgctgggaaaactggctagccatatgtagaaagctgaaactggatcccttccttacaccttatacaaaaatcaattcaagatggattaaagatttaaacgttagacctaaaaccataaaaatcctagaagaaaacctaggcattaccattcaggacataggcgtgggcaaggacttcatgtccaaaacaccaaaagcaatggcaacaaaagccaaaattgacaaatgggatctaattaaactaaagagcttctgcacagcaaaagaaactaccatcagagtgaacaggcaacctacaacatgggagaaaattttcgcaacctactcatctgacaaagggctaatatccagaatctacaatgaactcaaacaaatttacaagaaaaaaacaaacaaccccatcaaaaagtgggcgaaggacatgaacagacacttctcaaaagaagacatttatgcagccaaaaaatacatgaaaaaatgctcatcatcactggccatcagagaaatgcaaatcaaaaccacaatgagataccatctcacaccagccccggtgtgtgatgttcgccttcctgtatccaagtgttctcattgttcagttcccacctatgagtga

SEQ ID NO: 3994 - DNA, 4545 bp, Homo sapiens
  SIMILAR (1105)..(3684): 951254mologous to Homo sapiens putative p150,accession number U93563,Smith-Waterman Score=4225.
atggctgcctggaacctgctacttaaatcatatgcatattggggaggtctaaggaaggaagatttccactgtttagaccggaagaccctgaggacagtatcctttctggctgccctgctgtcatatgagtccatagggggcaaaggaaaactaacaaccagaaaggacatctacaccgaaaacccatctgtacatcaccatcatcaaagaccaaaagtagataaaaccacaaagatggggaaaaaacagaacagaaaaactggaaactctaaaatgcagagcgcctctcctcctccaaaggaacgcagttcctcaccagcaacagaacaaagctggatggagaatgattttgaagagctgagagaagaaggcttcagacgatcaaattactctgagctacgggaggacattcaaaccaaaggcaaagaagttgaaaactttgaaaaaaatttagaagaatgtataactagaataaccaatacagagaagtgcttaaaggagctgatggagctgaaaaccaaggctcgagaactacgtgaagaatgcagaagcctcaggagccgatgcgatcaactggaagaaagggtatcagcaatggaagatgaaatgaatgaaatgaagcgagaagggaagtttagagacaaaagaataaaaagaaatgagcaaagcctccaagaaatatgggactatgtgaaaagaccaaatctacgtctgattggtgtacctgaaagtgatgtggagaatggaaccaagttggaaaacactctgcaggatattatccaggagaacttccccagtctagcaaggcaggccaacgttcagattcaggaaatacagagaacgccacaaagatactcctcgagaagagcaactccaagacacataattgtcagattcaccaaagttgaaatgaaggaaaaaatgttaagggcagccagagagaaaggtcgggttaccctcaaaggaaagcccatcagactaacagcggatctctcggcagaaaccctacaagccagaagagagtgggggccaatattcaacattcttaaagaaaagaattttcaacccagaatttcatatccagccaaactaagcttcataagtgaaggagaaataaaatactttatagacaagcaaatgctgagagattttgtcaccaccaggcctgccctaaaagagctcctgaaggaagcgctaaacatggaaaggaacaaccggagaaagcaggaaagatccaaaattgacaccctaacatcacaattaaaagaactagaaaagcaagagcaaacacattcaaaagctagcagaaggcaagaaataactaaaatcagagcagaactgaaggaaatagagacacaaaaaacccttcaaaaaatcaatgaatccaggagctggttttttgaaaggatcaacaaaattgatagaccgctagcaagactaataaagaaaaaaagagagaagaatcaaatagacacaataaaaaatgataaaggggatatcaccactgatcccacagaaatacaaactaccatcagagaatactacaaacacctctacgcaaataaactagaaaatctagaagaaatggatacattcctcgacacatacactctcccaagactaaaccaggaagaagttgaatctctgaatagaccaataacaggctctgaaattgtggcaataatcaatagtttaccaaccaaaaagagtccaggaccagatggattcacagccgaattctaccagaggtacaaggaggaactggtaccattccttctgaaactattccaatcaatagaaaaagagggaatcctccctaactcattttatgaggccagcatcattctgataccaaagccgggcagagacacaaccaaaaaagagaattttagaccaatatccttgatgaacattgatgcaaaaatcctcaataaaatactggcaaaccgaatccagcagcacatcaaaaagcttatccaccatgatcaagtgggcttcatccctgggatgcaaggctggttcaatatacgcaaatcaataaatgtaatccagcatataaacagagccaaagacaaaaaccacatgattatctcaatagatgcagaaaaagcctttgacaaaattcaacaacccttcatgctaaaaactctcaataaattaggtattgatgggaagtatttcaaaataataagagctatctatgacaaacccacagccaatatcatactgaatgggcaaaaactggaagcattccctttgaaaactggcacaagacagggatgccctctctcaccgctcctattcaacatagtgttggaagttctggccagggcaatcaagcaggagaaggaaataaagggtattcagttaggaaaagaggaagtcaaattgtccgtgtttgcagacgacatgattgtttatctagaaaaccccatcgtctcagcccaaaatctccttaagctgataagcaacttcagcaaagtctcaggatacaaaatcaatgtacaaaaatcacaagcattcttatacaccaacaaccgacaaacagagagccaaatcatgagtgaactcccattcacaattgcttcaaagagaataaaatacctaggaatccaacttacaagggatgtgaaggacctcttcaaggagaactacaaaccactgctcaaggaaataaaagaggacacaaacaaatggaagaacattccatgctcatgggtaggaagaatcaatatcgtgaaaatggccatactgcccaaggtaatttacagattcaatgccatccccatcaagctaccaatgactttcttcacagaattggaaaaaactactttaaagttcatatggaaccaaaaaagagcccgcatcgccaagtcaatcctaagccaaaagaacaaagctggaggcatcacactacctgacttcaaactatactacaaggctacagtaaccaaaacagcatggtactggtaccaaaacagagatatagatcaatggaacagaacagagccctcagaaataatgccgcatatctacaactatctgatctttgacaaacctgagaaaaacaagcaatggggaaaggattccctatttaataaatggtgctgggaaaactggctagccatatgtagaaagctgaaactggatcccttccttacaccttatacaaaaatcaattcaagatggattaaagatttaaacgttagacttaaaaccataaaaaccctagaagaaaacctaggcattaccattcaggacataggcgtaggcaaggacttcatgtccaaaacaccaaaagcaatggcaacaaaagccaaaattgacaaatgggatctaattaaactaaagagcttctgcacagcaaaagaaactaccatcagagtgaacaggcaacctacaacatgggagaaaattttcgcaacctactcatctgacaaagggctaatatccagaatctacaatgaactcaaacaaatttacaagaaaaaaacaaacaaccccatcaaaaagtgggcaaaggacatgaacagacacttctcaaaagaagacatttatgcagccaaaaaacacatgaagaaatgctcatcatcactggccatcagagaaatgcaaatcaaaaccactatgagatatcatctcacaccagttagaatggcaatcattaaaaagtcaggaaacaacagccctggcgtcaaagccagttcccggcccagtctcgtcctgcagcagcctgccgcctgcctcctctttcctttcaacatgacagatgccgctgtgtccttcaccaaggacttcctggcaggtggagtggcagcagccatctccaagatgggggtagcgcccatcgagagggtcaagctgctgctggaggtacagcatgccagcaagcagatcaccgcagatatgcaatacaagggcattatagactgcgtggtccatattctcaaggagcagggagtcctgtccttctggcaccgtaacctggtcaatgtcctcagatacttccccacccaggctctcaacttggccttcaaagataaacacaagcagatcttcctgggtggtgtggacaagaggacccagtttgggagctactttgcagggaatccggcatcaggtggtgccgctggggccacatccttgtgttttgtgtaccctcttgattttgcccatacctgtctagcagctgacggtattatcatctaccgagctgcctactttggtatctatgacactgcaaagggaatgcttccggatcccaggaacactcacatcatcatcagctggatgatcactcagactgtcactgccattgctgggttgacttcccatccatttgacaccgttcgatgccgcatgatgatgcagtcagggcgcaaaggaattgacgtcatgtacacaggcacgcttgactgctggaggaagattgttggtgatgaaggaggcaaagattttttcaagggtgcatggtccagtgttctcagaggcatggatggtgcttttgtgcttgtcttgtatggtgaaatcaagaagtacacataa

SEQ ID NO: 3995 - DNA, 3638 bp, Homo sapiens
  SIMILAR (712)..(3546): 971254mologous to Homo sapiens putative p150,accession number U93563,Smith-Waterman Score=4817.
atggggaaaaaacagaacagaaaaactggaaactctaaaacgcagagcgcctctcctcctccaaaggaacgcagttcctcaccagcaacagaacaaagctggatggagaatgattttgacgagctgagagaagaaggcttcagacgatcaaattactctgagctatgggaggacattcaaaccaaaggcaaagaagttgaaaactttgaaaaaaatttagaagaatgtataactagaataaccaatacagagaagtgcttaaaggagctgatggagctgaaaaccaaggctcgagaactacatgaagaatgcagaagcctcaggagccgatgcgatcaactggaagaaagggtatcagcaatggaagatgaaatgaatgaaatgaagcgagaagggaagtttagagaaaaaagaataaaaagaaatgagcaaagcctccaagaaatatgggactatgtgaaaagaccaaatctacgtctgattggtgtacctgaaagtgatgtggagaatggaaccaagttggaaaacactctgcaggatattatccaggagaacttccccaatctagcaaggcaggccaacgttcagattcaggaaatacagagaatgccacaaagatactcctcgagaagagcaactccaagacacataattgtcagattcaccaaagttgaaatgaaggaaaaaatgttaagggcagccagacagaaagcaccacaccacacctattccaaaattgaccacatagttggaagtaaagctctcctcagcaaatgtaaaagaacagaaattataacaaactatctctcagaccacagtgcaatcaaactagaactcaggattaagaatctcactcaaagccgctcaactacatggaaactgaacaacctgctcctgaatgactactgggtacataacgaaatgaaggcagaaataaagatgttctttgaaaccaacgagaacaaagacaccacataccagaatctctgggacacattcaaagcagtgtgtagagggaaatttatagcactaaatgcctacaagagaaagcaggaaacatccaaaattgacaccataacatcacaattaaaagaactagaaaagcaagagcaaacacattcaaaagctagcagaaggcaagaaataactaaaatcagagcagaactgaaggaaatagagacacaaaaaacccttcaaaaaatcaatgaatccaggagctggttttttgaaaggatcaacaaaattgatagaccgctagcaagactaataaagaaaaaaagagagaagaatcaaatagacacaataaaaaatgataaaggggatatcaccaccgatcccacagaaatacaaactaccatcagagaatactacaaacacctctacgcaaataaactagaaaatctagaagaaatggatacattcctcgacacatacactctcccaagactaaaccaggaagaagttgaatctctgaatagaccaataacaggctctgaaattgtggcaataatcaatagtttaccaaccaaaaagagtccaggaccagatggattcacagccgaattctaccagaggtacaaggaggaactggtaccattccttctgcaactattccaatcaatagaaaaagagggaatcctccctaactcattttatgaggccagcatcattctgataccaaagccgggcagagacacaaccaaaaaagagaattttagaccaatatccttgatgaacattgatgcaaaaatcctcaataaaatactggcaaaccgaatccagcagcacatcaaaaagcttatccaccatgatcaagtgggcttcatccctgggacgcaaggctggttcaatatacgcaaatcaataaatgtaatccagcatataaacagagccaaagacaaaaaccacatgattatctcaatagatgcagaaaaagcctttgacaaaattcaacaacccttcatgctaaaaactctcaataaattaggtattgatgggacatatttcaaaataataagagctatctatgacaaacccacagccaatatcatactgaatgggcaaaaactggaagcattccctttgaaaactggcacaagacagggatgccctctctcaccgctcctattcaacatagtgttggaagttctggccagggcaatcaggcaggagaaggaaataaagggtattcaattaggaaaagaggaagtcaaattgtccctgtttgcagacgacatgattgtttatctagaaaaccccatcgtctcagcccaaaatctccttaagctgataagcaacttcagcaaagtctcaggatacaaaatcaatgtacaaaaatcacaagcattcttatacaccaataacagacaaacagagagccaaatcatgagtgaactcccattcacaattgcttcaaagagaataaaatacctaggaatccaacttacaagggatgtgaaggacctcttcaaggagaactacaaaccactgctcaaggaaataaaagaggacacaaacaaatggaagaacattccatgctcatgggtaggaagaatcaatatcgtgaaaatggccatactgcccaaggtaatttacagattcaatgccatccccatcaagctaccaatgactttcttcacagaattggaaaaaactactttaaagttcatatggaaccaaaaaagagcctgcatctccaagtcaatcctaagccaaaagaacaaagctggaggcatcacactacctgacttcaaactatactacaaggctacagtaaccaaaacagcatggtactggtaccaaaacagagatatagatcaatggaacagaacagagccctcagaaataatgccacatatctacaactatctgatctttgacaaacctgagaaaaacaagcaatggggaaaggattccctatttaataaatggtgctgggaaaactggctagccatatgtagaaagctgaaactggatcccttccttacaccttatacaaaaatcaattcaagatggattaaagatttaaacgttagacctaaaaccataaaaaccctagaagaaaacctaggcattaccattcaggacataggcgtgggcaaggacttcatgtccaaaacaccaaaagcaatggcaacaaaagccaaaattgacaaatgggatctaattaaactaaagagcttctgcacagcaaaagaaactaccatcagagtgaacaggcaacctacaacatgggagaaaattttcacaacctactcatctgacaaagggctaatatccagaatctacaatgaactcaaacaaatttacaagaaaaaaacaaacaaccccatcaaaaagtgggcgaaggacatgaacagacacttctcaaaagaagacatttatgcagccaaaaaacacatgaagaaatgctcatcatcactggccatcagagaaatgcaaatcaaaaccactatgagatatcatctcgcaccagttagaatggcaatcattaaaaagtcaggaaacaacagagatcagagagctgggaagatcagtgaaagacttgtgattacctcagaaatgattgaaaatatccaatctgttaaggcatactgctgggaagaagcaatggaaaaaatgattgaaaacttaagaca

SEQ ID NO: 3996 - DNA, 3588 bp, Homo sapiens
  SIMILAR (1504)..(3315): 951254mologous to Homo sapiens putative p150,accession number U93572,Smith-Waterman Score=3019.
gatcaaattcacacataacaatattaaccttaaatgtaaatgggctaaatgctccaattaaaagacacagactggcaaattggataaagagtcaagacccatcagtgtgctgtattcaggagacccatctcacgtgcagagacacacacaggatcaaaataaagggatggagggagatctaccaagcaaatggaaaacaaaaaaaggcaggggttgcaatcctagtctctgataaaacggactttaaaccaacaaagatcaaaagagacaaagaaggccattacatgatggtaaagggatcaattcaacaagaagagctaactaccctaaatatatatgcacccaatacaggagcacccagattcataaagcaagtccttagagacctacaaagagacttagactcccacacattaataatgggagactttaacaccccactgtcaacattagacagatcaacgagacagaaagttaacaaggatatccaggatttgaactcagctctgcaccaagtggacctaatagacatctacagaactctccaccccaaatcaacagaatatacattcttctcagcactacaccacatttattccaaaattgaccacatagttggaagtaaagcactcctcagcaaatataaaacaacagaaattataacaaactgtctctcagaccacagtgcaatcaaactcgaactcaggattaagaaactcactcaaaaccgctcaactacatggaaactgaacaacctgctcctgaatgactactgggtacataacaaaatgaaggcagaaataaatacattatttgaaaccaacgagaacaaagacacaacataccagaatctctgggacacattcaaagcagtgtgtagagggaaattcatagcactaaatgcccacaagagaaagcaggaaagatctaaaattgacaccctaacatcacaattaaaagaactagagaagcaagaacaaacacattcaaaagctagcagaaggcaagaaataactaagatcagagcaaaactgaaggaaatagagacacaaaaaatccttcaaaaaatcaatgaatccaggagctggttttttgaaaagatcaacaaaattgatagaccactagcaagaccaataaagaagaaaagagagaagaatcaaatagatgcaataaaaaatgataaaggggatatcaccactgatcccacagaaatacaaactaccatcagagaatactataaacacctctatgcaaataaactagaaaatctagaagaaatggataaattcctcaacacatacaccctcccaagactaaaccaggaagaagttgaatctctgaataaaccaataacaggctctgaaattgaggcaataattaatagcttaccaatcaaaaaaagtccaggaccagatggattcatagccaaattccaccagaggtacaaggaggagctggaggccagcatcatcctgataccaaagcctggcagagacacaaccaaaaaaagagaattttagaccaatatccttgatgaacattgatgcaaaaatcctcaataaaatactggcaaaccgaatccagcagcacatcaaaaagcttatccaccatgatcaagtgggcttcatccctgggatgcaaggctggttcaatatacgcaaatcaataaatgtaatccagcatataaacagagccaaagacaaaaaccacatgattatctcaatagatgcagaaaaagcctttgacaaaattcaacaacccttcatgctaaaaactctcaagaaattaggtattgatgggacatatttcaaaataataagagctatctatgacaaacccacagccaatatcataccgaatgggcaaaaactggaagcattccctttgaaaactggcacaagacagggatgccctctctcaccactcctattcaacatagtgttggaagttctggccagggcaattaggcaagagaaggaaataaagggtatccaattaggaaaagaggaagtcaaattgtccctgtttgcagatgacatgattctctatctagaaaaccccattgtctcagcccaaaatctccttaagctgataagcaacttcagcaaagtctcaggatacaaaatcaatgtacaaaaatcacaagcattctcatacaccaacaatagacaaacagagagccaaatcatgagtgaactcccattcacaattgcttcaaagagaataaaatatctaggaatccaacttacaagggatgtgaaggacctcttcaaggagaactacaaaccactgctcaaggaaataaaagaggatacaaacaaatggaagaacattccatgctcatgggtaggaagaatcaatatcgtgaaaatggccatactgcccaaggtaatttacagattcaatgccatccccatcaagctaccaatgactttcttcacagaattggaaaaaactactttaaagttcatatggaaccaaaaaagagcccgcatcaccaagtcaatcctaagccaaaagaacaaagctggaggcatcacactacctgacttcaaactatactacaagattacagtaaccaaaacagcatggtactggtaccaaaacagagatatagatcaatggaacagaacagagccctcagaaataatgccgcatacctacaactatctgatctttgacaaacctgagaaaaacaagcaatggggaaaggattccctatttaataaatggtgctgggaaaactggctagccatatgtaggagaaagctgaaactggatcccttccttacaccttatacaaaaattaattcaagatggattaaagacttaaatgttagacctaaaaccataaaaaccctagaagaaaacctaggcaataccattcaggacataggcatgggcaaggacttcatgtctacaacaccaaaagcaatggcaacaaaagccaaaattgacaaatgggatctaattaaactaaagagcttctgcacagcaaaagaaactaccatcacagtgaacaggcaacctacagaatgggagaaaatttttacaatctacccatctgacaaagggctaatatccagaatctacaaagaactcaaacaaatttacaagaaaagaacaaacaaccccatcaacaagtgggtgaaggatatgaacagacacttctcaaaagaagacatttatacagccaaaaggcacatgaaaaaatgctcatcatcactggccatcagagaaatgcaaatcaaaaccacattgagataccatctcataccagttagaatggcgatcattaaaaagtcaggaaacaacagcaaagcccggatgatctcagcagagaactgctctcctaaactcactgagaaaatagaactctcagattggaattctccaaatattcaaacctgcacggatcctctctttttgtgtcctactgagagagctgtaacactcactgtgaaggtctgtggcttcactcctgaagtcattgagaccacgaacccaccaggaggaacaaacaactccggacgtgacacccttaagagctgtaacactcactgcgaaggtctgcggcttcactcctga

SEQ ID NO: 3997 - DNA, 8907 bp, Homo sapiens
  SIMILAR (6391)..(8571): 991254mologous to Homo sapiens BC331191_1,accession number AC007842,Smith-Waterman Score=4075.
cctccggtctacagctcccagcgtgagcgacgcagaagacgggtgatttctgcatttccatctgaggtaccgggttcatctcactagggagtgccagacagtgggcgcaggccagtgggtgcgcgcaccgtgcggagccgaagcagggcgaggcattgcctcacctgggaagcgcaaggggtcagggagttccctttccgagtcaaagaaaggggtgacggacgcacctggaaaatcgggtcactcccacccgaatattgcgcttttcagaccggcttaaaaaacggcgcaccacgagactatatcccacacctggccttcggagggtcctacgcccacggaatctcgctgattgctagcacagcggtctgagatcaaactgcaaggccgcagcaaggctgggggaggggcgcccgccattgcccaggcttgcttaggtaaacaaagcagccggggaagctcgaactgggtgcagcccaccacagctcaaggaggcctgcctgcctctgtaggctccacctctgggggcagggcacagacaaacaaaaagacagcagtaacctctgcagacttaaatgtccctgtctgacagctttgaagagagcagtggttctcccagcacgcagctggagatctgagaacgggcagactgcctcctcaagtgggtccctgacccctgacccccgagcagcctaactgggaggcaccccccagcaggggcacactgacacctcacacggcagggtattccaacagacctgcagctgagggtcctgtctgttagaaggaaaactaacaaacagaaaggacatccacaccgaaaacgcatctgtacatcaccatcatcaaagaccaaaagtagataaaaccacaaagatggggaaaaaacagaacagaaaaactggaaactctaaaacgcagagcacctctcctcctccaaaggaacgcagttcctcaccagcaacggaccaaagctggatggagaatgattttgacgagctgagagaagaaggcttcagacgctcaaattactctgagctacgggaggacattcaaaccaaaggcaaagaagttgaaaactttgaaaaaaatttagaagaatgtataactagaataaccaatacagagaagtgcttaaaggagctgatggagctgaaaaccaaggctcgagaactacgtgaagaatgcagaagcctcaggagccaatgcgatcaactggaagaaagggtatcagcaatggaagatgaaatgaatgaaatgaagcaagaagggaagtttagagaaaaaagaataaaaagaaacgagcaaagcctccaagaaatatgggactatgtgaaaagaccaaatctacgtctgattggtgtacctgaaagtgatgcggagaatggaaccaagttggaaaacactctgcaggatattatccaggagactttccccaatctagcaaggcaggccaacgttcagattcaggaaatacagagaacgccacaaagatactcctcgagaagagcaactccaagacacataattgtcagattcaccaaagttgaaatgaaggaaaaaatgttaagggcagccagagagaaaggtcgagttaccctcaaagggaagcccatcagactaacagcggatctctcggcagaaaccctacaagccagaagagagtgggggccaatattgaacattcttaaagaaaagaattttcaacccagaatttcatatccagccaaactaagcttcataagtgaaggagaaataaaatactttacagacaagcaaatgctgaccgattttgtcaccagcaggcctgccctaaaagagctcctgaaggaagcgctaaacatggaaaggaacaaccggtaccagccactgcaaaatcatgccaaaatgtaaagaccatcgagactaggaagaaactgcatcaactaacgagcaaaatcaccagctaacatcataatgacaggatcaaattcacacataacaatattaactttaaatgtaaatggactaaattctccaattaaaagacacagactggcaagttggataaagagtcaagacccatcagtgtgctgtattcaggaaacccatctcatgtgcagagacacacataggctcaaaataaaaggatggaggaagatctaccaagcaaatggaaaacaaaaaaaggcaggggttgcaatcctagtctctgataaaacagactttaaaccaacaaagatcaaaagagacaaagaaggccattacatgatggtaaagggatcaattcaacaagaggagctaactatcctaaatatgtatgcacccaatacaggagcacccagattcataaagcaagtcctgagtgacctacaaagagacttagactcccacacattaataatgggagactttaacaccccactgtcaacattagacagatcaacgagacagaaagtcaacaaggatacccaggaattgaactcagctctgcaccaagcagacctaatagacatctacagaactctccaccccaaatcaacagaatatacatttttttcagcaccacaccacagctattccaaaattgaccacatacttggaagtgaagctctcctcagcaaatgtaaaagaacagaaattataacaaactatctctcagaccacagtgcaatcaaactagaactcaggattaagaatctcactcaaagccgctcaactacatggaaactgaacaacctgctcctgaatgactactgggtacataacgaaatgaaggcagaaataaagatgttctttgaaaccaacgagaacaaagacacaacataccagaatctctaggacgcattcaaagcagtgtgtagagggaaatttatagcactaaatgcccacaagagaaagcaggaaaagatccaaaattgacactctaacatcacaattaaaagaactagaaaagcaagagcaaacacattcaaaagctagcagaaggcaagaaataactaaaatcagagcagaactgaaggaaatagagacacaaaaaacccttcaaaatatcaatgaatccaggagctggttttttgaaaggatcaacaaaattgatagaccgctagcaagactaataaagaaaaaaagagagaagaatcaaatagacacaataaaaaatgataaaggggatatccaccaccgatctcacagaaatacaaactaccatcagggaatactacaaacacctctacgcaaataaactagaaaatctagaagaaatggataaattcctcgacacatacactctcccaagactaaaccaggaagaagttgaatctctgaatagaccgataacaggagctgaaattgtggcaataatcaatagcttaccaaccaaaaggagtgcaggaccagatggattcacagctgaattctaccagaggtacaaggaggaactggtaccattccttctgaaactattccaatcaatagaaaaagagggaatcctccctaactcattttgtgaggccagcatcattctgataccaaagccaggcagagacacaacaaaaaaagagaattttagaccaatatccttgatgaacattgatgcaaaaatcctcaataaaatactggcaaaacgaatccagcagcacatcaaaaagcttatccaccatgatcaagtgggcttcatccctgggatgcaaggctggttcaatatacgcaaatcaataaatgtaatccagcatatcaacagagccaaagacaaaaaccacatgattatctcaatagatgcagaaaaggcctttgacaaaattcaacaacacttcatgctaaaaactctcaatagattaggtattgatgggacgtatttcaaaataataagagctatctatgacaaacccacagccaatatcatactgaatgggcaaaaactggaagcattccctttgaaaactggcacaagacaaggatgccctctctcaccactcctattcaacatagtgttggaagttctggccagggcaattaggcaggagaaggaaataaaaggtattcaattaggaaaagaggaggtcaaattgtgcctgtttgcagacgacatgattgtgtatctagaaaaccccattgtctcagcccaaaatctccttaagctgataagcaacttcagcaaagtctcaggatacaaaatcaatggacaaaaatcacaagcattcttatacaccaacaacagacaaacagagagccaaatcatgagtgaactcccattcacaattgcgtcaaagagaataaaatacctaggaatccaacttacaagggatgtgaaggacctcttcaaggagaactacaaaccactgctcaacaaaataaaagaggatacaaagaaatggaagaatattccatgctcatgggtaggaagaatcaatatcatgaaaatggccatactgcccaaggtaatttacagattcaatgccatccccatcaagctaccaatgactttcttcacagaattggaaaacactactttaaagttcatatggaaccaaaaaagagcccgcatctccaaggcagtcctaagccaaaagaacaaagctggaggcgtcacactacctgacttcaaactatactacaaggctacagtaaccaaaacagcatggtactggtaccaaaacagagatatagatcaatggaacagaacagagccctcagaaataacggcacataactacaactatctgatctttgacaaacctgagaaaaacaagcaatggggaaaggattccctatttaataaatggtgctgggaaaactggctagccatatgtagaaagctgaaactggatcccttccttacaccttatacaaaaatcaattcaagatggattaaagatttaaacgttagacctaaaaccataaaaaccctagaagaaaacctaggcattaccattcaggacataggcatgggcaaggacttcatgtctaaaacaccaaaagcaatggcaacaaaagccaacattgacaaatgggatctaattaaactaaagagcttctgcacagcaaaagaaactaccatcagagtgaacaggcaacctacaaaatgggagaaaattttcgcaacctactcatctgacaaagggctaatatccagaatctataatgaactcaaacaaatttacaagaaaaaaaacaaacaaccccatcaaaaagtgggtgaaggacatgaacagacacttctcaaaagaagacatttatgcagccaaaaaacacatgaaaaaatgctcatcatcactggccatcagagaaatgcaaatcaaaaccactatgagatatcatctcacaccagttagaatggcaatcatgaaaaaagtcaggaaacaacagactaacccaggaagaagttgaatctctgaatagatcaataacaggagctgaaattgaggcaataatcaatagcttaccaaccaaaaaagatccaggaccagatggattcacagccgaattctaccacagagaataaaatacctaggaatccaacttacaagggatgtgaaggacctcttcaaggagaactacaaaccactgctcaaggaaataaacgaggatacaaacaaatggaagaacattccatgctcatgggtaggaagaatcaatatcatgaaaatggccatactgcccaaggtaatttatagattcaatgccatccccatcaagctaccaatgactttcttcacagaattggaaaaaactactttaaagttcatatggaaccaaaaaagagcccgcatcaccaagtcaatcctaagccaaaagaacaaagccggaggcatcacactacctgacttcaaactatactacaaggctacagtaaccaaaacagcatggtactgttaccaaaacagagatatagatcaatggaacagagcagagccctcagaaataatgctgcctatctacaactatctgatctttgacaaacctgacaaaaacaagcaatggggaaaggattccctatttaataaatggtgctgggaaaactggctagccatatgtagaaagctgaaactggatcccttccttacaccttatacaaaaattaattcaagatggattaaagacttacatgttagacctaaaaccataaaaaccctagaagaaaacctgggcaataccattcaggacataggcatgggcaaggactttatgtctaaaacaccaaaagcaatggcaacaaaagccaaaattgacaaatgggatctaattaaactaaagagcttctgcacagcaaaagaaactaccatcagagtgaacaggcaacctacaaaatgggagaaaattttcacaacctactcatctgacaaagggctaatatccagaatctacaatgaactcaaacaaatttacaagaaaaaaacaaccccatcaaaaaatttggagtcaaaatatggacctgagaaaatatctccagaaaatgatatttttgaaataaatttacccaaacatgttataaagcaaataagtaaaacacttggcctcgaggccttttattttagaaatgactcagaatatagaagtagatttgagggacgacagggacatcaagaaggatatatcaaccagaagatcatcagctatgaagaaatgcctgcttatactcatgcttctcctattcataatacacataaaccatatgaatgtaaggaatgtgggaaatactttagttgtggttcaaatcttattcagcatcagagtattcatactggagagaaaccctataaatgcaaagaatgtgggaaagcctttcaacttcacatacaacttactcgacatcagaaatttcatactggtgagaaaacttttgaatgtaaggaatgtggaaaagcctttaatcttcccacccagcttaatcgccataagaacattcacacagttaagaaactgtttgaatgtaaggaatgtgggaagtcttttaatcgtagctcaaaccttactcagcatcaaagtattcatgctggtgtaaaaccatatcaatgtaaggagtgtgggaaagcctttaatcgtggttcaaatcttattcagcatcaaaaaattcattccaatgagaaaccctttgtatgtagggaatgtgagatggcctttcgatatcattaccaactcattgaacattgccgaattcatactggcgagaaaccctttgaatgtaaagaatgcagaaaggcctttactcttctgacaaagcttgttcgacatcagaagattcatatgggtgagaagccctttgaatgcagggaatgcgggaaggcctttagtctcctcaatcagcttaatcgccataagaatattcacacaggtgaaaaaccatttgaatgtaaagaatgtgggaagtcctttaatcgtagttcaaaccttattcaacaccagagtattcatgctgatgtaaaaccatatgaatgtaaggagtgtgggaaaggctttaatcgtggtgcaaatcttattcagcatcaaaaaattcattccaatgagaaaccctttgtatgtagggaatgtgagatggcctttcgatatcattaccaacttattcaacattgccaaattcatactggtgggaaaccctttgaatgtaaagaatgtggaaaggcctttagtcttctgacacagcttgctcgacataagaacattcatactggtgagaaaccatttgaatgtaaagactgtgggaaggccttcaatcgtggctcgaaccttgttcaacatcagagtattcacactggtgagaagccctatgaatgtaaggagtgtgggaaggcttttagacttcacctacaactttctcaacatgagaaaactcatacaggtgagaaaccctttgaatgtaaggaatgtgggaaattctttcgtcgtggttcaaatcttaatcaacatcgaagtattcataccggaaagaaaccctttgaatgtaaggaatgtgggaaagcctttcgacttcatatgcaccttattcgacatcagaaatttcatactggtgagaagccctttgaatgtaaggaatgtggcaaggccttcagtcttcacacccagcttaatcaccataagaacattcacacaggtgagaagccatttaaatgtaaagaatgtgggaagtcctttaatcgtgtctcaaaccttgttcaacatcagagtattcatgctggtgtaaaaccatatgaatgtaaggagtgtgggaaaggctttagtcgtgtttcaaaccttattcagcatcagaaaactcattccagtgcgaaaccctttgtatgtaaggagtgtaggaagacctttagatatcattaccagcttactgaacattaccgaattcatactggtgagaaaccctttgaatgtaaagaatgcggaaaggcctttggtcttctgacacagcttgctcaacatcagatcattcatactggtgagaagccatttaaatgtaaggagtgtgggaaggcctttaatcgtggctcaaaccttgttcaacctcagagtattcatactggtgagaaaccctatgaatgtaaggagtgtgggaaggcttttagacttcacctacaactttctctgcatcaaaaacttgtacagaaaattcatacttgggtgaaaacctttgaatgtaaggaatgtgggaaggcctttcaatatcattaccaatttcatggacattatagatttcatattcgtgagaacccttatgaatgtcaaggatgtgggaaatgctttaccagtggtagaaaccttagagtacatcagagaattcatactggtgagaaaccatatcaatgtgaagaatgtgggaaagcctttagtcatagttcaaacctgttaaacatgttaaaattcatactgatgagaaaccctatgaatgtaaggaatgtgaaaaggcctttagcagtaattatgatcttactgtacatctga

SEQ ID NO: 3998 - DNA, 450 bp, Homo sapiens
  SIMILAR (293)..(3): 981254mologous to Homo sapiens FKBP-ZAP:SH2 fusion protein,accession number W14786,Smith-Waterman Score=522.
cagggcagcccgtcggggtcgcgcgagtagaactcgcagagctctgccggtccacagtgcgctttgccgccggcaatggcgtaggtgccgttgagctggcgctcgatgggaaagtggtggaagcgcacatcgtgcacgagcgacagcacatagccgcccagcgagcgcaggcactggcgcagcaggaagagcccgtccgccatgcccgccagcttcaggtgctcctcggcctcggcacgcgagatgctgccgtagaagaagggcaggtgcgccgcggggtctggcatcgcccctgggcctcccgaaacctggggacgtacaggtggatgtccaggcaaacaggccacttgcggggtctctggtcccaatgccaatggagagccggttctgaataccccagcagcagctctgaggcccacggtgggccaggacgaaatggtcggtccgata

SEQ ID NO: 3999 - DNA, 522 bp, Homo sapiens
  SIMILAR (224)..(283): 801254mologous to Homo sapiens Human secreted protein, SEQ ID NO: 6536,accession number G02455,Smith-Waterman Score=81.
cttcccatcctcaagaatgtggctgggccagacccagactctgaggacattcagggacactgtgcctcgccagccctctgaagtgctcagaacgtatgtcccgaccccactgaatgccaggaaccatgcactgggaagtgggtggacaggagagacaagacatgctccttccccaagaggaggctgcaggcagcaagggaaacccttaggtcaagactctgtcagacagaaagaaggaaggaaggaaggaaggaaggtaggaaggaaggaaggaaggaaggaaataatggaattctactccgcggtaagtggaacagcatacggagacacgcagttccgcaaacgcatcgcaaaggcctcaggctggatgaaagaaaccagggattggattcaaatcatggaatcgtggacccaccacatggtcacagtgcagcctcagcagcgagtgaagctcgccagacctcctccggaaagcagggccagtgaaggtgtccagcactggggctgcagggactccctggg

SEQ ID NO: 4000 - DNA, 424 bp, Homo sapiens
  SIMILAR (3)..(203): 951254mologous to Homo sapiens Similar to a C.elegans protein encoded in cosmid C27F2 (U40419),accession number D87446,Smith- Waterman Score=334.
ggctgtctcccgcccccctcgcacacccttcccacccagaacgtgccagcagcgcgaggcacagttccgaggactcggacatcaccagtctcatagaagccatggacaaagacttcgaccaccatgactccccagccctagaagtgtttacagagcagcctccatcgccattgccaaaaagcaaaggtaatcatctcccactgccggagatccgtgatgtgtgagggaaaagccagtgcgtggcttaaggagctattaagattatagttgtggtaaacaactaattcagtaggttcctctggctcagatttatctccagtgttggacttcaacttttccataaaaatggcaattagaggtatctgtcataaaagatattatttgtatttcttaggattgtttaccaaaatcagaaattctgtgg

SEQ ID NO: 4001 - DNA, 5419 bp, Homo sapiens
  SIMILAR (2)..(5416): 1001254mologous to Homo sapiens Similar to a C.elegans protein encoded in cosmid C27F2 (U40419),accession number D87446,Smith-Waterman Score=9384.
tggagggctactacagaccgagacaacacttggactcagttcatatcagcagaaaagtatatctctctaccgggggaattgcaggcccatacgatttgagccaccaatgctggatttccatgaacaaccagttggaatgccaaaaatggaaaaagtctacttacataatcctagttctgaagaaacgattactttagtatcaatatctgctacaacatcacattttcatgcatcattttttcaaaataggaaaattcttccaggaggaaatacatcatttgatgtagtttttcttgcaagagtagtaggaaatgtagaaaatactttatttattaatacatctaatcatggggtatttacttaccaggtatttggtgttggagttccaaatccatatcgattgaggccgttccttggggccagagtccctgtgaatagcagtttctcacctataataaacatccacaatcctcacagtgagcctttacaggttgtagaaatgtactctagtggaggagaccttcacctagaactcccaacgggtcaacaaggaggtaccagaaaactgtgggaaattcctccttatgaaaccaagggagtgatgagagccagtttttcatctagagaagcagataatcacacagccttcataagaataaagactaatgcttcagacagcacagagtttatcattcttcctgttgaggttgaagttacaacagctcctggaatttattcctcaactgaaatgttagattttggtacactaagaacacaagatctaccaaaagttttaaaccttcatttattaaattcaggaacaaaagatgtaccaataacaagtgttcgacctacaccacaaaatgatgctataacggtacactttaaaccaattacattaaaagcatcagaaagtaaatacaccaaggttgcaagcattagttttgatgcatcgaaggcaaaaaagccatctcagttttctgggaaaataacagttaaagcaaaggaaaagagttattctaaacttgaaataccatatcaagcagaagttttagatggttatttgggatttgatcatgctgcaacattatttcacatccgagacagccctgctgatcctgtggaaaggccaatttaccttactaacactttcagttttgcgatcctcattcacgatgtgttgctaccagaagaagccaaaacaatgtttaaagttcacaacttcagcaaaccagtcttaattcttcctaatgaatcaggatacatttttaccctgctttttatgccttccacatcatccatgcacattgataacaacattttacttattaccaatgcttctaaatttcatttacccgtgcgggtatacacaggctttttagattactttgtattgccccccaaaatagaggaacgtttcatagattttggagtactgagtgctacagaagcaagtaatattttatttgcaattataaacagcaatccaattgagttggctataaaaagttggcatatcataggagacggtttatcaatagaacttgtagctgtggaaagaggcaatagaactacaataatttcaagcctgccagagtttgaaaaatcctctttatcagatcaatcatcggtaacattagcttcaggctattttgcagtcttcagagtcaaacttactgcaaaaaaattagaggggattcatgatggagccatccagatcacaacagactatgagatcctgacaatccctgtgaaggctgtgattgcagtaggctcactgacctgcttccctaagcacgtggttcttccaccttcctttccagggaaaatagttcatcaaagtttaaatattatgaattccttctcacagaaggtaaaaatacagcaaatacgatctttgtcagaagatgtgcgattttactataaacgattacggggcaataaggaagacttggagccaggaaaaaaatcaaagattgcaaacatttattttgatcctggactacagtgtggggatcattgctatgttggcttgccttttctatccaaatctgaacccaaagtgcagcctggtgtagccatgcaggaagatatgtgggatgctgactgggatttgcatcaaagcctgttcaagggatggacaggaataaaggaaaattcaggtcatagattgagtgctatatttgaagtaaatacagaccttcaaaaaaatataatatcaaaaatcactgctgagctctcctggccttccatacttagctcaccccggcacttgaaatttccacttactaatacaaactgctcctcagaagaagagattactttagaaaatcctgcagatgttcctgtctatgttcagtttattcctctggctttatattccaacccttcagtgtttgtagataagttagtatcaaggtttaacttgagtaaggtggcaaagatagatttgagaacactagaatttcaagtcttcagaaacagtgctcatccactgcagagttcaacaggatttatggagggcctctctcgacatttaattttaaacctaattttaaaacctggagaaaagaaatctgtcaaagtaaagtttactccagttcacaacagaactgtttcttcacttatcatagtcagaaataacctgactgtgatggatgctgtgatggtccaaggacaaggaacaactgagaacttgagggtggcaggcaagcttccaggtccaggaagctccttacgctttaaaatcacggaagcattgttaaaagattgtacagatagtttaaaactaagagaaccaaatttcacattgaaaagaacatttaaggtagagaatacaggacaacttcaaattcacatagaaaccattgaaatcagtggatactcatgtgaaggatatggctttaaagttgttaattgtcaagagtttactctaagtgccaatgcttctagagatataatcatattgtttactcctgattttacagcttctagagttattcgggaactgaagtttataacaaccagtggctctgagtttgtatttatattgaatgcatcccttccttaccatatgttagcaacctgtgcagaagccctacccagacctaactgggaactggctctgtatatcatcatctcaggaataatgagtgcactgtttcttttggtcattggaacagcctatttggaagctcaaggaatatgggagccatttcgaaggcggctatcctttgaggcctcgaacccgcccttcgatgtgggaaggccatttgatctcaggagaatcgttggtatttcatctgaaggaaacttgaacacactcagctgtgaccccggtcacagtagggggttctgtggagcaggcggttcatcatcccgacccagtgccgggagtcataagcagtgtggcccatcggtccacccacacagcagtcacagcaatagaaactcagctgacgtggaaaacgtcagagccaaaaacagttcaagtacctctagtaggacttctgctcaagcagcttcttcacagtctgctaacaaaacaagcccccttgtcttagattcgaacacagtgactcaaggtcatacagcgggcagaaagtccaaaggggcaaagcagagccagcacggcagccagcaccatgcccacagcccgctggagcagcaccctcagcctcctctgccaccgccagtgcctcagccccaggagccgcagcctgaaaggctgtctcccgcccccctcgcacacccttcccacccagaacgtgccagcagcgcgaggcacagttccgaggactcggacatcaccagtctcatagaagccatggacaaagactttgaccaccatgactccccagccctagaagtgtttacagagcagcctccatcgccattgccaaaaagcaaagggaaaggaaaacctcttcagcgcaaggtgaaaccacctaagaagcaagaggaaaaggagaagaagggaaagggaaagccacaggaagatgagctgaaggactctttggctgatgatgatagctcctccaccaccacagagacctccaaccctgacacagaaccgctcctcaaggaggatacagaaaagcaaaagggaaaacaagccatgcctgaaaaacatgaaagtgaaatgtctcaagtgaagcaaaaaagcaaaaaactcttaaatattaagaaagaaatcccaacagatgtgaaacccagttcattagaactaccatatactccccctttggaaagtaagcaacgtagaaatctcccaagcaagattcctcttccaactgcaatgacaagtggatccaaatcacgaaatgcccagaaaacaaaaggtacaagtaagttagtggataacagaccacctgccctagcaaaattcctcccgaatagtcaagaattaggcaacaccagtagctcagagggtgaaaaagactctcctccaccggagtgggattccgttccagttcacaaacctggcagctctactgatagtctttataaactttctctgcaaaccctcaacgcagacattttcttaaaacaacgccagacctcaccgacacctgcttccccgtctcccccagctgccccctgcccctttgtggcccggggcagctacagcagcatcgtcaacagcagctccagcagtgaccctaaaataaaacagccaaatggaagcaaacacaagttgacaaaggcagcctcgctcccgggcaagaacggcaaccccacttttgctgcagtcacggctggctacgacaagagcccaggtgggaatggctttgctaaagtttcttcaaacaaaacaggtttctccagcagccttggcatttcacacgctcctgttgacagcgatggctcagacagctcgggtttgtggagtcccgtcagcaacccaagcagccctgacttcactcccctcaattcgttctccgcctttggaaactcttttaatctaactggtgaagttttcagcaaactcggattatctcgatcgtgcaatcaggcctcacagaggagctggaacgagtttaatagtggcccttcatacctttgggagtcgccagcgacagatcccagtccttcctggccagccagttccggctccccgacccacacagccacatcggtcctcggtaacaccagcggcctgtggtccaccactccattcagcagctccatttggtccagcaaccttagcagcgcccttcccttcaccactccagcaaacacgctggcaagcatcggcctcatgggcacagaaaactcccctgctcctcacgctccctccacctccagtccagctgacgacttgggacagacctacaacccgtggcggatatggagccccacgattggaagaagaagctcggacccttggtctaattcgcactttcctcacgagaattaa

SEQ ID NO: 4002 - DNA, 2166 bp, Homo sapiens
  SIMILAR (110)..(988): 791254mologous to Homo sapiens Similar to a C.elegans protein encoded in cosmid C27F2 (U40419),accession number D87446,Smith- Waterman Score=1173.
gaatttaacacctcctaaggttaatcgggaaactgaaagtttaaaaacaacccagtggcctcctgaagtttggtaatttaatattgaaatgccatcccccttcccttacccatatgttaagccaaccctgtgccagaagcccctaccccagaccctaactgggaactggcccctgtatatccatccatcctcaggaataatgagtgccactgtttccttttggtccattggaacagccctatttggaagctcaaggaatatgggagcccatttcgaaggcggctatccctttgaggcctcgaacccgcccttcgatgtgggaaggccatttgatctcaggagaatcgttggtatttcatctgaaggaaacttgaacacactcagctgtgaccccggtcacagtagggggttctgtggagcaggcggatcatcatcccgacccagtgccgggagtcataagcagtgaggcccatcgggtcacccacacagcagccacagcaatagaaactcagctgacgtggatgacgtcagagcctataacagtggacgaacctctagcatgacttctgctcaagcagcttcttcacagcctgctaacaaaacacgcccccttgtcttagattccaacacaggggctcaaggtcattctgcgggcagaaagtccaaaggggcaaagcagagccagcacggcagccagcaccatgcccacagcccgctggagcagcaccctcagcctcctctgccaccgccagtgcctcagccccaggagccgcagcctgaaaggctgtctcccgcccccctcgcacacccttcccacccagaacgtgccagcagcgcgaggcacagttccgaggactcggacatcaccagtctcatagaagccatggacaaagacttcgaccaccatgactccccagccctagaagtgtttacagagcagcctccatcgccattgccaaaaagcaaaggttcaactgaaggtggacctgcttccacgttcacacaggcagttgatggtgggattcagttcttcacggactgttggacggagggcccaagctcctccttgctggctgtggccagagaagtacagctggccctgtgtatccatgagcttctcatccatggattcagtcaactgcaggtttcgggaggcccaggggcgatgccagaccccgcggcgcacctgcccttcttctacggcagcatctcgcgtgccgaggccgaggagcacctgaagctggcgggcatggcggacgggctcttcctcgtgcgccagtgcctgcgctcgctgggcggctatcgccagctcaacggcacctacgccattgccggcggcaaagcgcactgtggaccggcagagctctgcgagttctactcgcgcgaccccgacgggctgccctgcaacctgcgcaagccgtgcataccgccgtcgggcctcgagccgcagccggggtcttcgactgcctgcgagacgccatgggcgaggcctaggagcaggccatcatcagccaggccccgcaggtggagaagctcattgctacgacggaccacgagcggatgccctggtaccacagcagcctgacgcgtgaggaggccgagcgcaaactttactctggggcgcagaccgacggcaagttcctgtatgtggggcccgggatttgggtgcgggattggattcaaatcatggaatcgtggacccaccacatggtcacagtgcagcctcagcagcgagtgaagctcgccagacctcctccggaaagcagggccagtgaaggtgtccagcactggggctgcagggactccctggggtcttcctctaacctgagctcgcctacaagtggctcaagcctgccctggactcctcacaggaatcacagcattctgctgatggagctcacggccctgacacagcccaccatggagacggtggccaggtgccactccacccaggcaccacttacctggggacgtacaggtggatgtccaggcaaacaggccacttgcggggtctctggtcccaatgccaatggagagccggttctggtggaattctactccgcggtaagtggaacagcatacggagacacgcagttccgcacacgcatcgcaaaggcctcaggctggatgaaagaaaccaggttccaagggctacgaattgtgtga

SEQ ID NO: 4003 - DNA, 1776 bp, Homo sapiens; identical to SEQ ID NO: 3395
  SIMILAR (1381)..(1584): 801254mologous to Mus musculus Pro-Pol-dUTPase polyprotein,accession number Y12713,Smith-Waterman Score=299.

SEQ ID NO: 4004 - DNA, 663 bp, Homo sapiens
  SIMILAR (453)..(662): 841254mologous to Mus musculus Pro-Pol-dUTPase polyprotein,accession number Y12713,Smith-Waterman Score=333.
atggctctctggaccctcaggcccactcccctgctggtgacctgcatgctgatctgtgccccaggtgtgatgggtgcagtggtggctcctctgacaatattagggggtcctcttctcatcagagctgcatggtacacagctggcattgtgggaggcctctccactgtggccatgtgtgcgcccagtgaaaagtttctgaacatgggtgcacccctgggagtgggcctgggtctcgtctttgtgtcctcattggttgatcagatgggaagatggtttgttgctggaggggctgctgttggtcttggagcattgtgctactatggcttgggactgtctaatgagattggagctattgaaaaggctgtggagtattggtttaacagctttgtctgccatagcaatcagcagaacgcctgttctcatgaacttcatgatgagaggctcttgggtgatatgggtttgcctatcctgcatgcaatgcttctgcgaagactaccatccgtggactcacagaatgccttatccagcatcatgttactccacacagcattgcctctgaccaaggcactcactttacagctaaagaagtgcagcagtgggctcatgctcatggaattcactggccttaccatgttccccatcatcctgaagcagctggattaa

SEQ ID NO: 4005 - DNA, 714 bp, Homo sapiens
  SIMILAR (602)..(712): 711254mologous to Mus musculus Pro-Pol-dUTPase polyprotein,accession number Y12713,Smith-Waterman Score=142.
atgctgccatcaaccttgacacctttgtctgaggagataaaccctgtgctgcgtgaggcaagagtgatggcctcccctgaggcagtagtcagccaagataacgttgattctcagaagccacccccaacaaccctgtttgcttccagacctataactaaactaaagtcctggcgggcccctggaggtgagattgagagtgtgacctgtgaggagggaaatgatcagacatttcaaggactgctggacactggctttgagctgacattgattccaggggacccaaaacgtcattgtggtcctccagttaaagtaggggctgatggaggccaggtaattaatggagttttagctcaggtctgacttacagtgggtccagtgggtccccggactcatcctgtggtcattttcccagtgccagaatgcagaattggcagagacatacttagcagctggcagaacccccacactggctccctgactggtagggtgagggcttttatggttggaaaggccaaatggaagccatgagagctgcctctacctagaaaaacagtaaatcaaaaacaatatcgtattcccggagggattgcagagattagtgtccatcaaaaacttgagacgcggggtggtgattcccaccacatcccggttcaactctcccatttggcctgtgcagaagacagatggatcttggtgaacggcagcggattatcg

SEQ ID NO: 4006 - DNA, 1568 bp, Homo sapiens
  SIMILAR (783)..(1568): 751254mologous to Mus musculus Pro-Pol-dUTPase polyprotein,accession number Y12713,Smith-Waterman Score=1033.
caggcaaaaaaggaggggcagtgtcaggcagttggttgataacagtggtggcattatttgaaagggctagtttctgtttagcctttagagaagaaagcctaacagcagttagcaaagctgcaaagcaggtgtctactattaatgtgagggcattgactggaaaagaatgggaccctacaactttgaatggggatgtgtgggaggaccctgatgaagctggggacactgagcttgtaaactctggtgaagcttttttgccagaacaaacagcttcaccatccccagtagtggcaatatctccttcttgacccatgctgccatcagccattccacctttgtctgaggagataaaccctgcactacagtgggtccagtgggtccctggactcatcttgtggtcattttcccagtgccaggatgcataactggcatagacatacttagcagctggcaggacccccaccattggctccctgaatggtagggtgagggctacaaggcagacctggctgcagccactgtcgagtgcccaatttgccagcagcagagactgacactgagccctcagtatagccacattcctcagggtgatcagccaactacctggtagcaggttgattgtattggacctcttccatcatgggaagggcagaggtttgtcctcactggaatagacacttactttagatatgggtttgcctatcctgcatgcaatgcttctgtgaagactaccatccatggactcacagaatgccttgtccaccatcatggtgttccacacggcatttgcttctgtccaaggcactcactttatggcttaagaagtgcagcagtgggctcatgctcatggaattcactggtcttaccatgttccccatcatcttgaagcagctggattgatagaacagtggaatggccttttgatgtcacaattacaacaccaactaggtgacaatactttgcagggctggggcaaagttctccagaagggtgtgtatgctctgaatcagtgttcaatatatggtactgtttctcccatagccaggattcatgggtccaggaatcaaggggtagaagtggcaccactcaaaatcacccctagtgatccactagcaaaatgtttgcttccttttcccaaggcattacattctgcttgcctagaggtcttagttccagagggaggaacgctgccacccggagacacaacaacaattccattaaactggaagttaagattgccacccagacactttgggctcctcctacctttaagtcaaaaggctaagaagggggctacagtgttggctggggtgattgacccggactatcaagatgaaatcagcctactactccatataggaggtaaggaagagtatgcatggaatacaggagatccattagggcgtctcttagtatttccatgccatgtgattaaggtcaatgggaaacttcaacagcccaatccaggcaagactgcaaatgacccagacccttcaggaatgaaggtttgagtcactccaccaggaaaaaaaaatccacgacctgctgaggtgcttgctgaaggcaag

SEQ ID NO: 4007 - DNA, 726 bp, Homo sapiens
  SIMILAR (1)..(126): 881254mologous to Escherichia coli K12 phosphopentomutase,accession number AE000508,Smith-Waterman Score= 193.
tctggtcactgggaaattgccggtgtcccggttctgtttgagtggggatatttctccgatcacgraaacagcttcccgcaagagctgctggataaactggtcacgcgctaatctgccgggttacctcggtaactgmcactcttccggtacgtcattctggmatcaactgggcggagagcacatgaaaaccggcaagccgattttctatacccccgctgactccgtgttccagattgcctgccatgaagaaactttcggtctggataaactgtacgaactgtgcgaaatcgcccgtaaagagctgaccaacggcggatacaatatcggtcgtgttatcgctcgtccgttaatcggcgacaaagccggtaacttccagcgtaccggtaaccgtcacgacctggctgttgagccgccagcaccgaccgtgctgcagaaactggttgatgaaaaacacggccaggtggtttctgtcggtaaaattgcggacatctacgccagctgcggtatcaccaaaaaagtgaaagcgactggcctgaacgcgctgtttgacgcccccatcaaagagatgaaagaagcgggtgatacccccatggtcttccccaacttcgttgacttcgactcttcctggggccaccgtcgcgacgtcgccggttatgccgcgggtctggaactgttcgaccgccgtctgccggagctgatgtctcaaaagcgcgatgacgacatcct

SEQ ID NO: 4008 - DNA, 2253 bp, Homo sapiens
  SIMILAR (1555)..(2166): 981254mologous to Cloning vector pZC320 SopB,accession number U26464,Smith-Waterman Score=997.
atggtgctgacccattccataggaaactgcccccataatccagtcacctctcaccaggccccatctccaacactgaggattccaattgaccaggagactgggggcggcgccaactcatcggaagttagaaaacaccgggcagtgtattcaagaaaggcaaaagttccacccccaacgtacccgttcttaaaagataagacgcaagataggtccggtttagcaacctttaccatggacggacaaattccgtttattctaccaggcatatttccggtaaccattccggcaaaccaaagcctgccaccggcgcaggtaattgtgtcaaattctgttgaccacctcaaaatcaccggggtggaagatcacaaaccgatttttgccggagccggaaaaccatatcagaaccttcgccagtttatcgatgaaggcaattatacatccggcgacaaccatacgctgagagaccctcactacgttgaagacaaagcccataaataccttgtatcgaagccaacacgggaacagaaaacggataccaaggcgaagaatctttatttaacaaagcgtactacggcggcggcacgaacttcttccggggatcctctagagtcgacctgcaggcatgctgaagaacacatcgacagcaccacaacaacgaatctatcatacactgacaaacacacagcacaaaacgattcacacccagggacagctaaaacacaaacgacaataacagatcaccacgaccacagccacaaacagtggctccaattgccgagccgagcaggactggccgcggaccaaagcggtcggacagtgctccgagaacgggtgcgcatagaaaattgcatacaaacgcactatagccgctcagcaagcaacgcccaagcgcccaggccagtacgcggcaatgaacccaagccatatgccatacaaacataccagggtgacggagcagaggaagacgatgagacttacagccccaatttagaccgcgtaaccaccaaaaagacacaccgtggttgccaagcaaagatggcgggagtatcccctgaattcaaccacagtgaccccttatgcctcatgccaccagaagttagcgtgagccttggtgttcccaatcagtatctctggacttctcaaaccacaaatccacctcgcactggggatgggagagcagaaggctccaaggcacacaaggaccttgatgaggagataagccttattcctacagttaatgtgaggaaaaacctgtttttcctggaaatgcctactttggccgacacaaatattttcccgccacgcggcggtccaatttccctacgacacactaaggggccgtgtgacaatctaaaaacttgtcacacttcacatggatctgtcatggcggaaacagcggttatcaatcacaagaaacgtaaaaatagcccgcgaatcgtccagtcaaacgacctcactgaggcggcatatagtctctcccgggatcaaaaacgtatgctgtatctgttcgttgaccagatcagaaaatctgatggcaccctacaggaacatgacggagtaatggctcgcgctaatgccattacttgccctgtatgtggtcgggatgtgaagtttactcgtgaagtgctccggggtgatagtgttgagaagagctctcgggtatggtcaggtaatgaacgtgaccaggagctgcttactgaggacgcactggatgatctcatcccttcttttctactgactggtcaacagacaccggcgttcggtcgaagagtatctggtgtcatagaaattgccgatgggagtcgccgtcgtaaagctgctgcacttaccgaaagtgattatcgtgttctggttggcgagctggatgatgagcagatggctgcattatccagattgggtaacgattatcgcccaacaagtgcttatgaacgtggtcagcgttatgcaagccgattgcagaatgaatttgctggaaatatttctgcgctggctgatgcggaaaatatttcacgtaagattattacccgctgtatcaacaccgccaaattgcctaaatcagttgttgctcttttttctcaccccggtgaactatctgcccggtcaggtgatgcacttcaaaaagcctttacagataaagaggaattacttaagcagcaggcatctaacgcggggatccttctacgagtcgacctggcaggcatgcaagagcccccaattaattttgtagagcctacacccctccaattgagatga

SEQ ID NO: 4009 - DNA, 1329 bp, Homo sapiens
  SIMILAR (433)..(927): 951254mologous to Cloning vector pZC320 SopA,accession number U26464,Smith-Waterman Score=832.
atggtggattcgttaattgcgcgcgtaggagtaatggctcgcggtaatgccattactttgcctgtatgtggtcgggatgtgaagtttactcttgaagtgctccggggtgatagtgttgagaagacctctcgggtatggtcaggtaatgaacgtgaccaggagctgcttactgaggacgcactggatgatctcatcccttcttttctactgactggtcaacagacaccggcgttcggtcgaagagtatctggtgtcatagaaattgccgatgggagtcgccgtcgtaaagctgctgcacttaccgaaagtgattatcgtgttctgggtggcgagctggatgatgagccgatggctgcattatccagattgggtaacgattatcgcccaaccagtgcttttgaacgtgggcaacgtttctgttcatcttgcgtggatctggctctgagggggctacgtgttttgctcgtggaaggtaacgacccccagggaacagcctcaatgtatcacggatgggtaccagatcttcatattcatgcagaagacactctcctgcctttctatcttggggaaaaggacgatgtcacttatgcaataaagcccacttgctggccggggcttgacattattccttcctgtctggctctgcaccgtattgaaactgagttaatgggcaaatttgatgaaggtaaactgcccaccgatccacacctgatgctccgactggccattgaaactgttgctcatgactatgatgtcatagttattgacagcgcgcctaacctgggtatcggcacgattaatgtcgtatgtgctgctgatgtgctgattgttcccacgcctgctgagttgtttgactacacctccgcactgcagtttttccatatgcttcgtgatctgctcaagaacttgatctttaaagtgttggaagttctggccagggcaattaggcaggagaaggaaataaagggtattcaattaggaaaagaggaagtcaaattgtccctgtttgcagacgacatgatttgttatctagaaaaccgggttgtctcagcccaaaatctccttaagctgataagcaacttcagcaaagtctcaggatacaaaatcaatgtacaaaaatcacaagcattcttatacaccaacaacagacaaacagagagccaaatcatgagtgaactcccattcacaattgctttaaagagaaggaaatacctaggaatccaacttacaagggacgtgaaggacctcttcaagaagaactacaaaccactgctcaaggaaataaaacaggatacaaacaaacgaagaacattccatgctcatgagtag

SEQ ID NO: 4010 - DNA, 1617 bp, Homo sapiens
  SIMILAR (277)..(1107): 831254mologous to Cloning vector pZC320 SopB,accession number U26464,Smith-Waterman Score=1126.
atgaaactcatggaaacacttaaccagtgcataaacgctggtcatgaaatgacgaaggctatcgccattgcacagtttaatgatgacagcccggaagccaccccaataacccggcgctggagaatagatgaaacagcggatttagatagggtttcttctcaggctatcagagatgccgagaaagcagggcgactaccgggcacccgggatatggaaattcgaggacggcttgagcaacgtgttggttatacaattgaagaaattaatcatatgcgtgatgatacttcgttatcgacaccagctgccccgatggtggattcgttaattgcgcgcgtaggagtaatggctcgcggtaatgccattactttgcctgtatgtggtcgggatgtgaagtttactcttgaagtgctccggggtgatagtgttgagaagacctctcgggtatggtcaggtaatgaacgtgaccaggagctgcttactgaggacgcactggatgatctcatcccttcttttctactgactggtcaacagacaccggcgttcggtcgaagagtatctggtgtcatagaaattgccgatgggagtcgccgtcgtaaagctgctgcacttaccgaaagtgattatcgtgttctggttggcgagctggatgatgagcagatggctgcattatccagattgggtaacgattatcgcccaacaagtgcttatgaacgtggtcagcgttatgcaagccgattgcagaatgaatttgctggaaatatttctgcgctggctgatgcggaaaatatttcacgtaagattattacccgctgtatcaacaccgccaaattgcctaaatcagttgttgctcttttttctcaccccggtgaactatctgcccggtcaggtgatgcacttcaaaaagcctttacagataaagaggaattagttaagcagcaggcatctaacttacaaagcagaaaaaaatacagcaagatggccaggccactctatactgtattcaaggaaacccagagggcaactactcatctagtagaatcccacaccagtggcagaaacagccttcaaaacaataaagcaggccctagtacaagcgccagccttaagctttcccacaggacaaaacttctcttatttgtcatagagagagcaggagtagctcttgcactccttactcagacttgtgggacaaccccagaaccagtggcatatctaaattattacccgctgtatcaacaccgccaaaatgccctaaatcagttgtgcttcttttttctcacccccggtgaactatctgcccggtcaggtgatgcacttcaaaaagcctttacagataaagaggaattacttaagcagcaggcatctaaccttcatgagcagaaaaaagctggggtgatatttgaagctgaagaagttatcactcttttaacttctgtgcttaaaacgtcatctgcatcaagaactagtttaagctcacgacatcagtttgctcctggagcgacagtattgtataagggcgataaaatggtgcttaacctggacaggtctcgtgttccaactgagtgtatagagaaaattgaggccattcttaaggaacttgaaaagccagcaccctga

SEQ ID NO: 4011 - DNA, 2589 bp, Homo sapiens
  SIMILAR (1366)..(2127): 741254mologous to Cloning vector pZC320 SopB,accession number U26464,Smith-Waterman Score=853.
gagccgcgctggctgttgcggggcaggctgggcccgctgctgctgcagttggctccgcggccgcccctagccgcccccagccgcccccgcccgtcccacgcccgcaacccgcccacacaccgtgccaccacacccggcccccgcggccccacccgccaacaccgcaagggacagcgaccacgcgcacggccacagagcgccagcgccgccgcgcaccgcgagaacccaccagcgggcggccgaccacagccacaacaagacaacaacgcatcgcgaacgcgcgccccgactaacaccggaccaccggccaagacgccgccggcagtcccgcgccggccgagccacaccgccgtggggagcggtggtttttccgcacggaaagcaccgaaaaccggccaagacaaaaaggattgccaagagaatcctcggatttgttcacgggggtcgccggcacagggaacgagaagccaggttaaggaatttggggattttgccgatttcggaaccaccatcaaacaggattttcgcctgctggggcaaaccagcgtggaccgcttgctgcaactctctcagggccaggcggtgaagggcaatcagctgttgcccgtctcactggtgaaaagaaaaaccaccctggcgcccaatacgcaaaccgcctctctccgcgcgttggccgattcattaatgcagctggcacgacaggtttcccgactggaaagcgggcaggattttgccgatttcggaaccaccatcaaacaggattttcgcctgctggggcaaaccagcgtggaccgcttgctgcaactctctcagggccaggcggtgaagggcaatcagctgttgcccgtctcactggtgaaaagaaaaaccaccctggcgcccaatacgcaaaccgcctctccccgcgcgttggccgattcattaatgcagctggcacgacaggtttcccgactggaaagcgggcagtttcccatgaaatataagcctttcaagggcttcaaggaatccaaggtttgcacttccaggcatttccaggcttattctgctggaactctaattcctccatcctttcctaactgccacatctgggattttgccgatttcggaaccaccatcaaacaggattttcgcctgctggggcaaaccagcgtggaccgcttgctgcaactctctcagggccaggcggtgaagggcaatcagctgttgcccgtctcactggtgaaaagaaaaaccaccctggcgcccaatacgcaaaccgcctctccccgcgcgttggccgattcattaatgcagctggcacgacaggtttcccgactggaaagcgggcaaaaatttcgtaacggacaccagtgcgcccgaaggggggattggttaattgcgcgcgagggagaaaaggctcgcggaaaggccaatacttggctggtacgtggcggggatgtgaagtttactcttgaagtgctccggggtgaaagtgttaagaagacctttcgggtaaggccaggtaatgaacgtgaccaggagctgcttactgaggacgcactggatgatctcatcccttcttttctactgactggtcatcagacaccggcgttcggtcgaagagtatctggtgtcatagaaattgccgatgggagtcgccgtcgtaaagctgctgcacttaccgaaagtgattatcgtgttctggttggcgagctggatgatgagcagatggctgcattatccagattgggtaacgattatcgcccaacaagtgcttatgaacgtggtcagcgttatgcaagccgattgcagaatgaatttgctggaaatatttctgcgctggctgatgcggaaaatatttcacgtaagattattacccgctgtatcaacaccgccaaattgcctaaatcagttgttgctcttttttctcaccccggtgaactatctgcccggtcagggatttgccggatttcggaacccaccatcaaacaggattttcgcctgctggggcaaaccagcgtggaccgcttgctgcaactctctcagggccaggcggtgaagggcaatcagctgttgcccgtctcactggtgaaaagaaaaaccaccctggcgcccaatacgcaaaccgcctctccccgcgcgttggccgattcattaatgcagctggcacgacaggtttcccgactggaaagcgggcaggattttgccgatttcggaaccaccatcaaacaggattttcgcctgctggggcaaaccagcgtggaccgcttgctgcaactctctcagggccaggcggtgaagggcaatcagctgttgcccgtctcactgtcgctcctacgcgacgtcccgaccacccccccgtcctctggtcaccgccactcacaccatgggctccagttccgacaaccagaaattgacatgggcccccagctccccccgactcgtcacccgcttcgagcacgcctggggaagcaaagaaaaaaccacatgttgttcgtcacacggatcaagttggtaaagctgggcaggaagccacctgccacagcaacggtcactgctggggtcatactcttcgtgtgcattacatttccagatctgatttctgcgtga

SEQ ID NO: 4012 - DNA, 2112 bp, Homo sapiens
  SIMILAR (763)..(1458): 991254mologous to Cloning vector pZC320 SopA,accession number U26464,Smith-Waterman Score=1213.
  misc_feature (1)...(2112): n = a,t,c or g
atgaaactcatggaaacacttaaccagtgcataaacgctggtcatgaaatgacgaaggctatcgccattgcacagtttaatgatgacagcccggaagcgaggaaaataacccggcgctggagaataggtgaagcagcggatttagttggggtttcttctcaggctatcagagatgccgagaaagcagggcgactaccgcacccggatatggaaattcgaggacgggttgagcaacgtgttggttatacaattgaacaaattaatcatatgcgtgatgtgtttggtacgcgattgcgacgtgctgaagacgtatttccaccgacaccggcgttcggtcgaagagtatctggtgtcatagaaattgccgatgggagtcgccgtcgtaaagctgctgcacttaccgaaagtgattatcgtgttctggttggcgagctggatgatgagcagatggctgcattatccagattgggtaacgattatcgcccaacaagtgcttatgaacgtggtcagcgttatgcaagccgattgcagaatgaatttgctggaaatatttctgcgctggctgatgcggaaaatatttcacgtaagattattacccgctgtatcaacaccgccaaattgcctaaatcagttgttgctcttttttctcaccccggtgaactatctgcccggtcaggtgatgcacttcaaaaagcctttacagataaagaggaattacttaagcagcaggcatctaaccttcatgagcagaaaaaagctggggctatcagagatgccgagaaagcagggcgactaccgcacccggatatggaaattcgaggacgggttgagcaacgtgttggttatacaattgaacaaattaatcatatgcgtgatgtgtttggtacgcgattgcgacgtgctgaagacgtatttccaccggtgatcggggttgctgcccataaaggtggcgtttacaaaacctcagtttctgttcatcttgctcaggatctggctctgaaggggctacgtgttttgctcgtggaaggtaacgacccccagggaacagcctcaatgtatcacggatgggtaccagatcttcatattcatgcagaagacactctcctgcctttctatcttggggaaaaggacgatgtcacttatgcaataaagcccacttgctggccggggcttgacattattccttcctgtctggctctgcaccgtattgaaactgagttaatgggcaaatttgatgaaggtaaactgcccaccgatccacacctgatgctccgactggccattgaaactgttgctcatgactatgatgtcatagttattgacagcgcgcctaacctgggtatcggcacgattaatgtcgtatgtgctgctgatgtgctgattgttcccacgcctgctgagttgtttgactacacctccgcactgcagtttttcaatatgcttcgtgatctgctcaagaaggggagcttctacagtaaatcctgcaggantgttgagaagacctctcgggtatggtcaggtaatgaacgtgaccaggagctgcttactgaggacgcactggatgatctcatcccttcttttctactgactggtcaacagacaccggcgttcggtcgaagagtatctggtgtcatagaaattgccgatgggagtcgccgtcgtaaagctgctgcacttaccgaaagtgattatcgtgttctggttggcgagctggatgatgagcagatggctgcattatccagattgggtaacgattatcgcccaacaagtgcttatgaacgtggtcagcgttatgcaagccgattgcagaatgaatttgctggaaatatttctgcgctggctgatgcggaaaatatttcacgtaagattattacccgctgtatcaacaccgccaaattgcctaaatcagttgttgctcttttttctcaccccggtgaactatctgcccggtcaggtgatgcacttcaaaaagcctttacagataaagaggaattacttaagcagcaggcatctaaccttcatgagcagaaaaaagctggagtgatatttgaagctgaagaagttatggggagttccaccataaatcctgcaggantaaattgcaagatttaa

SEQ ID NO: 4013 - DNA, 1290 bp, Homo sapiens
  SIMILAR (708)..(794): 891254mologous to Cloning vector pZC320 SopB,accession number U26464,Smith-Waterman Score=118.
  misc_feature (1)...(1290): n = a,t,c or g
atgtatcacggatgggtaccagatcttcatattcatgcagaagacactctcctgcctttctatcttggggaaaaggacgatgtcacttatgcaataaagcccacttgctggccggggcttgacattattccttcctgtctggctctgcaccgtattgaaactgagttaatgggcaaatttgatgaagggtcgactctagaggatcccctgcctgtatgtggtcgggatgtgaagtttactcttgaagtgctccggggtgatagtgttgagaagacctctcgggtatggtcaggtaatgaacgtgaccaggagctgcttactgaggacgcactggatgatctcatcccttcttttctactgactggtcaacagacaccggcgttcggtcgaagagtatctggtgtcatagaaattgccgatgggagtcgccgtcgtaaagctgctgcacttaccgaaagtgattatcgtgttctggttggcgagctggatgatgagcagatggctgcattatccagattgggtaacgattatcgcccaacaagtgcttatgaacgtggtcagcgttatgcaagccgattgcagaatgaatttgctggaaatatttctgcgctggctgatgcggaaaatatttcacgtaagattattacccgctgtatcaacaccgccaaattgcctaaatcagttgttgctcttttttctcaccccngacaccggcgttctgtcgaagagtatctggtgtcatataaattgccgatgggagtcgccgtcgtaaagctgcttcacttaccgaaagtcgactctagaggatccccggttttttatcgccctgaagaggatgccggcgatgaaaaaggctatgaatcttttccttggtttatcaaacgtgcgcacagtccatccagagggctttacagtgtacatatcaacccatatctcattcccttctttatcgggttacagaaccggtttacgcagtttcggcttagtgaaacaaaagaaatcaccaatccgtatgccatgcgtttatacgaatccctgtgtcagtatcgtaagccggatgcgtcaggcatcgtctctctgaaaatcgactggatcatagagcgttaccagctgcctcaaagttaccagcgtatgcctgacttccgccgccgcttcctgcagacaccggggttcggtcgaagagtatctggtgtcatagaaattgccgatggtcgtcgccgtcgtaaaaactgcttgcacgttaccgtgaacgttggaaatcggtcgactctagaggatcccatttcatga

SEQ ID NO: 4014 - DNA, 1836 bp, Homo sapiens
  SIMILAR (487)..(990): 1001254mologous to Cloning vector pSacBII SacB,accession number U09128,Smith-Waterman Score=896.
atggtggattcgttaattgcgcgcgtaggagtaatggctcgcggtaatgccattactttgcctgtatgtggtcgggatgtgaagtttactcttgaagtgctccggggtgatagtgttgagaagacctctcgggtatggtcaggtaatgaacgtgaccaggagctgcttactgaggacgcactggatgatctcatcccttcttttctactgactggtcaacagacaccggcgttcggtcgaagagtatctggtgtcatagaaattgccgatgggagtcgccgtcgtaaagctgctgcacttaccgaaagtgattatcgtgttctggttggcgagctggatgatgagcagatggctgcattatccagattgggtaacgattatcgcccaacaagtgcttatgaacgtggtcagcgttatgcaagccgattgcagaatgaatttgctggtaatatttctgcgctggctgatgcggaaaatatttcacacagcgataagttcgacgccaacgatccgatcctgaaagatcagacgcaagaatggtccggttctgcaacctttacatctgacggaaaaatccgtttattctacactgactattccggtaaacattacggcaaacaaagcctgacaacagcgcaggtaaatgtgtcaaaatctgatgacacactcaaaatcaacggagtggaagatcacaaaacgatttttgacggagacggaaaaacatatcagaacgttcagcagtttatcgatgaaggcaattatacatccggcgacaaccatacgctgagagaccctcactacgttgaagacaaaggccataaataccttgtattcgaagccaacacgggaacagaaaacggataccaaggcgaagaatctttatttaacaaagcgtactacggcggcggcacgaacttcttccgtaaagaaagccagaagcttcagcagagcgctaaaaaacgcgatgctgagttagcgaacggcgccctcgtcaatacccagagcaccaccaccaggaggcctggaagcaactcactgtcccacttgatgtggcctgtggaccaccagaaatttcagagcgtcacagagatgtgtggttcgatcctgagcagggattttgccgatttcggaaccaccatcaaacaggattttcgcctgctggggcaaaccagcgtggaccgcttgctgcaactctctcagggccaggcggtgaagggcaatcagctgttgcccgtctcactggtgaaaagaaaaaccaccctggcgcccaatacgcaaaccgcctctccccgcgcgttggccgattcattaatgcagctggcacgacaggtttcccgactggaaagcgggcaggattttgccgatttcggaaccaccatcaaacaggattttcgcctgctggggcaaaccagcgtggaccgcttgctgcaactctctcagggccaggcggtgaagggcaatcagctgttgcccgtctcactggtgaaaagaaaaaccaccctggcgcccaatacgcaaaccgcctctccccgcgcgttggccgattcattaatgcagctggcacgacaggtttcccgactggaaagcgggcaggattttgccgatttcggaaccaccatcaaacaggattttcgcctgctggggcaaaccagcgtggaccgcttgctgcaactctctcagggccaggcggtgaagggcaatcagctgttgcccgtctcactggtgaaaagaaaaaccaccctggcgcccaatacgcaaaccgcctctccccgcgcgttggccgattcattaatgcagctggcacgacaggtttcccgactggaaagcgggcagtga

SEQ ID NO: 4015 - DNA, 4131 bp, Homo sapiens
  SIMILAR (3487)..(4128): 971254mologous to Cloning vector pBACe3.6 levansucrase,accession number U80929,Smith-Waterman Score=1084.
  misc_feature (1)...(4131): n = a,t,c or g
atgagggacagcgttccagtagccctgccacagctctctcatcctctggtccgccctcactcaagatggctaccagcaaaaatggtgcaatggcgtgacagctcggccctggttgccaaggagatgcgagtaccggaaatgcggaattcggggagagcgcgcatgcctggtccggtggagggagggtgccgggcgtcacaggtcctgacagggaagaagttggcaggtcctggcaggggacgagctgcggcggtggcacctccgggtgtggaaggctccagtgagatggagtcgcgagtcgcggacgctgggaccggcgagaccgcgcgagcagcgggcgggagtccggcagttggctgcaccactcgggggcccgtagtctcggcgcccctgggagccgcccggtggaagctcctgcggcaggtatttattcgcgataagctcatggagcggcgtaaccgtcgcacaggaaggacagagaaagcgcggatctgggaagtgacggacagaacggtcaggacctggattggggaggcggttgccgccgctgctgctgacggtgtgacgttctctgttccggtcacaccacatacgttccgccattcctatgcgatgcacatgctgtatgccggtataccgctgaaagttctgcaaagcctgatgggacataagtccatcagttcaacggaagtctacacgaaagtttttgcgctggatgtggctgcccggcaccggtctagaggatccccctatccatacgatgaatatttggccatggaaaggaacaatgtgctgacacatgctacgacatggatgaaccttgaaaagatttttctagccagctactttgttttcctttatcttacaaaagacagtcgtttcctcaccataaatattatgaacaagactacttctgaagtgtggttgatagatggcctgagcccttgggacccaccagtacttatccagaagcgaatacatggggtcctttactatgttgaacacagagatgatgaattatacattctcactaatgttggagaacctacagaatttaagagggacgtgactgcaaattgtccaggttcttggcgttttgaacaaagaattggacaaaacacgcagcaaagaaagaatgaagcaacaaaagaacgaaagcagctctctcggctttcggctcggaggaggccaaggtgcaactttcttcggtcgtctcgaatccgggttcatccgacaccagccgcctccaccatgccgccgaagttccaccccaatgagatcaaagtcgtatacttcacgtgcactggagttgaagtcggagccacttctgctctggcccccaagattggccccgcgggtctgtctccaaaagaggttggtgatgacattgccaaggtaacgggtattcaagataaactggactacatcacagctttaaatataaaaactgtttggattacttcattttataaatcgtcccttaaagatttcagatatggtgttgaagatttccgggaagttgatcccatttttggaacgatggaagattttgagaatctggttgcagccatacatgataaagnaggatcccccggtaatgccattactttgcctgtatgtggtcgggatgtgaagtttactcttgaagtgctccggggtgatagtgttgagaagacctctcgggtatggtcaggtaatgaacgtgaccaggagctgcttactgaggacgcactggatgatctcatcccttcttttctactgactggtcaacagacaccggcgttcggtcgaagagtatctggtgtcatagaaattgccgatgggagtcgccgtcgtaaagctgctgcacttaccgaaagtgattatcgtgttctggttggcgagctggatgatgagcagatggctgcattatccagattgggtaacgattatcgcccaacaagtgcttatgaacgtggtcagcgttatgcaagccgattgcagaatgaattcgctggaaatatttctgcgctggctgatgcggaaaatatttcacgtaagattattacccgctgtatcaacaccgccaaattgcctaaatcaggtgttgctcttttttctcaccccggtgaactatctgcccggtcaggtgatgcacttcaaaaagcctttacagataaagaggaattacttaagcagcaggcatctaaccttcatgagcagaaaaaagctggggcacctttcttggatgttctcaacaccatgatggacactacacttcctctgacattagaagaattagaagaatgggggaatccttcatctgatgaaaaacacaagaactacataaaacgttactgtccctatcaaaatattaaacctcaagatcttcagcctgttaaacaagaaaacgaaaaaccccttccagaaaacatggatgcatttgaaaaagtgagaacaaaattagaaacacagccacaagaaagatatgaaatcatcaatgtgggaacccaaaatctccttaagctgataagcaacttcagcaaagtctcaagatacaaaatcaatgtacaaaaatcacaagcattcttatacaccaataacagacaaacagagagccaaatcatgagtgaactcccattcacaattgcttcaaagagaataaaatacctaggaatccaacttacaagggatctgaaggacctcttcaaggagaactacaaaccactgctcaatgaaataaaagaggatacaaacaaatggaagaacattccatgctcatgggtaggaagaatcaatatcgtgaaaatggccatactgcccaagtggctccaagtagcgaagcgagcaggactgggcagaggccaaagcggtcggacagcgctacgagaacgggtgctcatagaaattgcatcaacgcatatagcgctagcaacacgccatagtgactggggatgctgccggaatggacgatatcccgcaagaggcccagcagtaccggcatatccaagcctatgcctacagcatgcatgggtcaccgtcgacagcgacacacttgcatgggatgcagccctgctaacgtgccggcacggactgagtaaccagaaccggtttacgcagtttcggcttagtgaaacaaaagaaatcaccaatccgtatgccatgcgtttatacgaatccctgtgtcagtatcgtaagccggatggctcaggcatcgtctctctgaaaatcgactggatcatagagcgttaccagctgcctcaaagttaccagcgtatgcctgacttccgccgccgcttcctgcaggatggaaaattagtgccaatgactgttttccacaaaactgactctgaggacttgcagaagaaacctctcttggtacatgtatatggagcttatggaatggatttgaaaatgaatttcaggcctgagaggccggtcctggtggatgatggatggatattagcatactggcatggttcggtgagtcagtatattttacctggcctaacccttcgaagccacacgggaacagaaaacggataccaaggcgaagaatctttatttaacaaagcgtactacggcggcggcacgaacttcttccgtaaagaaagccagaagcttcagcagagcgctaaaaaacgcgatgctgagttagcgaacggcgccctcggtatcatagagttaaataatgattacacattgaaaaaagtaatgaagccgctgatcacttcaaacacggtaactgatgaaatcgagcgcgcgaatgttttcaaaatgaacggcaaatggtacttgttcactgattcacgcggttcaaaaatgacgatcgatggtattaactcaaacgatatttacatgcttggttatgtatcaaactctttaaccggcccttacaagccgctgaacaaaacagggcttgtgctgcaaatgggtcttgatccaaacgatgtgacattcacttactctcacttcgcagtgccgcaagccaaaggcaacaatgtggttatcacaagctacatgacaaacagaggcttcttcgaggataaaaaggcaacatttgcgccaagcttcttaatgaacatcaaaggcaataaaacatccgttgtcaaaaacagcatcctggagcaaggacagctgacagtcaactaa

SEQ ID NO: 4016 - DNA, 1428 bp, Homo sapiens
  SIMILAR (1)..(453): 901254mologous to Cloning vector pZC320 SopB,accession number U26464,Smith-Waterman Score=663.
  misc_feature (1)...(1428): n = a,t,c or g
atggctcgcggtaagccattactttgcctgtatgggtcgggntgtgaagtttactctgaagtgctccggggtgatagtgttgagaagacctctcgggtatggtcaggtaatgaacgtgaccaggagctgcttactgaggacgcactggatgatctcatcccttcttttctactgactggtcaacagacaccggcgttcggtcgaagagtatctggtgtcatagaaattgccgatgggagtcgccgtcgtaaagctgctgcacttaccgaaagtgattatcgtgttctggttggcgagctggatgatgagcagatggctgcattatccagattgggtaacgattatcgcccaacaagtgcttatgaacgtggtcagcgttatgcaagccgattgcagaatgaatttgctggaaatatttctgcgctggctgatgcggaaaatatttcacacaaggcccataaatactttgtattcgaagccaacacgggaacagaaacgggataccaaggcgaagaatctttatttaacaaagcgtactacggcggcggcacgaacttcttccgtaaagaaagccagaagcttcagcagagcgctaaaaaacgcgatgctgagttagcgaacggcgccctcggtatcatagagttaaataatgattacacattgaaaaaagtaatgaagccgctgatcacttcaaacacggtaactgatgaaatcgagcgcgcgaatgttttcaaaatgaacggcaaatgggattttgccgatttcggaaccaccatcaaacaggattttcgcctgctggggcaaaccagcgtggaccgcttgctgcaactctctcagggccaggcggtgaagggcaatcagctgttgcccgtctcactggtgaaaagaaaaaccaccctggcgcccaatacgcaaaccgcctctccccgcgcgttggccgattcattaatgcagctggcacgacaggtttcccgactggaaagcgggcagcagtcttccaaacagaagaaggccattcaaactgctatccgcaaaaataaagaggcaaacgcagtgctggctcggctgaacagtgagctccagcagcagctcaagggatttgccgattttcgggaaccacccatcaaacaggattttcgcctgctggggcaaaccagcgtggaccgcttgctgcaactctctcagggccaggcgatcacagaactgtgtggtgcaaagcgggttggttattttggtccaacacagttttacattgccctgaaattaattgctgcagcacaatctggcctcccggtacggatagagagtattaaatgtggaaacagctatgaccatgattacgaattcgagctcggtaccctggtgcttcctcgctcactcgagggcttcgccctgtcgctcaactgcggcgagcactactggctgtaa

SEQ ID NO: 4017 - DNA, 2499 bp, Homo sapiens
  SIMILAR (1816)..(2496): 971254mologous to Cloning vector pZC320 SopB,accession number U26464,Smith-Waterman Score=1087.
atggctcgcggtaatgccattactttgcctgtatgtggtcgggaagtgaagtttactcttgaagtgctccggggtgatagtgttgagaagacctctcgggtatggtcaggtaatgaacgtgaccaggagctgcttactgaggacgcactggatgatctcatcccttcttttctactgactggtcaacagacaccggcgttcggtcgaagagtatctggtgtcatagaaattgccgatgggagtcgccgtcgtaaagctgctgcacttaccgaaagtgattatcgtgttctggttggcgagctggatgatgagcagatggctgcattatccagattgggtaacgattatcgcccaacaagtgcttatgaacgtggtcagcgttatgcaagccgattgcagaatgaatttgctggaaatatttctgcgctggcttatgcggaaaatatttcacgtaagattattacccgctgtatcaacaccgccaaattgcctaaatcagttgttgctcttttttctcaccccggtgaactatctgcccggtcaggtgatgcacttcaaaaagcctttacagataaagaggaattacttaagcagcaggcatctaaccttcatgagcagaaaaaagctggggtctgtgttaatgagatcaacagcagaactccaatgcgcctctcatacattgagaaaaagaaaggccgccagacgactcatatcaccgttcagctggatattacggcctttttaaagaccgtaaagaaaaataagcacaagttttatccggcctttattcacattcttgcccgcctgatgaatgctcatccggagttccgtatggcaatgaaagacgtatctggtgtcatagaaattgcctatggaagtcgccgtcgtaaagcggatgcactagctacaagtgattatcgtgtcctgaatcaatatgctggaaatatatatgcgctggctgatgcggaaaatatttcgcgtaagattattacccgctgtatcaacacagccaaagtgcctgaatcagttgttgctcatatttctcaccccggtgaactatatgcccggtcaggtgatgcacttcacaaagcctttgcagataaagaggaattacttaagcagcaggcatctaaccttcatgagcagaaaacagctggggtgatatttgaagctaaagcagatatcactcttttgacttctgtgcttaaaacgtcatcagcatcaagaagaaacagctatgaccatgattacgaattcgagctcggtaccccggggaaggaagtggttttttatcgccctgaagaggatgccggcgatgaaaaaggctatgaatcttttccttggtttatcaaacgtgcgcacagtccatccagagggctttacagtgtacatatcaacccatatctcattcccttctttatcgggttacagaaccggtttacgcagtttcggcttagtgaaacaaaagaaatcaccaatccgtatgccatgcgtttatacgaatccctgtctgccccgatggtggattcgttaattgcgcgcgtaggagtaatggctcgcggtaatgccattactttgcctgtatgtggtcgggatgtgaagtttactcttgaagtgctccggggtgatagtgttgagaagacctctcgggtatggtcaggtaatgaacgtgaccaggagctgcttactgaggacgcactggatgatctcatcccttcttttctactgactggtcaacagacaccggcgttcggtcgaagagtatctggtgtcatagaaattgccgatgggagtcgccgtcgtaaagctgctgcacttaccgaaagtgaggggacaccggcgttcggtcgaagagtatctggtgtcatagaatttgccgatgggagtcgccgtcgtaaagctgctgcacttaccgaaagtgattatcgtgttctggttggcgagctggatgatgagcagatggctgcattatccagattgggtaacgattatcgcccaacaagtgcttatgaacgtggtcagcgttatgcaagccgattgcagaatgaatttgctggaaatatttctgcgctggctgatgcggaaaatatttcacgtaagattattacccgctgtatcaacaccgccaaattgcctaaatcagttgttgctcttttttctcaccccggtgaactatctgcccggtcaggtgatgcacttcaaaaagcctttacagataaagaggaattacttaagcagcaggcatctaaccttcatgagcagaaaaaagctggggtgatatttgaagctgaagaagttatcactcttttaacttctgtgcttaaaacgtcatctgcatcaagaactagtttaagctcacgacatcagtttgctcctggagcgacagtattgtataagggcgataaaatggtgcttaacctggacaggtctcgtgttccaactgagtgtatagagaaaattgaggccattcttaaggaacttgaaaagccagcaccctga

SEQ ID NO: 4018 - DNA, 2070 bp, Homo sapiens
  SIMILAR (484)..(846): 861254mologous to Cloning vector pZC320 SopB,accession number U26464,Smith-Waterman Score=513.
  misc_feature (1)...(2070): n = a,t,c or g
atgacccataaaagtgaagagtacccagctttgcagaactttcagcggtataccggcatacagcatgtgcatcgcataggaatggcggaacgtatgtggtgtgaccggaacagagaacgtcacaccgtcagcagcagcggcggcaaccgcctccccaatccaggtcctgaccgttctatccgcgctttctctgtccttcctgtgcgacggggggatctcctagagtcgaaacgcaggtctgcaagctctaagtctacagcgcgcctaactgggggtatcggcacgattaatgtctttttcgatatgcttcgtgatctgctcaagaacgttgatcttanagggttcgagcctgatgtacgtattttgcttaccaaatacagcaatagtaatggctctcagtccccgtggatggaggagcaaattcgggatgcctggggaagcatggttctaaaaaatgttgtacgtgaaacggatgaagttggtaaagatacttcgttatcgacaccagctgccccgatggtggattcgttaattgcgcgcgtaggagtaatggctcgcggtaatgccattactttgcctgtatgtggtcgggatgtgaagtttactcttgaagtgctccggggtgatagtgttgagaagacctctcgggtatggtcaggtaatgaacgtgaccaggagctgcttactgaggacgcactggatgatctcatcccttcttttctactgactggtcaacagacaccggcgttcggtcgaagagtatctggtgtcatagaaattgccgggggatcctctagagtcgacaagcgggttgcaaccaagttgtataacatgttactaattggcccagtctccggcacagctgtccaaccccccccacatccgtccccaggatgcatggctattccccccccacaaaatccctggtcctacggccgctgcaccccttcccaccgctgccccctctcggtagccatcttaaatgttgcaccccctacgtccagccactatggaaggaagttactgtacatgagtgaagaggtatctatgggaaggggaaaggaagagaaggggccccacaaagagaaacgatgggcacaggaagagtcgaacagcaggtctgcaagccacaggtctcccctgatccccaaaaactttgatttgggtgagggttcacgaggtggggccatcgcccttgaaagacggtttttcgcccttgacggttggagtccacgttctttaatagtggactctggttccaaattgggaacaacactccaaccttatctcgggctatcttttgatttaaaagggattttgccgatttcggacccccccatcaaacaggattttcgcctgctggggcaaaccagcgtggaccgcttgctgcaactctctcagggccaggcggtgaagggcaatcagctgttgcccgtctcactggtgaaaagaaaaaccacccctggcgcccaatacgcaaaccgcctctccccgcgcgttggccgattcattaatgcagctggcacgacaggtttcccgactggaaagcgggcagttagggatgcgctcaagctgcaggaccagctgaagtctcccgtgaagaccttgtcagagggaaaaagagaaaggtacgggcagggcttggtgttgctctgcaagtgccatagatgggaaccagatgggctgttcctcccgttgcagctgtgctttgtcctgagcatactggggaacccgtcagtggtgcttctggatgagccgtcgaccgggatggaccccgaggggcagcagcaaatgtggactggtcaacagacacaggcgctcggtcggagagtatctggtgtgatagaacagtccgatgggagtggcagtcgtatagcagatgcactggcagacagagataatggtgttctggttggcgagctggatgatgagcagacgggtgcattatccagattgggtcacgattatcgcgctcctagggaacaatttgtccggtcagccgatgccagtcggaaagcgtctccagataaaaaggaaaaagtaagtcatcaggcatcataccgttcatga

SEQ ID NO: 4019 - DNA, 1962 bp, Homo sapiens
  SIMILAR (1)..(681): 961254mologous to Cloning vector pZC320 SopB,accession number U26464,Smith-Waterman Score=1097.
atggtggattcgttaattgcgcgcgtaggagtaatggctcgcggtaatgccattactttgcctgtatgtggtcgggatgtgaagtttactcttgaagtgctccggggtgatagtgttgagaagacctctcgggtatggtcaggtaatgaacgtgaccaggagctgcttactgaggacgcactggatgatctcatcccttcttttctactgactggtcaacagacaccggcgttcggtcgaagagtatctggtgtcatagaaattgccgatgggagtcgccgtcgtaaagctgctgcacttaccgaaagtgattatcgtgttctggttggcgagctggatgatgagcagatggctgcattatccagattgggtaacgattatcgcccaacaagtgcttatgaacgtggtcagcgttatgcaagccgattgcagaatgaatttgctggaaatatttctgcgctggctgatgcggaaaatatttcacgtaagattattacccgctgtatcaacaccgccaaattgcctaaatcagttgttgctcttttttctcaccccggtgaactatctgcccggtcagataaagaggaattacttaagcagcaggcatctaaccttcatgagcagaaaaaagctggggtgatatttgaagctgaagaagttatcactcttttaacttctgtgaaactgggcttaaaccctgtaggcgactctagaagacccccggtagagggacaccaggatttatttattctgcgaagtgatcttccgtcacaggtatttattcgcgataagctcatggagcggcgtaaccgtcgcacaggaaggacagagaaagcgcggatctgggaagtgacggacagaacggtcaggacctggattggggaggcggttgccgccgctgctgctgacggtgtgacgttctctgttccggtcacaccacatacgttccgccattcctatgcgatgcacatgctgtatgccggtataccgctgaaagttctgcaaagcctgatgggacataagtccatcagttcaacggaagtctacacgaaggtttttgcgctggatgtggctgcccggcaccggaacgtggactccaacgtcaaagggcgaaaaaccgtctatcagggcgatggcccactacgtgaaccatcacccaaatcaagttttttggggtcgaggtgccgtaaagcactaaatcggaaccctaaagggagcccccgattagagcttgacggggaaagccgcgaacgtgcgagaaaggaaggaagaagcgaaagagcggcgctagggccaactgggcttgaagccctgtttgggactctaaagacccccgacgggcgaagccctcgatgtgacaatctaaaaacttgtcacacttcacatggatctgtcatggcggaaacagcggttatcaatcacaagaaacgtaaaaatagcccgcgaatcgtccagtcaaacgacctcactgaggcggcatatagtctctcccgggatcaaaaacgtatgctgtatctgttcgttgaccagatcagaaaatctgatggcaccctacaggaacatgacggtatctgcgagatccatgttgctaaatatgctgaaatattcggattgacctctgcggaagccagtaaggatatacggcaggcattgaagagtttcgcggggaaggaagtatttattcgcgataagctcatggagcggcgtaaccgtcgcacaggaaggacagagaaagcgcggatctgggaagtgacggacagaacgacaaaggccatcatataccttgtcttcgaagccaacacgggaacagaaaacggttaccaaggcgaagaatctttatttaacaaagcgtactacggcggcggcacgaacttcttccgtaaagaaagccataagcttcagcagagcgctaaaaaactcgatgctgagttatcgaacggcgccctcggtttcatagagtga

SEQ ID NO: 4020 - DNA, 2322 bp, Homo sapiens
  SIMILAR (1615)..(2307): 981254mologous to unidentified cloning vector 29kD protein essential for the replication of mini F plasmid,accession number AB015619,Smith-Waterman Score=1195.
atgaagcgtgcgcctgttattccaaaacatacgctcaatactcaaccggttgaagatacttcgttatcgacaccagctgccccgatggtggattcgttaattgcgcgcgtaggagtaatggctcgcggtaatgccattactttgcctgtatgtggtcgggatgtgaagtttactcttgaagtgctccggggtgatagtgttgagaagacctctcgggtatggtcaggtaatgaacgtgaccaggagctgcttactgaggacgcactggatgatctcatcccttcttttctactgactggtcaacagacaccggcgttcggtcgaagagtatctggtgtcatagaaattgccgatgggagtcgccgtcgtaaagctgctgcacttaccgaaagtgattatcgtgttctggttggcgagctggatgatgagcagatggctgcattatccagattgggtaacgattatcgcccaacaagtgcttatgaacgtggaatacaaactaccatcagagaatactataaacacctctatgcaaataaactagaaaatctagaagaaaaggataaattcctggacacatacaccatcccaatactaaaccaggaagaagttgaatccctgaatagaccaataataggctctgaaattgaggcaataattaccaaccaaaaaaagtccaggactggacggattcacagccgaattcaaacagagaagccaggacttactgtgcaagaaatggaaaatagccccaaaggcattttggagatcatttggggctacccttcccatcacaaatgcataatacaagggcgtggaggacagaatgggggcaccactgcccagtacaacctcacattactggctctgctccccaaattctgttgccacactccttggctgcccaagtgtgactctgccaaaccggattcagcaactcagcttgtcctactttcacaaggatccgtcagggcggaaccaccggttatcaatcacaagaaacgtaaaaatagcccgcgaatcgtccagtcaaacgccctcactgaggcggcaaatagtctctcccgggatcaaaaacgtatgctgtatctgttcgttgaccagatcagaaaatctgatggcaccctacaggaacatgacggtatctgcgagatccatgttgctaaatatgctgaaatattcggattgacctctgcggaagccagtaaggatatacggcaggcattgaagagtttcgcggggaaggaagtggttttttatcgccctgaagaggatgccggcgatgaaaaaggctatgaatcttttccttggtttatcaaacgtgcgcacagtccatccagagggctttacagtgtacatatcaacccatatctcattcccttctttatcgggttacagaaccggtttacgcagtttcggcttagtgaaacaaaagaaatcaccaatccgtatgccatgcgtttatacgaatccctgtgtcagtatcgtaagccggatggctcaggcatcgtctctctgaaaatcgactggatcatagagcgttaccagctgcctcaaagttaccagcgtatgcctgacttccgccgccgcttcctgcagtcacatggatctgtcatggcggaaacagcggttatcaatcacaagaaacgtaaaaatagcccgcgaatcgtccagtcaaacgacctcactgaggcggcatatagtctctcccgggatcaaaaacgtatgctgtatctgttcgttgaccagatcagaaaatctgatggcaccctacaggaacatgacggtatctgcgagatccatgttgctaaatatgctgaaatattcggattgacctctgcggaagccagtaaggatatacggcaggcattgaagagtttcgcggggaaggaagtggttttttatcgccctgaagaggatgccggcgatgaaaaaggctatgaatcttttccttggtttatcaaacgtgcgcacagtccatccagagggctttacagtgtacatatcaacccatatctcattcccttctttatcgggttacagaaccggtttacgcagtttcggcttagtgaaacaaaagaaatcaccaatccgtatgccatgcgtttatacgaatccctgtgtcagtatcgtaagccggatggctcaggcatcgtctctctgaaaatcgactggatcatagagcgttaccagctgcctcaaagttaccagcgtatgcctgacttccgccgccgcttcctgcaggtctgtgttaatgagatcaacagcagaactccaatgcgcctctcatacatgagaaaaagaaaggcgggtatcctctag

SEQ ID NO: 4021 - DNA, 2169 bp, Homo sapiens
  SIMILAR (529)..(1248): 961254mologous to Cloning vector pZC320 SopB,accession number U26464,Smith-Waterman Score=1171.
  misc_feature (1)...(2169): n = a,t,c or g
atggacgatatcccgcaagaggcccggcagtaccggcataaccaagcctatgcctacagcatccagggtgacggtgccgaggatgacgatgagcgcattgttagatttcatacacgggtcaccgtcgacagcgacacacttgcatcggatgcagcccggttaacgtgccggcacggcctgggtaaccaggtattttgtccacataaccgtgcgcaaaatgttgtggataagcaggacacagcagcaatccacagcaggcatacaaccgcacaccgaggttactccgttctacaggttacgacggggttctttagagtcgacagcaggcttcatggaggaagtgatgatggttacgggttcccaaagaatgactatgagttgcacagggcaagaagggaggaaggagttcccaatccaccaaggaggccaatgggctactttgtgttgctcctgaaacacatataccaagggccagataacggtaccagctcagggaagtgtggcaaggagctccacagagcccagataatgaagcgtgcgcctgttattccaaaacatacgctcaatactcaaccggttgaagatacttcgttatcgacaccagctgccccgatggtggattcgttaattgcgcgcgtaggagtaatggctcgcggtaatgccattactttgcctgtatgtggtcgggatgtgaagtttactcttgaagtgctccggggtgatagtgttgagaagacctctcgggtatggtcaggtaatgaacgtgaccaggagctgcttactgaggacgcactggatgatctcatcccttcttttctactgactggtcaacagacaccggcgttcggtcgaagagtatctggtgtcatagaaattgccgatgggagtcgccgtcgtaaagctgctgcacttaccgaaagtgattatcgtgttctggttggcgagctggatgatgagcagatggctgcattatccagattgggtaacgattatcgcccaacaagtgcttatganacccgattgcagaatgaatttgctggaaatatttctgcgctggctgatgcggaaaatatttcacgtaagattattacccgctgtatcaacaccgccaaattgcctaaatcagttgttgctcttttttctcaccccggtgaactatctgcccggtcaggtgatgcacttcaaaaagcctttacagataaagaggaattacttaagcagcaggcatctaaccttcatgagcagaaaggggatcctctagagtcgaccagcagttatgcaaccaagttcccaataagaagtccctttgcgattttgaaagagataaagcatgggtcccccaggccaaagggcaagacttccaacgccaggcctttaccagaaagcaacataggcaccgccagcaggtacaaactgcccaaccacagatcagaaaatctgatggcacccttacaggaacatgacggtatctgcgagatccatgttgctaaatatgctgaaatattcggattgacttctgcggaagccagtaaggatatacggcaggcattgaagagtttcgcggggaaggaagtggttttttatcgccntgaagaggatgccggcgatgaaaaaggctatgaatcttttccttggtttatcaaacgtgcgcacagtccatccagagggctttacagtgtacatatcaacccatatctcattcccttctttatcgggttacagaaccggtttacgcagtttcggcttagtgaaacaaaagaaatcaccaatccgtatgccatgcgtttatacgaatccctgtgtcagtatcgtaagccggatggctcaggcatcgtctctctgaaaatcgactggatcatagagcgttaccagctgcctcaaagttaccagcgtatgcctgacttccgccgccgcttcctgcaggtctgtgttaatgagatcaacagcagaactccaatgcgcctctcatacattgagaaaaagaaaggccgccagacgactcatatcaaccgaggcacaagagcagacgggccacgccccggaaaaggagaccacaaagacccaaccaggcgcacaacgactcccccgccagcggccattctcgacatcagccagccagcaacagaaaccgccgacacatccttccaagacccaaacagcaaaggctaa

SEQ ID NO: 4022 - DNA, 1812 bp, Homo sapiens
  SIMILAR (1042)..(1629): 961254mologous to Cloning vector pZC320 SopB,accession number U26464,Smith-Waterman Score=941.
  misc_feature (1)...(1812): n = a,t,c or g
atgcccagtccttctccacttttttttgttgctactatccatgactgtcaggaactgttggaaactaccgaaactggcccatccgatcttcaagatgtgcccctagagaaggcggacgccaccgtgttcacagacggtagcagctttctcgagcagggagtacgaaaggccggtgcagctgttaccacggagacagatgtgttgtgggctcatgctttaccagcaaacacctcagcgcaaaaagctgaattgatcgccctcactcaggctctccgatggggtaaggatattaacgttgacactgacagcaggtacgcctttgctacggtgcatgtacatggagccatctgccaggagcgcaggctactcacctcagcagaaaaggctatcaaaaacaagaatcccccgtcttcaaagcctaacagatcaagcagctctctggggaacaacctgcgaccagatggctccatgtacatgcaccgtagcaaaggcgtacctgctgtcagtgtcaacgttaatatccttaccccatcggagagcctgaacttggaatccagttgtgtgaccaaaaagttatctccagaaaaggaaatttatgaaatggaatcactccagtgggagaatatggggaaacgtatcaaccatcaccttcaatacaatggtcttggagacaatatggagtgcaaaggcaacttagagggtcaagaagcaagtcaggaagggctttacatgtgtgtcaaaattacctgtgaagaaaaggccactgaaagtcattcaacctcttctacttttcatcggataattcctaccaaggaaaaattgtacaaatcaccgaaccccagccaggacaccgggtattcccagcaccatacaagaactactttttcgaagaggcaacccaaaaactgcgagcggttccccgtggagggccgcccactcaccttgccggcgcagacaagctncggatattctggctcaaagccagatgtgattaccttactggagcaagggaaagagccctgcgtggtggcgagggatgtgacaagaagacagtgccccgctgccccgatggtggattcgttaattgcgcgcgtaggagtaatggctcgcggtaatgccattactttgcctgtgtgtggtcgggatgtgaagtttactcttgaagtgctccggggtgatagtgttgagaagacctctcgggtatggtcaggtaatgaacgtgaccaggagctgcttactgaggacgcactggatgatctcatcccttcttttctactgactggtcaacagacaccggcgttcggtcgaagagtatctggtgtcatagaaattgccgatgggagtcgccgtcgtaaagctgctgcacttaccgaaagtgattatcgtgttctggttggcgagctggatgatgagcagatggctgcattatccagattgggtaacgattatcgcccaacaagtgcttatgaacgtggtcagcgttatgcaagccgattgcagaatgaatttgctggaaatatttctgcgctggctgatgcgganaatatttcacgtaagaatattacccgctgtatcaacaccgccaaattgcctaaatcagttgttgctcttttttctcaccccggtgactatctgcccgtgccgcaagccaaaggcaacaatgtggttatcacaagctacatgacaaacagaggcttcttcgaggataaaaaggcaacatttgcgccaagcttcttaatgaacatcaaaggcaataaaacatccgttgtcaaaaacagcatcctggagcaaggacagctgacagtcaactaa

SEQ ID NO: 4023 - DNA, 1557 bp, Homo sapiens
  SIMILAR (355)..(1083): 861254mologous to Cloning vector pZC320 SopB,accession number U26464,Smith-Waterman Score=1000.
atgacacttccaaaggaacacaactctagcaatatacaccaaaggaaaggggtctttctagagtcgcacgaggaggcatgcaagcctgaagtcgccagtattatcacgcggctgtccagggacctttataatggtttccctggaattaaggggaagaaagaaaatccggcccaagaggtagacatttcagcagtcctcactgcagcacaaatcaaagaagaaaaacaaagggattttgccgatttcggaaccaccatcaaacaggattttcgcctgctggggcaaaccagcgtggaccgcttgctgcaactctctcagggccaggcggtgaagggcaatcagctgttgcccgtctcactggtgaaaagaaaaaccaccctggcgcccaatacgcaaaccgcctctccccgcgcgttggccgattcattaatgcagctggcacgacaggtttcccgactggaaagcgggcatgttgagaagacctctcgggtatggtcaggtaatgaacgtgaccaggagctgcttactgaggacgcactggatgatctcatcccttcttttctactgactggtcaacagacaccggcgttcggtcgaagagtatctggtgtcatagaaattgccgatgggagtcgccgtcgtaaagctgctgcacttaccgaaagtgattatcgtgttctggttggcgagctggatgatgagcagatggctgcattatccagattgggtaacgattatcgcccaacaagtgcttatgaacgtggtcagcgttatgcaagccgattgcagaatgaatttgctggaaatatttctgcgctggctgatgcggaaaatatttcacgtaagattattacccgctgtatcaacaccgccaaattgcctaaatcagttgttgctcttttttctcaccccggtgaactatctgcccggtcaggtgatgcacttcaaaaagcctttacagataaagaggaattacttaagcagcaggcatctaaccttcatgagcagaaaaaagctggggtgatatttgaagctgaagaagttatcactcttttaacttctgtgcttaaaacggattttgccgatttcggaaccaccatcaaacaggattttcgcctgctggggcaaaccagcgtggaccgcttgctgcaactctctcagggccaggcggtgaagggcaatcagctgttgcccgtctcactggtgaaaagaaaaaccaccctggcgcccaatacgcaaaccgcctctccccgcgcgttggccgattcattaatgcagctggcacgacaggtttcccgactggaaagcgggcaggattttgccgatttcggaaccaccatcaaacaggattttcgcctgctggggcaaaccagcgtggaccgcttgctgcaactctctcagggccaggcggtgaagggcaatcagctgttgcccgtctcactggtgaaaagaaaaaccaccctggcgcccaatacgcaaaccgcctctccccgcgcgttggccgattcattaatgcagctggcacgacaggtttcccgactggaaagcgggcagtga

SEQ ID NO: 4024 - DNA, 1599 bp, Homo sapiens
  SIMILAR (427)..(990): 951254mologous to synthetic construct chloramphenicol acetyltransferase,accession number A02739,Smith-Waterman Score=981.
atgctgcagatccttaaacagcagcaaaacgaaaaataccaagtgcctcaattcgatcaatcaacgattaaaaatattgagtctgcaaaaggacttgatgtgtgggacagctggccgctgcaaaacgctgacggaacagtagctgaatacaacggctatcacgttgtgtttgctcttgcgggaagcccgaaagacgctgatgacacatcaatctacatgttttatcaaaaggtcggcgacaactcaatcgacagctggaaaaacgcgggccgtgtctttaaagacagcgataagttcgacgccaacgatccgatcctgaaagatcagacgcaagaatggtccggttctgcaacctttacatctgacggaaaaatccgtttattctacactgactattccggtaaacattacggcaaacaaagcctgacaacagcgcagaccgttcagctggatattacggcctttttaaagaccgtaaagaaaaataagcacaagttttatccggcctttattcacattcttgcccgcctgatgaatgctcatccggagttccgtatggcaatgaaagacggtgagctggtgatatgggatagtgttcacccttgttacaccgttttccatgagcaaactgaaacgttttcatcgctctggagtgaataccacgacgatttccggcagtttctacacatatattcgcaagatgtggcgtgttacggtgaaaacctggcctatttccctaaagggtttattgagaatatgtttttcgtctcagccaatccctgggtgagtttcaccagttctcacttaaacgtggccaatatggacaacttcttcgcccccgttttcaccatgggcaaatattatacgcaaggcgacaaggtgctgatgccgctggcgattcaggttcatcatgccgtttgtgatggcttccatgtcggcagaatgtttaatgaattcccccagccctgcgatgagtggcagggcggggcacatacgctcaatactcaaccggttgaagataattcgttatcgacaccagctgccccgatggtggattcgttaattgcgcgcgtaggagtaatggctcgcggtaatgccattactttgcctgtatgtggtcgggatgtgaagtttactcttgaagtgctcctgggtgatagtgttgagaagacctctcgggtatggtcaggtaatgaacgtgaccaggagctgcttactgaggacgcactggatgatctcatcccttcttttctactgactggtcaacagacaccggcgttcggtcgaagagtatctggtgtcatagaaattgccgatgggagtcgccgtcgtaaagctgatgcacttaccgaaagtgattatcgccttctggttggcgagctgcatgatgagcagatggctgcattatccagattgggtaacgattatcgctcaacaagtgcttatgaacgtgttctgcaaagcctgatgggacataagtccatcagttcaacggaagtctacacgaaggtttttgcgctggatgtggctgcccggcaccgggtgcagtttgcgatgccggagtctgatgcggttgcgatgctgaaacaattatcctga

SEQ ID NO: 4025 - DNA, 2124 bp, Homo sapiens
  SIMILAR (454)..(942): 1001254mologous to Cloning vector pSacBII SacB,accession number U09128,Smith-Waterman Score=874.
atgaagcgtgcgcctgttattccaaaacatacgctcaatactcaaccggttgaagatacttcgttatcgacaccagctgccccgatggtggattcgttaattgcgcgcgtaggagtaatggctcgcggtaatgccattactttgcctgtatgtggtcgggatgtgaagtttactcttgaagtgctccggggtgatagtgttgagaagacctctcgggtatggtcaggtaatgaacgtgaccaggagctgcttactgaggacgcactggatgatctcatcccttcttttctactgactggtcaacagacaccggcgttcggtcgaagagtatctggtgtcatagaaattgccgatgggagtcgccgtcgtaaagctgctgcacttaccgaaagtgattatcgtgttctggttggcgagctggatgatgagcagatggctgcattatccagattgggaggagcgactcaagccttcgcgaaagaaaataaccaaaaagcatacaaagaaacgtacggcgtctctcatattacacgccatgatatgctgcagatccctaaacagcagcaaaacgaaaaataccaagtgcctcaattcgatcaatcaacgattaaaaatattgagtctgcaaaaggacttgatgtgtgggacagctggccgctgcaaaacgctgacggaacagtagctgaatacaacggctatcacgttgtgtttgctcttgcgggaagcccgaaagacgctgatgacacatcaatctacatgttttatcaaaaggtcggcgacaactcaatcgacagctggaaaaacgcgggccgtgtctttaaagacagcgataagttcgacgccaacgatccgatcctgaaagatcagacgcaagaatggtccggttctgcaacctttacatctgacggaaaaatccgtttattctacactgactattccggcccaggcggcaatatagaaataaaaagagctcctaacctcgggggaacccccattaaataccacaaggaaatcatggaattattgcatgcagtgcaaaaccccaaggaggtggcagtcttacactgccaaagccatcaaaaaggtgaagaagagaaggcagaaggaaactgtcaggcagatgctgaggccaaaattgctgccaggtggaacctcccattagcaatacccgtggaaagacccttggtatggaacaatcccctccaagagattaagccccagtattccctgactgaaacagaatggggactttcacagggtcatagttttcttccctcagggtggttaacgacagaagaaggaaaggtactcatacccgaagccagccagtggaaaatgcttaaaaccctccaccaaacttttcataggggtattgagaacactcatcaaatggccaaatccctatttacagggccaaatctcctctggaccatccgacagatagtcaaagcctgtcaccaacatcaaagacgaaaggtagataaaaccacaaagatggggagaaaccagagcagaaaagctgaaacttccaaaaaagagaacatctcttctcctccaaaggatcgcaacccttctccagcaagggaacaaaactggacagagaatgagcttgacgagttgacagaagtagatttcagaagggattttgccgatttcggaaccaccatcaaacaggattttcgcctgctggggcaaaccagcgtggaccgcttgctgcaactctctcagggccaggcggtgaagggcaatcagctgttgcccgtctcactggtgaaaagaaaaaccaccctggcgcccaatacgcaaaccgcctctccccgcgcgttggccgattcattaatgcagctggcacgacaggtttcccgactggaaagcgggcaggattttgccgatttcggaaccaccatcaaacaggattttcgcctgctggggcaaaccagcgtggaccgcttgctgcaactctctcagggccaggcggtgaagggcaatcagctgttgcccgtctcactggtgaaaagaaaaaccaccctggcgcccaatacgcaaaccgcctctccccgcgcgttggccgattcattaatgcagctggcacgacaggtttcccgactggaaagcgggcagtga

SEQ ID NO: 4026 - DNA, 2451 bp, Homo sapiens
  SIMILAR (481)..(1143): 921254mologous to Cloning vector pZC320 SopB,accession number U26464,Smith-Waterman Score=1016.
atgaggggcggcaagtcctggttgatttctgggtttctacttctttgtaacgttcagcagtttatcgatgaaggcaattatacatccggcgacaaccatacgctgagagaccctcactacgttgaagacaaaggccataaataccttgtattcgaagccaacacgggaacagaaaacggataccaaggcgaagaatctttatttaacaaagcgtactacggcggcggcacgaacttcttccgtaaagaaagccagaagcttcagcagagcgctaaaaaacgcgatgctgagttagcgaacggcgccctcggtatcatagagttaaataatgattacacattgaaaaaagtaatgaagccgctgatcacttcaaacacggaagatcaagattctgacattcctatcctcatgttgcctgtgccccaatccccatgtgttacctggaatctttggtgtcagttgtcacacacagtgccagtgaccccattcctgccccctgtggattcaggggcacacatctcctttaaacccctgcctgtatgtggtcgggatgtgaagtttactcttgaagtgctccggggtgatagtgttgagaagacctctcgggtatggtcaggtaatgaacgtgaccaggagctgcttactgaggacgcactggatgatctcatcccttcttttctactgactggtcaacagacaccggcgttcggtcgaagagtatctggtgtcatagaaattgccgatgggagtcgccgtcgtaaagctgctgcacttaccgaaagtgattatcgtgttctggttggcgagctggatgatgagcagatggctgcattatccagattgggtaacgattatcgcccaacaagtgcttatgaacgtggtcagcgttatgcaagccgattgcagaatgaatttgctggaaatatttctgcgctggctgatgcggaaaatatttcacgtaagattattacccgctgtatcaacaccgccaaattgcctaaatcagttgttgctcttttttctcaccccggtgaactatctgcccggtcaggtgatgcacttcaaaaagcctttacagataaagaggaattacttaagcagcaggcatctaaccttcatgagcagaaaaaagctgggctcgtggaaggtaacgacccccagggaacagcctcaatgtatcacggatgggtaccagatcttcatattcatgcagaagacactctcctgcctttctatcttggggaaaaggacgatgtcacttatgcaataaagcccacttgctggccggggcttgacattattccttcctgtctggctctgcaccgtattgaaactgagttaatgggcaaatttgatgaaggtaaactgcccaccgatccacacctgatgctccgactggccattgaaactgttgctcatgactatgatgtcatagttattgacagcgcgcctaacctgggtatcggcacgattaatgtcgtatgtgctgctgatgtgctgattgttcccacgcctgctgagttgtttgactacacctccgcactgcagtttttcggtatgcttcggtatctgctcaagaacgttgatcttgaagggttcgagcctgatgtacgtattttgcttgccaaatacagcagtagtaatggctctcagtccccgtggctggaggagcaaattcgggatgcctggggaagcatggttctaaaaaatgttgtacccgaaaacggggaagggccagataccagacaatcaggggcagcccctcggccccagaacccactgaaattactcaaactagccaatccaaactgctttttcttttccatgttccctttcacgaaccacaatatagccacttattggcaggtgcctctctcatgcctcttggccaaacccgtgcttcctctgagtgaccctccagccagtaaggatatacggcaggcattgaagagtttcgcggggaaggaagtggttttatatcgccctgaagaggatgccggcgatgaaaaaggctatgaatcttttccttggtttatcaaacgtgcgcacagtccatccagagggctttacagtgtacatatcaacccatatctcattcccttctttatcgggttacagaaccggtttacgcagtttcggcttagtcgagcagaagaaatcaccaatccgtatgccatgcgtttataccaatccctgggtcagtatcgtaagcccgatggcgtcggcatcgtctctctgaaaatcgacttggtcatagagcggttcccgctgcctccaaggtttttagcttctttgcgatgggttcaaacaccctcctttagcttggagaagtttgttattaccgatcttctgaagcctacttctgtcaactcatcaaagtcattctccatccagctttgttccattgctggcgaggagctgcgttcctttggaggagaagaggcgctctga

SEQ ID NO: 4027 - DNA, 2544 bp, Homo sapiens
  SIMILAR (448)..(1308): 951254mologous to Cloning vector pZC320 SopB,accession number U26464,Smith-Waterman Score=1348.
atggtggattcgttaattgcgcgcgtaggagtaatggctcgcggtaatgccattactttgcctgtatgtggtcgggatgtgaagtttactcttgaagtgctccggggtgatagtgttgagaagacctctcgggtatggtcaggtaatgaacgtgaccaggagctgcttactgaggacgcactggatgatctcatcccttcttttctactgactggtcaacagacaccggcgttcggtcgaagagtatctggtgtcatagaaattgccgatgggagtcgccgtcgtaaagctgctgcacttaccgaaagtgattatcgtgttctggttggcgagctggatgatgagcagatggctgcattatccagattgggtaacgattatcgcccaacaagtgcttatgaacgtggtcagcgttatgcaagccgattgcagaatgaatttgctggaaatatttctgcgctggctgatgcggaaaatatttcacctgccccgatggtggattcgttaattgcgcgcgtaggagtaatggctcgcggtaatgccattactttgcctgtatgtggtcgggatgtgaagtttactcttgaagtgctccggggtgatagtgttgagaagacctctcgggtatggtcaggtaatgaacgtgaccaggagctgcttactgaggacgcactggatgatctcatcccttcttttctactgactggtcaacagacaccggcgttcggtcgaagagtatctggtgtcatagaaattgccgatgggagtcgccgtcgtaaagctgctgcacttaccgggggtgattatcgtgttctggttggcgagctggatgatgagcagatggctgcattatccagattgggtaacgattatcgcccaacaagtgcttatgaacgtggtcagcgttatgcaagccgattgcagaatgaatttgctggaaatatttctgcgctggctgatgcggaaaatatttcacgtaagattattacccgctgtatcaacaccgccaaattgcctaaatcagttgttgctcttttttctcaccccggtgaactatctgcccggtcaggtgatgcacttcaaaaagcctttacagataaagaggaattacttaagcagcaggcatctaaccttcatgagcagaaaaaagctggggtgatatttgaagctgaagaagttatcactcttttaacttctgtgcttaaaacgtcatctgcatcaagaactagtttaagctcacgacatcagtttgctcctggagcgacagtattgtataagggcgataaaatggtgcttaacctggacagggattttgccgatttcggaccaaccatcaaacaggattttcgcctgctggggcaaaccagcgtggaccgcttgctgcaactctctcagggccaggcggtgaagggcaaacagctgttgcccgtctcactggctttgcagaactttcagcggtataccggcatacagcatgtgcatcgcataggaatggcggaacgtatgtggtgtgaccggaacagagaacgtcacaccgtcagcagcagcggcggcaaccgcctccccaatccaggagtaatggctcgcggtaatgccattactttgcctgtatgtggtcgggatgtgaagtttactcttgaagtgctccggggtgatagtgttgagaagacctctcgggtatggtcaggtaatgaacgtgaccaggagctgcttactgaggacgcactggatgatctcatcccttcttttctactgactggtcaacagacaccggcgttcggtcgaagagtatctggtgtcatagaaattgccgatgggagtcgccgtcgtaaagctgctgcacttaccgaaagtgattatcgtgttctggttggcgagctggatgatgagcagatggctgcattatccagattgggtaacgattatcgcccaacaagtgcttatgaacgtggtcagcgttatgcaagccgattgcagaatgaatttgctggaaatatttctgcgctggctgatgcggaaaatatttcacgtaagattattacccgctgtatcaacaccgccaaattgcctaaatcagttgttgctcttttttctcaccccggtgaactatctgcccggtcaggtgatgcacttcaaaaagcctttacagataaagaggaattacttaagcagcaggcatctaaccttcatgagcagaaaaaagctgggaccgttcagctggatattacggcctttttaaagaccgtaaagaaaaataagcacaagttttatccggcctttattcacattcttgcccgcctgatgaatgctcatccggagttccgtatggcaatgaaagacgggtttattgagaatatgtttttcgtctcagccaatccctgggtgagtttcaccagttttgatttaaacgtggccaatatggacaacttcttcgcccccgttttcaccatgggcaaatattatacgcaaggcgacaaggtgctgatgccgctggcgattcagttcgctcgctatgctcggttacacggctgcggcgagcgctag

SEQ ID NO: 4028 - DNA, 1326 bp, Homo sapiens
  SIMILAR (1)..(765): 971254mologous to Cloning vector pZC320 SopB,accession number U26464,Smith-Waterman Score=1227.
  misc_feature (1)...(1326): n = a,t,c or g
atggctccgggtaatgccattacttgccctgtatgtggtcgggatgtgaagttacttctgaaagtgctccggggtgatagtgttgagaagacctctcgggtatggtcaggtaatgaacgtgaccaggagctgcttactgaggacgcactggatgatctcatcctttcttttctactgactggtcaacagacaccggcgttcggtcgaagagtatctggtgtcatagaaattgccgatgggagtcgccgtcgtaaagctgctgcacttaccgaaagtgattatcgtgttctggttggcgagctggatgatgagcagatggctgcattatccagattgggtaacgattatcgcccaacaagtgcttatgaacgtggtcagcgttatgcaagccgattgcagaatgaatttgctggaaatatttctgcgctggctgatgcggaaaatatttcacgtaagattattacccgctgtatcaacaccgccaaattgcctaaatcagttgttgctcttttttctcaccccggtgaactatctgcccggtcaggtgatgcacttcaaaaagcctttacagataaagaggaattacttaagcagcaggcatctaaccttcatgagcagaaaaaagctggggtgatatttgaagctgaagaagttatcactcttttaacttctgtgcttaaaacgtcatctgcatcaagaactagtttaagctcacgacatcagtttgctcctggagcgacagtattgtataagggcgataaaatgacaccggcgttcggtcgaagagtatctggtgtcatagaaattgccgatgggagtcgccgtcgtanagctgctgcacttaccgaaagtgattatcgtgttctggttggcgagctggatgatgagcagatggctgcattatccagattgggtaacgattatcgcccaacaagtgcttatgaacgtggtcagcgttatgcaagccgattgcagaatgaatttgctggaaatatttctgcgctggctgatgcggaaaatatttcacgtaagattattacccgctgtatcaacaccgccaaattgcctaaatcagttgttgctcttttttctcaccccggtgaactatctgcccggtcaggtgatgcacttcaaaaagcctttacagataaagaggaattacttaagcagcaggcatctaaccttcatgagcagaaaaaagctggggtgatatttgaagctgaagaagttatcactcttttaacttctgtgcttaaaacgtcatctgcatcaagaactagtttaagctcacgacatcagtttgctcctggagcgacagtattgtaa

SEQ ID NO: 4029 - DNA, 1902 bp, Homo sapiens
  SIMILAR (1)..(1083): 851254mologous to Cloning vector pZC320 SopA,accession number U26464,Smith-Waterman Score=1578.
atgaaactcatggaaacacttaaccagtgcataaacgctggtcatgaaatgacgaaggctatcgccattgcacagtttaatgatgacagcccggaagcgaggaaaataacccggcgctggagaataggtgaagcagcggatttagttggggtttcttctcaggctatcagagatgccgagaaagcagggcgactaccgcacccggatatggaaattcgaggacgggttgagcaacgtgttggttatacaattgaacaaattaatcatatgcgtgatgtgtttggtacgcgattgcgacgtgctgaagacgtatttccaccggtgatcggggttgctgcccataaaggtggcgtttacaaaacctcagtttctgttcatcttgctcaggatctggctctgaaggggctacgtgttttgctcgtggaagggaacagcctcaatgtatcacggatgggtaccagatcttcatattcatgcagaagacactctcctgccttactccttggggaaaagactgatgtcacttatgcaataaagcccacttgctggccggggcttgacattattccttcctgtctggctctgcaccgtattgaaactgagttaatgggcaaatttgatgaaggtaaactgcccaccgatccacacctgatgctccgactggccattgaaactgttgctcatgactatgatgtcatagttattgacagcgcgcctaacctgggtatcggcacgattaatgtcgtatgtgctgctgatgtgctgattgttcccacgcctgctgagttgtttgactacacctccgcactgcagtttttcgatatgcttcgtgatctgctcaagaacgttgatcttaaagggttcgagcctgatgtacgtattttgcttaccaaatacagcaatagtaatggctctcagtccccgtggatggaggagcaaattcgggatgcctggggaagcatggttctaaaaaatgttgtacgtgaaacgaatgaagttggtaaagctgccccgatggtggattcgttaattgcgcgcgtaggagtaatggctcgcggtaatgccattactttgcctgtatgtggtcgggatgtgaagtttactcttgaagtgctccggggtgatagtgttgagaagacctctcgggtatggtcaggtaatgaacgtgaccaggagctgcttactgaggacgcactggatgatctcatcccttcttttctactgactggtcaacagacaccggcgttcggtcgaagagtatctggtgtcatagaaattgccgatgggagtcgccgtcgtaaagctgctgcacttaccgaaagtgattatcgtgttctggttggcgagctggatgatgagcagatggctgcattatccagattgggtaacgattatcgcccaacaagtgcttatgaacgtggtcagcgttatgcaagccgattgcagaatgaatttgctggaaatatttctgcgctggctgatgcggaaaatatttcacgtaagattattacccgctgtatcaacaccgccaaattgcctaaatcagttgttgctcttttttctcaccccggtgaactatctgcccggtcaggtgatgcacttcaaaaagcctttacagataaagaggaattacttaagcagcaggcatctaaccttcatgagcagaaaaaagctggggtgatatttgaagctgaagaagttatcactcttttaacttctgtgcttaaaacgtcatctgcatcaagaactagtttaagctcacgacatcagtttgctcctggagcgacagtattgtataagggcgataaaatggtgcttaacctggacaggtctcgtgttccaactgagtgtatagagaaaattgaggccattcttaaggaacttgaaaagccagcaccctga

SEQ ID NO: 4030 - DNA, 1686 bp, Homo sapiens
  SIMILAR (688)..(1404): 961254mologous to Cloning vector pZC320 SopB,accession number U26464,Smith-Waterman Score=1137.
  misc_feature (1)...(1686): n = a,t,c or g
atggtggattcgttaattgcgcgcgtagaagtaatggctcgcggtaatgccattactttgcctgtatgtggtcgggatgtgaagtttactcttgaagtgctccggggtgatagtgttgagaagacctctcgggtatggtcaggtaatgaacgtgaccaggagctgcttactgaggacgcactggatgatctcatcccttcttttctactgactggtcaacagacaccggcgttcggtcgaagagtatctggtgtcatagaaattgccgatgggagtcgccgtcgtaaagctgctgcacttaccgaaagtgattatcgtgttctggttggcgagctggatgatgagcagatggctgcattatccagattgggtaacgattatcgcccaacaagtgcttatgaacgtggtcagcgttatgcaagccgattgcagaatgaatttgctggaaatatttctgcgctggctgatgcggaaaatatttcacgtaagattattacccaatgtatcaacaccgccaaattgcctaaatcagttgttgctcttttttctcaccccggtgaactatctgcccggtcaggtgatgcacttcaaaaagcctttacagataaagaggaattacttaagcagcaggcatctaacgttcatgagcagaaaaaaactggggtgatatttgaagctgaagaagggagtttttcgactattccgcgaganatactttcgttatcgacaccagctgccccgatggtggattcgttaattgcgcgcgtaggagtaatggctcgcggtaatgccattactttgcctgtatgtggtcggaatgtgaagtttactcttgaagtgctccggggtgatagtgttgagaagacctctcgggtatggtcaggtaatgaacgtgaccaggagctgcttactgaggacgcactggatgatctcatcccttcttttctactgactggtcaacagacaccggcgttcggtcgaagagtatctggtgtcatagaaattgccgatgggagtcgccgtcgtaaagctgctgcacttaccgaaagtgattatcgtgttctggttggcgagctggatgatgagcagatggctgcattatccagattgggtaacgattatcgcccaacaagtgcttatgaacgtggtcagcgttatgcaagccgattgcagaatgaatttgctggaaatatttctgcgctggctgatgcggaaaatatttcacgtaagattattacccgctgtatcaacaccgccaaattgcctaaatcagttgttgctcttttttctcaccccggtgaactatctgcccggtcaggtgatgcacttcaaaaagcctttacagataaagaggaattacttaagcagcaggcatctaaccttcatgagcagaaaaaagctgggcaaaatacgtacatcaggctcgaaccctttaagatcaacgttcttgagcagatcacgaagcatatcgaaaaactgcagtgcggaggtgtagtcaaacaactcagcaggcgtgggaacaatcagcacatcagcagcacatacgacattaatcgtgccgatacccaggttaggcgcgctgtcaataactatgacatcatagtcatgagcaacagtttcaatggccagtcggagcatcaggtgtggatcggtgggcagtttaccttcatcaaatttgcccattaa

SEQ ID NO: 4031 - DNA, 1440 bp, Homo sapiens
  SIMILAR (1)..(726): 991254mologous to Cloning vector pZC320 SopB,accession number U26464,Smith-Waterman Score=1183.
atggtggattcgttaattgcgcgagtaggagtaatggctcgcggtaatgccattactttgcctgtatgtggtcgggatgtgaagtttactcttgaagtgctccggggtgatagtgttgagaagacctctcgggtatggtcaggtaatgaacgtgaccaggagctgcttactgaggacgcactggatgatctcatcccttcttttctactgactggtcaacagacaccggcgttcggtcgaagagtatctggtgtcatagaaattgccgatgggagtcgccgtcgtaaagctgctgcacttaccgaaagtgattatcgtgttctggttggcgagctggatgatgagcagatggctgcattatccagattgggtaacgattatcgcccaacaagtgcttatgaacgtggtcagcgttatgcaagccgattgcagaatgaatttgctggaaatatttctgcgctggctgatgcggaaaatatttcacgtaagattattacccgctgtatcaacaccgccaaattgcctaaatcagttgttgctcttttttctcaccccggtgaactatctgcccggtcaggtgatgcacttcaaaaagcctttacagataaagaggaattacttaagcagcaggcatctaaccttcatgagcagaaaaaagctggggtgatatttgaagctgaagaagttatcactcttttaacttctgtgcttaaaacggattttgccgatttcggaaccaccatcaaacaggattttcgcctgctggggcaaaccagcgtggaccgcttgctgcaactctctcagggccaggcggtgaagggcaatcagctgttgcccgtctcactggtgaaaagaaaaaccaccctggcgcccaatacgcaaaccgcctctccccgcgcgttggccgattcattaatgcagctggcacgacaggtttcccgactggaaagcgggcaggattttgccgatttcggaaccaccatcaaacaggattttcgcctgctggggcaaaccagcgtggaccgcttgctgcaactctctcagggccaggcggtgaagggcaatcagctgttgcccgtctcactggtgaaaagaaaaaccaccctggcgcccaatacgcaaaccgcctctccccgcgcgttggccgattcattaatgcagctggcacgacaggtttcccgactggaaagcgggcaggattttgccgatttcggaaccaccatcaaacaggattttcgcctgctggggcaaaccagcgtggaccgcttgctgcaactctctcagggccaggcggtgaagggcaatcagctgttgcccgtctcactggtgaaaagaaaaaccaccctggcgcccaatacgcaaaccgcctctccccgcgcgttggccgattcattaatgcagctggcacgacaggtttcccgactggaaagcgggcagtga

SEQ ID NO: 4032 - DNA, 3420 bp, Homo sapiens
  SIMILAR (2185)..(2973): 951254mologous to Cloning vector pSacBII SacB,accession number U09128,Smith-Waterman Score=1304.
atggtggattcgttaattgcgcgcgtaggagtaatggctcgcggtaatgccattactttgcctgtatgtggtcgggatgtgaagtttactcttgaagtgctccggggtgatagtgttgagaagacctctcgggtatggtcaggtaatgaacgtgaccaggagctgcttactgaggacgcactggatgatctcatcccttcttttctactgactggtcaacagacaccggcgttcggtcgaagagtatctggtgtcatagaaattgccgatgggagtcgccgtcgtaaagctgctgcacttaccgaaagtgattatcgtgttctggttggcgagctggatgatgagcagatggctgcattatccagattgggtaacgattatcgcccaacaagtgcttatgaacgtggtcagcgttatgcaagccgattgcagaatgaatttgctggaaatatttctgcgctggctgatgcggaaaatatttcacgtctccccagtgcctaccattcttcactgcctggctcactcatttatatcactcgtttcaagttcatggaccttgctttagaattttcaagatattctcacatctatcagctcattcagtctttgaaatgttcctacaagcgaggcaacacagaaatcaaaatctccttttacagctctggacgctggcagtccaagatcaacgtgcgaacagggttagtttctcctgaggcctctccacttggcccgcagatggccgtcttttggctgagtcctcatggggtttctgctctgactaaggacagaatccggttttgggtagaggataaacctccttttatgcggatgacattattgagccttgattttggaggcaggcgagaagaagctgccccgatggtggattcgttaattgcgcgcgtaggagtaatggctcgcggtaatgccattactttgcctgtatgtggtcgggatgtgaagtttactcttgaagtgctccggggtgatagtgttgagaagacctctcgggtatggtcaggtaatgaacgtgaccaggagctgcttactgaggacgcactggatgatctcatcccttcttttctactgactggtcaacagacaccggcgttcggtcgaagagtatctggtgtcatagaaattgccgatgggagtcgccgtcgtaaagctgctgcacttaccgaaagtgattatcgtgttctggttggcgagctggatgatgagcagatggctgcattatccagattgggtaacgattatcgcccaacaagtgcttatgaacgtggtcagcgttatgcaagccgattgcagaatgaatttgctggaaatatttctgcgctggctgatgcggaaaatatttcacgtaagattattacccgctgtatcaacaccgccaaattgcctaaatcagttgttgctcttttttctcaccccggtgaactatctgcccgggattttgccgatttcggaaccaccatcaaacaggattttcgcctgctggggcaaaccagcgtggaccgcttgctgcaactctctcagggccaggcggtgaagggcaatcagctgttgcccgtctcactggtgaaaagaaaaaccaccctggcgcccaatacgcaaaccgcctctccccgcgcgttggccgattcattaatgcagctggcacgacaggtttcccgactggaaagcgggcaggattttgccgatttcggaaccaccatcaaacaggattttcgcctgctggggcaaaccagcgtggaccgcttgctgcaactctctcagggccaggcggtgaagggcaatcagctgttgcccgtctcactggtgaaaagaaaaaccaccctggcgcccaatacgcaaaccgcctctccccgcgcgttggccgattcattaatgcagctggcacgacaggtttcccgactggaaagcgggcagtatcccaagggttactttgtccagaacacagactttgacttcttcaactatgcgggactgcagcggtctgtgcttctgtacacgacacctaccacctacatcgatgacatcaccatcaccaccggcgtggagcatgacagtgctgaatctctttgccttgaataccagggtccacctctgatgttcactgaagagtaccagaagagtctgccagagcagtaccatctgggtctggatcaaaaacgcagaaaatacgtggttggagagcttatcgggaattctgccgatttcacgactatgcagtacgctgatgacacatcaatctacatgttttatcaaaaggtcggcgacaactcaatcgacagctggaaaaacgcgggccgtgtctttaaagacagcgataagttcgacgccaacgatccgatcctgaaagatcagacgcaagaatggtccggttctgcaacctttacatctgacggaaaaatccgtttattctacactgactattccggtaaacattacggcaaacaaagcctgacaacagcgcaggtaaatgtgtcaaaatctgatgacacactcaaaatcaacggagtggaagatcacaaaacgatttttgacggagacggaaaaacatatcagaacgttcagcagtttatcgatgaaggcaattatacatccggcgacaaccatacgctgagagaccctcactacgttgaagacaaaggccataaataccttgtattcgaagccaacacgggaacagaaaacggataccaaggcgaagaatctttatttaacaaagcgtactacggcggcggcacgaacttcttccgtaaagaaagccagaagcttcagcagagcgctaaaaaacgcgatgctgagttagcgaacggcgccctcggtatcatagagttaaataatgattacacattgaaaaaagtaatgaagccgctgatcacttcaaacacggtaactgatgaaatcgagcgcgcgaatgttttcaaaatgaacggcaaatggtacttgttcactgattcacgcgccccgcagacggctgccgagcggtggagaggaaagtgtgatccgaggcacggcggtggctgcgccctggcgctgcagggctggacgctgtatccccgggagagcccgtcgcgggagtccaaggagctgggcggcctctggagcttccgcgccgacttggacagtcgacgccagggcttcgaggagcagtggtacccgcggccgctgcgggagctgcggggcaggggcgggaggcgcccggaagcccggcggtgggagggggggagccctggtccctgcaggctccttcccctgagcgccccggagctggcgccctacaggaagttaaaggtcaatgggcttaggggcgcaggcttgggggacggggagaccgggggaactggggagggccgaggcgggagaagaaggaagcgctgctgccgaaccctctcacgagacgaagggtga

SEQ ID NO: 4033 - DNA, 4600 bp, Homo sapiens
  SIMILAR (2212)..(3057): 951254mologous to Cloning vector pZC320 SopB,accession number U26464,Smith-Waterman Score=1321.
atggggctggcactggatctggactccggactgctgggtaccctcatgcctctctgcctgagatgccacaggacccagaccaaacatgccgctgcatgccagggccagcatcctagggtccaggctgaggatgtcaccttcctctaccacccctgtgcccatccctggctgaagctccagcttgccctcctggcctatgcttgtatggctaacccttccctcacccctgacttcagcctcacgcaggatcgggcactggctctgagctttgctctgcggagctggcggtctccctggcacagagaggtagaaggccagccggtcagtgagctcatattggcactcaaccagcctttccgccagctcatggtgccccgcctgcctgtgaggagggggtatggctcagacctgcagcagcagccctcacccacacccccacccacccacactgcacccttcagccgaccctcacctggcatagtcaatgggtgtgcggccattaacatcaggggagccaggtctaaagaactccaaataaaaaagcagtttcaggatacctgcaaaatccaaaccagacagtacaaagcattaagaaatcacctgctggagactacaccaaagagtgagcacaaagctgttctgaaacggctcaaggaggaacagacccggaaattagctatcttggctgagcagtatgatcacagcattaatgaaatgctctccacacaagccgcctccttggagctgctaggtgtcccaggggcagccagggtgcagcttgtgggtggggaggtgcgctcacgcaatgcgtattcactgcacactctgctcctcttagcaactacactcgagcgtgcggacaggcaacctggagacatgtctgcgcctgctctccctgggttcttcgctagccaacacaacagcctagaggatccccctccacatcaaggaaatcctcagccctgggagtggcttccccagaaacagcagccccaagcctccgagagtcagtcggagaaaaggacacactcaggcgccctggacagggatgcccgtccgacctacaaggaacgcctcgtaaaccggggtcacaccgacaaatctgaagcgggtttgccaggggagtgtacccgtcttccccagcctgtgccacccggttcacaaggatttcaatttccgaccttaaaattcgctccaacgatctcatccaaacgctgcaaacagcggcataacaaactatggagatctcattcagatagtgacctctcagaccaccacgaacccatctgcaaacctgggctagaactcaacaagaaggatatcaccacctcagcagaccagattgctgaggtgaagaccatggagagtcacccacccatacctcctgtctttgtggaacatatggtcccacaagatgcaaatcagaaaggcctgtgtaccaaagaaagaatgatctgcttggagtttacttctagggaatttcatgctggacagattgaggatgaattaaacttaaatgacatcaatggatgctcatcagggtcgactctagaggatccccagtttaatgatgacagcccggaagcgaggaaaataacccggcgctggagaataggtgaagcagcggatttagttggggtttcttctcaggctatcagagatgccgagaaagcagggcgactaccgcacccggatatggaaattcgaggacgggttgagcaacgtgttggttatacaattgaacaaattaatcatatgcgtgatgtgtttggtacgcgattgcgacgtgctgaagacgtatttccaccggtgatcggggttgctgcccataaaggtggcgtttacaaaacctcagtttctgttcatcttgctcaggatctggctctgaaggggctacgtgttttgctcgtggaaggtaacgacccccagggaacagcctcaatgtatcacggatgggtaccagatcttcatattcatgcagaagacactctcctgcctttctatcttggggaaaaggacgatgtcacttatgcaataaagcccacttgctggccggggcttgacattattccttcctgtctggctctgcaccgtattgaaactgagttaatgggcaaatttgatgaaggtaaactgcccaccgatccacacctgatgctccgactggccattgaaactgttgctcatgactatgatgtcatagttattgacagcgcgcctaacctggaggatccccgcgtaggagtaatggctcgcggtaatgccattactttgcctgtatgtggtcgggatgtgaagtttactcttgaagtgctccggggtgatagtgttgagaagacctctcgggtatggtcaggtaatgaacgtgaccaggagctgcttactgaggacgcactggatgatctcatcccttcttttctactgactggtcaacagacaccggcgttcggtcgaagagtatctggtgtcatagaaattgccgatgggagtcgccgtcgtaaagctgctgcacttaccgaaagtgattatcgtgttctggttggcgagctggatgatgagcagatggctgcattatccagattgggtaacgattatcgcccaacaagtgcttatgaacgtggtcagcgttatgcaagccgattgcagaatgaatttgctggaaatatttctgcgctggctgatgcggaaaatatttcacgtaagattattacccgctgtatcaacaccgccaaattgcctaaatcagttgttgctcttttttctcaccccggtgaactatctgcccggtcaggtgatgcacttcaaaaagcctttacagataaagaggaattacttaagcagcaggcatctaaccttcatgagcagaaaaaagctggggtgatatttgaagctgaagaagttatcactcttttaacttctgtgcttaaaacgtcatctgcatcaagaactagtttaagctcacgacatcagtttgctcctggagcgacagtattgtataagggcgataaaatggtgcttaacctggacaggtcgactctagaaggatccccgattgaagatacttcgttatcgacaccagctgccccgatggtggattcgttaattgcgcgcgtaggagtaatggctcgcggtaatgccattactttgcctgtatgtggtcgggatgtgaagtttactcttgaagtgctccggggtgatagtgttgagaagacctctcgggtatggtcaggtaatgaacgtgaccaggagctgcttactgaggacgcactggatgatctcatcccttcttttctactgactggtcaacagacaccggcgttcggtcgaagagtatctggtgtcatagaaattgccgatgggagtcgccgtcgtaaagctgctgcacttaccgaaagtgattatcgtgttctggttggcgagctggatgatgagcagatggctgcattatccagattgggtaacgattatcgcccaacaagtgcttatgaacgtggtcagcgttatgcaagccgattgcagaatgaatttgctggaaatatttctgcgctggctgatgcggaaaatatttcacgtaagattattacccgctgtatcaacaccgccaaattgcctaaatcagttgttgctcttttttctcaccccggtgaactatctgcccggtcaggtgatgcacttcaaaaagcctttacagataaagaggaattacttaagcagcaggcatctaaccttcatgagcagaaaaaagctggggtgatatttgaagctgaagaagttatcactcttttaacttctgtgcttaaaacgtcatctgcatcaagaactagttaaggacgatgtcacttatgcaataaagcccacttgctggccggggcttgacattattccttcctgtctggctctgcaccgtattgaaactgagttaatgggcaaatttgatgaaggtaaactgcccaccgatccacacctgatgctccgactggccattgaaactgttgctcatgactatgatgtcatagttattgacagcgcgcctaacctgggtatcggcacgattaatgtcgtatgtgctgctgatgtgctgattgttcccacgcctgctgagttgtttgactacacctccgcactgcagtttttcgatatgcttcgtgatctgctcaagaacgttgatcttaaagggttcgagcctgatgtacgtattttgcttaccaaatacagcaatagtaatggctctcagtccccgtggatggaggagcaaattcgggatgcctggggaagcatggttctaaaaaatgttgtacgtgaaacggatgaagttggtaaaggtcagatccggatgagaactgtttttgaacaggccattgatcaacgctcttcaactggtgcctggagaaatgctctttctatttgggaacctgtctgcaatgaaattttcgatcgtctgattaaaccacgctggagattagatgagtgtatcctctacagtaaagcctggttgtcatgcacgctatttcgcctctcatacattgagaaaaagaaaggccgccagacgactcatatcgtattttccttccgcgatatcacttccatgacgacaggatag

SEQ ID NO: 4034 - DNA, 10625 bp, Homo sapiens
  SIMILAR (7902)..(7961): 501254mologous to Plasmid F Protein A,accession number M12987,Smith-Waterman Score=40.
atgaagcgtgcgcctgttattccaaaacatacgctcaatactcaaccggttgaagatacttcgttatcgacaccagctgccccgatggtggattcgttaattgcgcgcgtaggagtaatggctcgcggtaatgccattactttgcctgtatgtggtcgggatgtgaagtttactcttgaagtgctccggggtgatagtgttgagaagacctctcgggtatggtcaggtaatgaacgtgaccaggagctgcttactgaggacgcactggatgatctcatcccttcttttctactgactggtcaacagacaccggcgttcggtcgaagagtatctggtgtcatagaaattgccgatgggagtcgccgtcgtaaagctgctgcacttaccgaaagtgattatcgtgttctggttggcgagctggatgatgagcagatggctgcattatccagattgggtaacgattatcgcccaacaagtgcttatgaacgtggtcagcgttatgcaagccgattgcagaatgaatttgctggaaatatttctgcgctggctgatgcggattttgccgatttcggaaccaccatcaaacaggattttcgcctgctggggcaaaccagcgtggaccgcttgctgcaactctctcagggccaggcgggttttacagacagccctcattacagtgatcacttgaatgacagtcgattaggagcccatgaaggcttgtccccaacacctttcatgaactcaaatctgatggtggactcttgttccaaactggaacaacactcaaccctatctcgggctattcttttgatttataagggattttgccgatttcggaaccaccatcaaacaggattttcgcctgctggggcaaaccagcgtggaccgcttgctgcaactctctcagggccaggcggtgaagggcaatcagctgttgcccgtctcactggtgaaaagaaaaaccaccctggcgcccaatacgcaaaccgcctctccccgcgcgttggccgattcattaatgcagctggcacgacaggtttcccgactggaaagcgggcattcaaacggcaatggccaggtgtctcccattttccatcagacttcatcatctactatccgatcttgttcatgtcatctactgaccctcaacttcctcactcttcagttgaacacttcagacattgctgtcttccattctacccccaaactgctcttggtaacgtcaacaatcacccacatgggcctcaacacctcccaagcacagagtgtccctgtcatcaacagtgtggccggcagcctggcagccctgcagcccgtccagttctcccagcagctgcacagccctcaccagcagcccctcatgcagcagagcccaggcagccacatggcccagcagcccttcatggcagctgtgactcagctgcagaactcacacaagttcagtcacaggagccatgggcctgggcagtcgaatgatgcctgctctgagcccaccaacaagaagatgcgccgcaaccggttcaaatgggggcccgcgtcccagcaaatcttgtaccaggcctacgatcggcaaaagaaccccagcaaggaagagagagaggccttagtggaggaatgcaacagagtatggcaggcccgtagactgggcgcttttgggaaagaggacgtccacgtttcttttgcggctcggcgcggggccaaattccgacaccagacgcttctcggcagacgcagctcgattccagctgccccgatggtggattcgttaattgcgcgcgtaggagtaatggctcgcggtaatgccattactttgcctgtatgtggtcgggatgtgaagtttactcttgaagtgctccggggtgatagtgttgagaagacctctcgggtatggtcaggtaatgaacgtgaccaggagctgcttactgaggacgcactggatgatctcatcccttcttttctactgactggtcaacagacaccggcgttcggtcgaagagtatctggtgtcatagaaattgccgatgggagtcgccgtcgtaaagctgctgcacttaccgaaagtgattatcgtgttctggttggcgagctggatgatgagcagatggctgcattatccagattgggtaacgattatcgcccaacaagtgcttatgaacgtggtcagcgttatgcaagccgattgcagaatgaatttgctggaaatatttctgcgctggctgatgcggaaaatatttcacgtaagattattacccgctgtatcaacaccgccaaattgcctaaatcagttgttgctcttttttctcaccccggtgaactatctgcccggtcaggtgatgcacttcaaaaagcctttacagataaagaggaattacttaagcagcaggcatgcaagctgtcatgagcagaaaaaagctggggtcggcgacaactcaatcgacagctggaaaaacgcgggccgtgtctttaaagacagcgataagttcgacgccaacgatccgatcctgaaagatcagacgcaagaatggtccggttctgcaacctttacatctgacggaaaaattcggtttattttacactgactattccggtaaccattacggcaaacaaagcctgacaacagcgcaggtaaatgtgtcaaaatctgatgacacactcaaaaatcaacggagtggaggatcacaaaccgatcttggacggaggcggaaaaacatatcagaacgttcagcagtttatcgagaaaggcaattatacatccggcgacaaccatacgctgagagaccctcactacgttgaagacaaaggccataaatacctggtattcgaagccaacacgggaacagaaaacggataccaaggcgaagaatctttatttaacaaagcgtactacggcggcggcacgaacttcttccgtaaagaaagccagaagcttcagcagagcgctaaaaaacgcgatgctgagttagcgaacggcgccctcggtgatcatgagagtttaataatgattacacattgaaaaaagtaatgaagccgctgatcacttcaaacacggtaactgatgaaatcgagcgcgcgaatgttttcaaaatgaacggcaaatggtacttgttcactgattcacgcggttcaaaaatgacgatcgatggtattaactcaaacgatatttacatgcttggttatgtatcaaactctttaaccggcccttacaagccgctgaacaaaacagggcttgtgctgcaaatgggtcttgatccaaccgatgtgacattcacttactctcacttcgcagtgccgcaagccaaaggggggtcctttagagtccccaaacagggatttagtctgacgtgttttctttttaatatgctgtttcgtacccgttgtcttctaaccaacataggagagacctccattcagattccgattcacacggcaacgcttttgtccaggaccccatgcttggttgtcaggaggcttacttctgaacagatggcagattctgcgtcccaagggcgcttccccccattcggcaaatataaggctggaaaccccatgcgcgtttgttccatcaaaaattggccaccagatgccatagcgcatccccattattttctcatatttgaaatacgcaatagtaaggttctcagtcccgtgggaggaggagcaaattcggaaggccgggacaagcatggttctaaaaattgttgtcgtgaaacggatgaagttgatacttcgttatcgacaccagctgccccgatggtggattcgttaattgcgcgcgtaggagtaatggctcgcggtaatgccattactttgcctgtatgtggtcgggatgtgaagtttactcttgaagtgctccggggtgatagtgttgagaagacctctcgggtatggtcaggtaatgaacgtgaccaggagctgcttactgaggacgcactggatgatctcatcccttcttttctactgactggtcaacagacaccggcgttcggtcgaagagtatctggtgtcatagaaattgccgatgggagtcgccgtcgtaaagctgctgcacttaccgaaagtgattatcgtgttctggttggcgagctggatgatgagcagatggctgcattatccagattgggtaacgattatcgcccaacaagtgcttatgaacgtggtcagcgttatgcaagccgattgcagaatgaatttgctggaaatattctgcgctggctgatgcggaaaatatttcacagctcgtgcagcacgggcctgcgtcagaattatccacgccctctccttgtccacctaccgggcggcggcctggtgcagcccacaggcccagctgcggactccttgcgcgcgttagttgctacacatacggaacactcgcgcccatcgttccgcggcgggggaacggggtgtgacaatctaaaaacttgtcacacttcacatggatctgtcatggcggaaacagcggttatcaatcacaagaaacgtaaaaatagcccgcgaatcgtccagtcaaacgacctcactgaggcggcatatagtctctcccgggatcaaaaacgtatgctgtatctgttcgttgaccagatcagaaaatctgatggcaccctacaggaacatgacggtatctgcgagatccatgttgctaaatatgctgaaatattcggattgacctctgcggaagccagtaaggatatacggcaggcattgaagagtttcgcggggaaggaagtggttttttatcgccctgaagaggatgccggcgatgaaaaaggctatgaatcttttccttggtttatcaaacgtgcgcacagtccatccagagggctttacagtgtacatatcaacccatatctcattcccttctttatcgggttacagaacccggttacgcagtttcgggttagtgaaacaaaggaaatcaccattcccgttgccatgcgtttatacgaatccctgtgtcagtatcggactcaggctcagggagatctgaattctgtcctggctggagttattggagatcctggtaggaagccccgcccaataaggaaagatgggtcagaattagacctgaagagccaccctggctgcagaacgccaaagccggatccccctcttgaagtgctccggggtgatagtgttgagaagacctctcgggtatggggaggtaatgaacgagaccaggagctgcttactgaggacgcactggatgatctcatcccttcttttctactgactggtcaacagacaccggcgttcggtcgaagagtatctggtgtcatagaaattgccgatgggagtcgccgtagtaaagctgctgcacttaccgaaagtgattatcgtgttctggttggcgagctggatgatgagcagatggctgcattatccagattgggtaacgattatcgcccaacaagtgcttatgaacgtggtcagcgttatgcaagccgattgcagaatgaatttgctggaaatatttctgcgctggctgatgcggaaaatatttcacgtaagattattacccgctgtatcaacaccgccaaattgcctaaatcagttgggctcaactctctagtatccttactccttcaagatgaaatctggcaaatatcaagagccaaactagttgtatgcttgagtaaattgcaagatttaataaaaaaacgcaaagcagtgaggaagaggatgttcaaaatgaaactcatggaaacacttaaccagtgcataaacgctggtcatgaaatgacgaaggctatcgccattgcacagtttaatgatgacagcccggaagcgaggaaaataacccggcgctggagaataggtgaagcagcggatttagttggggtttcttctcaggctatcagagatgccgagaaagcagggcgactaccgcacccggatatggaaattcgaggacgggttgagcaacgtgttggttatacaattgaacaaattaatcatatgcgtgatgtgtttggtacgcgattgcgacgtgctgaagacgtatttccaccggtgatcggggttgctgcccataaaggtggcgtttacaaaacctcagtttctgttcatcttgctcaggatctggctctgaaggggctacgtgttttgctcgtggaaggtaacgacccccagggaacagcctcaatgtatcacgggtgggtaccagatcttcatattcatgcagaagacactctcctgcctttctatcttggggaaaaggacgatgtcacttatgcaataaaacccacttgctggccggggcttgacattattccttcctgtctggctctggcccgtattggaactgagttaatgggcaaatttgatgaaggtaaactgcccaccgatccacacctgatgctccgactggccattgaaactgttgctcatgactatgatgtcatagttattgacagcgcgcctaacctgggtatcggcacgattaatgtcgtatgtgctgctgatgtgctgattgttcccacgcctgctgagttgtttgactacacctccgcactgcagtttttcgatatgcttcgtgatctgctcaagaacgttgatcttaaagggttcgagcctgatgtacgtattttgcttaccaaatacagcaatagtaatggctctcagtccccgtggatggaggagcaaattcgggatgcctggggaagcatggttctaaaaaatgttgtacgtgaaacggatgaagttggtaaaggtcagatccggatgagaactgtttttgaacaggccattgatcaacgctcttcaactgctgccccgatggtggattcgttaattgcgcgcgtaggagtaatggctcgcggtaatgccattactttgcctgtatgtggtcgggatgtgaagtttactcttgaagtgctccggggtgatagtgttgagaagacctctcgggtatggtcaggtaatgaacgtgaccaggagctgcttactgaggacgcactggatgatctcatcccttcttttctactgactggtcaacagacaccggcgttcggtcgaagagtatctggtgtcatagaaattgccgatgggagtcgccgtcgtaaagctgctgcacttaccgaaagtgattatcgtgttctggttggcgagctggatgatgagcagatggctgcattatccagattgggtaacgattatcgcccaacaagtgcttatgaacgtggtcagcgttatgcaagccgattgcagaatgaatttgctggaaatatttctgcgctggctgatgcggaaaatatttcacatttgccctgtgatgtacaattagagctgaatttctcatctcatggacaacaggaatcagaagacgtaaatgcagccaaaatcacacaggttgtcgtggcaggaagtggattctgcaaacccacattaggcccgtttatctctgtcctagagttggttaaaagagcaactgaggccagctgtgaggagcataggcccgggcggcccacttcccacatgcagttggtgcagtctgggcctgaggtgaagaagcctgggacctcagtgaaggtctcttgcaaggcttctggattcacctttactagctctgctgtgcagtgggtgcgacaggctcgtggacaacgccttgagtggataggatggatcgtcgttggcagtggtaacacaaactacgcacagaagttccaggaaagagtcaccattaccagggacatgtccacaagcacagcctacatggagttgagcagcctgagatccgaggacacggccgtgtattactgtgcggcagacacatgggccatcgccctgaaagacggtttttcgcccttcgacgttggaagtccacgttctttaatagtggactctgggtccaactgggaccaacactcaacctatcttcgggctattcttttgatttataagggattttgccgatttcggaaccaccatctaacaggattttcgcctgttggggcaaaccagcgtggaccgcttgctgcaactctctcagggccaggcggtgaagggcaatcagctgttgcccgtctcactggtgaaaagaaaaaccaccctggcgcccaatacgcaaaccgcctctccccgcgcgttggccgattcattaatgcagctggcacgacaggtttcccgcctggaaagcgggcagacaggacacttagagatatagagtctcagtccctgtcagtcacgtgcagtcacaaccatccctataagtcaggtctgacatctgaaacactcaacttgaaagcagtcactgggcaaaggagaagaaataacaatgtcatcaccttcatgaacacaactctgcattcctctcagatcttcgccttctctaaggacaaagtgattggcttttccattcccaatgttgactctgaaggcttgaagaaaaatcttgatgtggcacagctttgcctttgcctttataagagagagagactgagggattttgccgatttcggaaccaccatcaaacaggattttcgcctgctggggcaaaccagcgtggaccgcttgctgcaactctctcagggccaggcggtgaagggcaatcagctgttgcccgtctcactggtgaaaagaaaaaccaccctggcgcccaatacgcaaaccgcctctccccgcgcgttggccgattcattaatgcagctggcacgacaggtttcccgactggaaagcgggcaggattttgccgattcgggaaccaccatcaaacaggattttcgcctgctggggcaaaccagcgtggaccgcttgctgcaactctctcagggccaggcggtgaagggcaatcagctgttgcccgtctcactggaagatagaggcaccccaacctcaggaaaatgccccccggacgggtgcaaccagacgtctccacacgacacgttccacggccccccccaggctggacaaagccatcctccaagactcccacagatggacttaacactggaaacctgcaaaccacagagccattgggattttgccgatttcggaaccaccatcaaacaggattttcgcctgctggggcaaaccagcgtggaccgcttgctgcaactctctcagggccaggcggtgaagggcaatcagctgttgcccgtctcactggtgaaaagaaaaaccaccctggcgcccaatacgcaaaccgcctctccccgcgcgttggccgattcattaatgcagctggcacgacaggtttcccgactggaaagcgggcacctttgaagagagtagtggctctccagccacccagtggagatctgagaatggtcagcctgcctcctcaagtgggtccctgccccctgaagagcctaattggagggcaccccccagaggggcagcctaacacctcacatggcgggaccccccctgagccgaagctttcagaggaatgtcagggcagcaacatttgctgttcagcaatattcgctgttctgcagcctctgctgccgatactcaggcaaacagggtctggagtggacctccagcatactccaacaggcctgcagtggaggatcctgactgttagaaggaaaactaacaaacagaaaggacatccacaccaaaaccccatctgtacgtcaccatcatcaaaaaccaaagtccaaaagcaaggcatgcaagccctaagttttggttattgtggtatgaatgttgggaattacacggaggccgaaaggcgcaaagaaaaaggggggccaagaagacgcgggcagaagaacatgaaaagaaacggaggcgcaaaggaagagacttcgaagaaacgaaccggaggaacaagaaatccgtacaagaaaaacgaggagtccacaaacgccggaccagcaaacgtacaagaaggggagaaacgagagactctgcgggatatcccaacccaccaaagaacccaccagagggggattttgccgatttcggaacccaccatcaaacaggattttcgcctgttggggcaaaccagcgtggaccgcttgctgcaactctctcagggccaggcgtatgttaatgagagaaatgcccgggctgctgtagcaggagaggatggcagaatgattgctggccaggttttagatattaacctggctgcagagccaaaagtgaaccgaggaaaagcaggggtgaaacgatctgcagcggagatgtacggctcctcttttgacttggattgtgactttcaacgggactattatgataggatgtacagttacccagcacgtgtacctcctcctcctcctattgctcgggctgtagtgccctcgaaacgtcagcgtgtatcaggaaacacttcacaaaggggcataagtggcttcaattctaagagtggacagcggggatcttccaagtctggaaagttgaaaggagatgaccttcaggccattaagagggagctgacccagataaaacaaaaagtggattctttcctggaaaacctggaaaaaattgaaaaggaacagagcaaacaagcagtagagatgaacaatgttaagtcagaagaggagcagagcagcagctccgtgaagaaagatgagactaatgtgaagatggagtctgaggggggtgcagatgactctgctgaggagggggacctactggatgatgatgataatgaagatggggggatgaccagctggagttga

SEQ ID NO: 4035 - DNA, 3368 bp, Homo sapiens
  SIMILAR (1847)..(2206): 971254mologous to Cloning vector pZC320 SopB,accession number U26464,Smith-Waterman Score=585.
  misc_feature (1)...(3368): n = a,t,c or g
atgggggtatgcaaccaagttgggacgtttctcaaaataataagacctatttatgccaaacccacagcccatatcatactgaatgggcaaaagctgaaagcattccttttgaaaactggcacaagacagggatgccctctctcaccactcctattcaacacagtgttggaagttctggccagggcaatcaggcaggagaaagaaataaagggtattcatttaggaaaagaggaagtcaaactgtccctgtttgcagatgacatgattgtatatttagaaaacccgaccgtctcagcccataatctcctcaagctgataagcaacttcagcaaagtctcaggatataaaatcaatgtgcaaaaatcacaagcattcttatacaccaataacagacaaacagagagccaaatcatgagtgaactcccattcacaattgcttcaaagagaataaaatacctaggaatccaacttacgagagatgtgaaggatctcttcaaggagaactacaaaccactgcctcatcgaaataaaagaggacacaaacaaatggaagaacattccatgctcatggataggaagaatcaatatcgtgaaaatggccacactgcccaagctcctctccaggcccaagggggcccaggggaatcagctgtgctcggtctcgccgatggaaaaaaaaaccgccaacgcgtccaaatggcttttagcttctccccgagcagtggagcactcattaatcatgctggcacggcaggtttctcgtcctcgcaacccgtcactgagatcaaggctattaaaggattttgccgatttcggaaccaccatcaaacaggattttcgcctgctggggcaaaccagcgtggaccgcttgctgcaactctctcagggccaggcggtgaagggcaatcagctgttgcccgtctcactggtgaaaagaaaaaccaccctggcgcccaatacgcaaaccgcctctccccgcgcgttggccgattcattaatgcagctggcacgacaggcccccaagaacagcaccctatcgcccaagcgttccaccagcccccgaaaatactggagacaaaagctgacgtcggcagagcgctcctagtccccgtccttttggtcctcccccctttcccgaaaggccaagcgccggagctggggcgccaacgagaagggggtgagcgtgattgggctgtcctacatcacgtgacggccagtacgcgtgggatttggctccgagaaggcggaagtgcagcacagaaagggggtccgtgggggacggtagaagcctggaggaggagcttgagtccagccactgtctgggtactgccagccatcgggcccaggtctctggggttgtcttaccgcatgagtaccacgcggtactacagagaccggctgcccgtgtgcccggcaggtggagccgcccgcatcagcggcctcggggaatggaagcggagaacgcgggcagcncgggaggagggagcaaattcggaatgcctgggaaggcatggttttaaaaaaatgttgtacgtgaaacgggatgaagttggtaaaggtcagatccggctagaaactgtttttgaacaggccattgatcaacgcttttcaactgatacttcgttatcgacaccagctgccccgatggtggattcgttaattgcgcgcgtaggagtaatggctcgcggtaatgccattactttgcctgtatgtggtcgggatgtgaagtttactcttgaagtgctccggggtgatagtgttgagaagacctctcgggtatggtcaggtaatgaacgtgaccaggagctgcttactgaggacgcactggatgatctcatcccttccttttctactgactggtcacaagacaccggcgttcggtcaaagagtatctggtgtcatagaaattgccgatgggagtcgccgtcgtaaagctgctgcacttaccgaaagtgattatcgtgttctggttggcgagctggatgatgagcagatggctgcattatccagattgggtaacgattatcgcccaacaagtgcttatgaacgtggtcagcgttatgcaagccgattgcagaatgaatttgctggaaatatttctgcgctggctgatgcggaaaatatttcacgtaagattattacccgctgcatcaacaccgccaaattgcctaaatcagttgttgctcttttttctcaccccggtgaaactatctgcccggtcaggaaagtgcatggtacccactgagtcagctccccatgtcacagtgcttggctgccagtgtggccccctgggcctggagaatggtctcaaggagggatatttggggaggtctaccttagatatggaggcttggcagcccctccaggagttttatttacataatttgatcacaggacagatgtttgaaattgctgttactcagaacaattccaagatcaacagctcctcgccaacaacagaacaaagctggatggagaatgactttgacgagttaacagaagtaggcttcagaaggtcagtaataacaaacttctctgagctaaaggagcatgttctaacccatcgcaaggaagctaaaaaccttgaaaaaagcgatggggagaatggaaccaagttggaaaacacttttcaggatattatccaggagaacttccccaacctagcaaggcaggtcaacattcaaattcaggagatacagaaaacaccacaaagatattcctcgagaagagcaaccccaggacacataattgtcaggttcaccaaggttgaaatgaaggaaaaagtgttaagggcagccagagagaaagcttccttagctcctgaaaatctcgataactcaaaaatacgcccggtagtgatcttatttcattatggtgaaagttggaacctcttacgtgccgatcaacgtctcattttcgccaaaagttggcccagggcttcccggtatcaacagggacaccaggatttatttattctgcgaagtgatcttccgtcacaggtatttattcgcgataagctcatggagcggcgtaaccgtcgcacaggaaggacagagaaagcgcggatctgggaagtgacggacagaacggtcaggacctggattggggaggcggttgccgccgctgctgctgacggtgtgacgttctctgttccggtcacaccacatacgttccgccattcctatgcgatgcacatgctgtatgccggtataccgctgaaagttctgcaaagcctgatgggacataagtccatcagttcaacggaagtctacacgaaggtttttgcgctggatgtggctgcccggcaccgggtgcagtttgcgatgccggagtctgatgcggttgcgatgctgaaacaattatcctga

SEQ ID NO: 4036 - DNA, 4237 bp, Homo sapiens
  SIMILAR (1856)..(2773): 811254mologous to Cloning vector pZC320 SopB,accession number U26464,Smith-Waterman Score=1172.
ccatggatatccgcgcctgttccggtggacgtggtggagggtgcaatggactctgtgacggttcttagctttggtggtttaatgctctatttttgtgctggttggcctcctgccaggaggtggtgctttccagaaagcatcagctgtggtagtatggagagggaccagtggtgggggctccaagtagcgaagcgagcaggactggccggcggccaaagcggtcggacagtgctccgagaacgggtgcgcatagaaattgcatcaacgcatatagcgctagcagcacgccatagtgactggcgatgctgtcggaatggacgatatcccgcaagaggcccggcagctttgcagaactttcagcggtataccggcatacagcatgtgcatcgcataggaatggcggaacgtatgtggtgtgaccggaacagagaacgtcacaccgtcagcagcagcggcggcaaccgcctccccaatccaggtcctgaccgttcttgtgacaatctaaaaacttgtcacacttcacatggatctgtcatggcggaaacagcggttatcaatcacaagaaacgtaaaaatagcccgcgaatcgtccagtcaaacgacctcactgaggcggcatatagtctctcccgggatcaaaaacgtatgctgtatctgttcgttgaccagatcagaaaatctgatggcaccctacaggaacatgacggtatctgcgagatccatgttgctaaatatgctgaaatattcggattgacctctgcggaagccagtaaggatatacggcaggcattgaagagtttcgcggggaaggaagtggttttttatcgccctgaagaggatgccggcgatgaaaaaggctatgaatcttttccttggtttatcaaacgtgcgcacagtccatccagagggctttacagtgtacatatcaacccatatctcattcccttctttatcgggttacagaaccggtttacgcagtttcggcttagtgaaacaaaagaaatcaccgatccgtatgccatgcgtttatacaaataccctgtgtcagtatcgtaagccggatggctcaggcatcgtctctctgaaaatcgactggatcatagagcgttaccagctgcctcaaagttaccagcgtatgcctgacttccgccgccgcttcctgcaggtctgtgttaatgagatcaacagcagaactccaatgcgcctctcatacattgagaaaaagaaaggccgccagacgactcatatcgatctggctctgaaggggctacgtgttttgctcgtggaaggtaacgacccccagggaacagcctcaatgtatcacggatgggtaccagatcttcatattcatgcagaagacactctcctgcctttctatcttggggaaaaggacgatgtcacttatgcaataaagcccacttgctggccggggcttgacattattccttcctgtctggctctgcaccgtattgaaactgagttaatgggcaaatttgatgaaggtaaactgcccaccgatccacacctgatgctccgactggccattgaaactgttgctcatgactatgatgtcatagttattgacagcgcgcctaacctgggtatcggcacgattaatgtcgtatgtgctgctgatgtgctgattgttcccacgcctgctgagttgtttgactacacctccgcactgcagtttttcgatatgcttcgtgatctgctcaagaacgttgatcttaaagggttcgagcctgatgtacgtattttgcttaccaaatacagcaatagtaatggctctcagtccccgtggatggaggagcaaattcgggatgcctggggaagcatggttctaaaaaatgttgtacgtgaaacggatgaagttggtaaagctgccccgatggtggattcgttaattgcgcgcgtaggagtaatggctcgcggtaatgccattactttccctggtatgtggtcgggatgtgaagtttactctttgaattgttccgggggtgatagtgttaaaaagacctctcgggtatggtcaggtaatgcacgtgaccaggagctgcttactgaggacgcactggatgatctcatcccttcttttctactgactggtcaacagacacggccgttcggtcgaagagtatctggtgtcatagaaattgccgatgggagtcgccgtcgtaaagctgctgcacttaccgaaagtgattatcgtgttctggttggcgagctggatgatgagcagatggctgcattatccagattgggtaacgattatcgcccaacaagtgcttatgaacgtggtcagcgttatgcaagccgattgcagaatgaatttgctggaaatatttctgcgctggctgatgcggaaaatatttcacgtaagattattacccgctgtatcaacaccgccaaattgcctaaatcagttgttgctcttttttctcaccccggtgaactatctgcccggtcaggtgatgcacttcaaaaagcctttacagataaagaggaattacttaagcagcaggcatctaaccttcatgagcagaaaaaagctggggtgatatttgaagctgaagaagttatcactcttttaacttctgtgcttaaaacgtcatctgcatcaagaactagtttaagctcacgacatcagtttgctcctgtagcgacacctccactgctgataccaaggcaaacagggtctgaagtggacctccagcaaactccaacagacctgcagctgagggtcctgactcttagaaggaaaactaacaaacagaaaggacatccacacgaaaacctcatctgtacatcaccatcatcaaagaccaaaggtttctttaaccaaagggtagaatattcaaaaagatttctggaaaaaagtgaagatttctcagaaccatggtgtcactcatttttacaccaaatacgaatgttcccagaactgttatggtgctgtaggggcagactgacacctcacacggctgggtactcctctgagacaaaacttccagaggaacgatcaggcagcaacatttgctgttcaccagtatctcctgttctgcagcctccactgctgataccaaggcaaacagggtctgaagtggacctccagcaaactccaacagacctgcagctgagggtcctgactcttagaaggaaaactaacaaacagaaaggacatccacacgaaaacctcatctgtacatcaccatcatcaccgaccaaagtgttggaagttctgcccagggcaatcaggcaggagaaggaaataaagggtattcaattaggaaaagaggaagtcaaattgtccctatttgcagatgacatgattgtatatctagaaaaccccattgtgtcagcccaaaatctccttaagctgataggcaacttcagcaaagtctcaggatacgaaatcaatgtgcaaaaatcacaagcattcttatacatgaataacagacaaacagagagccaaatcatgagtgaactcccattcacaattgcttcaaagagaataaaatacctaggaatccagcttaaaagggatgtgaaggacctcttcaaggagaactacaaaccactgctcaatgaaataaaagaggatacaaacaaatgcaagaacattccatgctcatggataggaataatcaatattgtgaaaatggccatactgcccaagcctccactgctgataccaaggcaaacagggtctgaagtggacctccagcaaactccaacagacctgcagctgagggtcctgactcttagaaggaaaactaacaaacagaaaggacatccacacgaaaacctcatctgtacatcaccatcaccaaagaccaaaggattaggcctagcctgggaaagtcttctgagagagatcaggaatgaaagacgctatgttcagtcgtgcatggcttgctttcagagagtgggttatcagagcatgggcccatcagtcatgatgatggatttatgggtcaagagatatcctggaaggagatatgtcacccacaccgcggctcgcttacggttggagaaatcaaggccctaccggggccacctctctgttgtgggcgtggacgaggctggggtgagcctgccggagctgcagttgccagcgacatgttcaagagtctgtgcagcaccgaaaaaggactcacctcccaaaacttccgtgaaggttgacgagctttcgcgagggcaaatcgcagtgtgtggaggagtcaaggaaccagcttga

SEQ ID NO: 4037 - DNA, 2577 bp, Homo sapiens
  SIMILAR (343)..(951): 1001254mologous to Escherichia coli K12 putative oxidoreductase,accession number AE000165,Smith-Waterman Score=1024.
atgcagaggctcatgatgctcctcgccacatcgggcgcctgcctgggcctgctggcagtggcagcagtggcagcagcaggctcaagccccaggacaggagaagccatcagcagctggcccatagtgacaagtggtggtggtgatggcgatggtggcaaaggtggtaatagatattgtggtggttgtaggagtggagatgataagggtgaaggtggtagctatagtggtagaggtcgtggtggtagaagtagtggtggtaatggtagcatggtggtggtagtgatagtgatggtggtgagaatgggagaggccaggtggtggtgggagtacggagtgtgggaggtggaaccggagattatcctcaatgcaccgcaacaatatctgctggcggggatcggtgacacgctggcgaaatggtatgaagcggtggtgctggctccgcaaccagaaacgttgccgctaaccgtgcgactggggatcaataatgcgcaagccattcgcgacgtcttgttaaacagtagcgaacaggcgctgagcgatcagcaaaatcaacagttaacgcaatcattttgcgatgtggtggatgctattattgctggtggtgggatggttggtggtctgggcgatcgttttacgcgtgtggcggcagctcatgccgtgcataacggtctgaccgtgctgccgcaaaccgagaagtttctccacggcaccaaagtcgcctacggaattctggtgcaaagcgccttgctgggtcaggatgatgtgctggcgcaattaactggagcgtatcagcgttttcatctgccgactacactggcggagctggaagtggatatcaataatcaggcggagatcgacaaagtgattgcccacaccctgcgtccggtggagtccattcattacctgccagtcacgctgacaccagatacgttgcgtgcagcgttcaaaaaatacagccagagctgcttcgtaatccggctcggtggtgatttcatccaccagctggctgaaaatcacattgtcattttcgtcaataaccacaacggcacgcgctgccagacctttcagtgggccatcagcaattgccacaccgtaagcttgcagaaattcagcgtacgaaagttcctgagtgatttgtttgctatcgggggccgtcgcggcgtacgccccccaactgaggcaccaggccatcagaaaagtgataatcaggcgcacgtcagcgtttcctttgatggattagacctggtcttttttgtcgtcaaccaatgggctggcgtcgtgttctgcttcgatctcttcagcaggaagcggggcaggttcagcgtctggcgtaacaaaggtttcggtagatactgccagcggctggccaattttcgtgacagacaggctttccagttgctcaaccagattcactttacccggtgcaaacaggttgataacggtggaaccgagtttaaagcgacccatttcctggcctttcagcagtgccacagaaccgtcgttttccccggcaggccagcgattaagacgcgcgtggaacgactggataggtaccgaaatcggatggaaaagtccaatggacaagcgaatctaagagtccacgggggcacgtgggagaaactcgttctccaacttgactccgccggcatggtcaatagggtttcatccgtaggggcgcccctaagagaacccattcctacggaaggaaaaggcgcgaaggaagatacttgggggaatctctccagcaacgacccccttcttgaagcgtttggaggtcagttcggaattgctatttcgatgcaccagactttagctacaagggggggaaagcgcaacgcacgaccaaccacaaggccacgcttccaccgtgggaccaaccccagggggatagccccccacataggcacggccaatgctcgttactcaaccggccactgtccggttgcccttcccttcggcctccgggggcctccactggcgcgcgagaatgttgctacagccacaaaaggccacgaaagtgcgtcaagggaaacggaggtggtggccgtcgctaaactgaccagtcgcgtgctgctgatttgtgatgcgacccacgcgctgccaatccaggtgctgcgcaacgatatccgcgtaattgcagccggtaacggttgtacggatgatttgcagcttgagcatctgccggcgaatacggatattcgtgttggtaatgtgctgtggaaagtgggcgagtcggcgtgggataacaacaagattaccgatacgctgaaggcgctgccaacctatggtccgctgctgcctgccgcagtcaccagcgccaatcctcagcaagcgacggcgatgctggcggacgggtcgaccgtcgcattgagtatggaaggcgttcgctgggcgcgtccttaccgttcggatactcagcaaggaccgacgccgcgtaaagtgaccgatgttctgcaaacgggttcaagtggccccacaaaagtcccaatgtgccctgcagcttgggccgactatatgttgccaaccatttttgtagacacaaaattgggccaccagaagtccaccttccaaggctaa

SEQ ID NO: 4038 - DNA, 536 bp, Homo sapiens
  SIMILAR (1)..(534): 981254mologous to Escherichia coli CG site No. 872,accession number U00039,Smith-Waterman Score=854.
atgcgtctggcacctattggtgcgttcggtgcaatggcgtttaccatcggtaaatacggcgtcggcacactggtgcaactggggcagctgattatctgtttctacattacctgtatcctgtttgtggtgctggtattgggttcaatcgctaaagcgactggtttcagtatcttcaaatttatccgctacatccgtgaagaactgctgattgtactggggacttcatcttccgagtcggcgctgccgcgtatgctcgacaagatggagaaactcggctgccgtaaatcggtggtggggctggtcatcccgacaggctactcgtttaaccttgatggcacatcgatatacctgacaatagcggcggtgtttatcgcccaggccactaacagtcagatggatatcgtccaccaaatcacgctgttaatcgtgttgctgctttcttctaaaggggcgggaggggtaacgggtagtggctttatcgtgctggcggcgacgctctctgcggggggccatttgccggtagcgggtctggcgct

SEQ ID NO: 4039 - DNA, 1452 bp, Homo sapiens
  SIMILAR (514)..(1065): 971254mologous to Escherichia coli pot. PBP 1A,accession number X02164,Smith-Waterman Score=938.
atgctgccgcctattcctggcgacccgattatcgcccacgtcagccccggtaaaggtctggtgatccaccatgaatcctgccgtaatatccgtggctaccagaaagagccagagaagtttatggctgtggaatgggataaagagacggcgcaggagttcatcaccgaaatcaaggtggagatgttcaatcatcagggtgcgctggcaaacctgacggcggcaattaacaccacgacttcgaatattcaaagtttgaatacggaagagaaagatggtcgcgtctacagcgcctttattcgtctgaccgctcgtgaccgtgtgcatctggcgaatatcatgcgcaaaatccgcgtgatgccagacgtgattaaagtccacaaacctcataacgtttctgcgattattcgtaccgcagatgccgttggcgtacatgaagttcacgccgtctggcctggtagccgcatgcgcaccatggcttcggcagcggcgggtagtacagctgggtcagattgctttctctgcgccgtactgagccaaatggtgcgccaggagatgtataaccgttatggcgaaagtgcctatgaagacggttatcgcatttacaccaccatcacccgcaaagtgcagcaggccgcgcagcaggcggtacgtaataacgtgctggactacgacatgcgccacggctatcgcggcccggcaaatgtgctgtggaaagtgggcgagtcggcgtgggataacaacaagattaccgatacgctgaaggcgctgccaacctatggtccgctgctgcctgccgcagtcaccagcgccaatcctcagcaagcgacggcgatgctggcggacgggtcgaccgtcgcattgagtatggaaggcgttcgctgggcgcgtccttaccgttcggatactcagcaaggaccgacgccgcgtaaagtgaccgatgttctgcaaacgggtcagcaaatctgggttcgtcaggttggcgatgcatggtggctggcacaagtgccggaagtgaactcggcgctggtgtcgatcaatccgcaaaacggtgccgttatggcgctggcgttgttaaataacgcccgcccttggtatttgggcgcccagcccagggattccacaatcattttttgccagtttggagcccacccacttcttgacccaaaaacccagccggttgggtgtcgtaatgctgcccggaaaagttgcgcggaaataaggttggttccagacgcccgcgcgaattccggcaaacttgttcgccgctatcgaaaataccgacgccagtaccacaaatcaaaatcccgccatcaacctctccgccagcaacagccagtgcgacttgactggcgtaatgtggataatcagtacgctctgacgaccaggttcctttatcaatcacttcaacgccacgctcaactaaatgtgccactatttcatgttttaaaatga

SEQ ID NO: 4040 - DNA, 2526 bp, Homo sapiens
  SIMILAR (954)..(217): 941254mologous to Escherichia coli L-arabinose-binding protein precursor,accession number D90832,Smith-Waterman Score= 1190.
ttaatgacaggcgatgacacgttcttcattgagaacatctatcgcagctgcgatagcgtctctttgcaggttattattcacgttattattccgccgaaaccggctttccacattgtttactggcacaaaagtgtttacaccctgcgcggttttcttttcgatgagtagcgggataatgacactcagggcatcggtaccgtgatcagtacacgtcggtacttcggtaaattttggcggttcaacgtcttttgctacccagttgtaaagcatttcgctggatttatagccatgtacgtccgggcttggcagcagggaaccgtagaagccggttgcctgtgctttagacagttcgctcaccgcatccacaccgttaatgccaatgccgatgatatcggccgctttaaagccctgaccttccgtcgcgcgtacgccgcccagcacggtgctgtcgttcataccgacgatcagccaatgtttaacttccggatgttgaaccagcattgagttggcagcgtcaaatgcccccgggatgtcgttagatttggtaggtacctgataaatttgtttttccgggaatccggccgctttcagcgcatccatagatcccgtagtacggcggcgggcggtatccagttcgttggcggtaatcgccatcaccgcgctttctttgacatcccagccacgtttctgcatctctttatacagttcctggccctgacgttcgccaattttagtcgccgccatcatcaccagcggaacggtatccattggcttacctttggcgttaacaaactggtcatccacggcaatgactttcatatcgtagccacgcgctttcgcgacgatggcagagccgagtttggggtccggagtacaaataacgaaaccttttgcgccactggcagccattggtctggcagccgttatgtcacaatccggctcagtggtttcgatgcctggacggaactcgcgctcaatcaccgcatcgttgcgctcatcgaacaattcagacaccacgccggagtcacggtccagaccgagcgccagctgcgtcatatcgtttgagccaattgagaagccgtcgaaatattcgaggaactgctcggccagcaaggcgttggacgggatttcacacatcatgatgattttcagcccgttctcgccacgtttcagcccctgacgcgccagttcttcaaccaccgctttcgcctgatctacggtacgcacgaacgggatcatgatctcaacgttggtcagtcccatgtcgttgcgcacacgtttcactgcttcacactccagcgcgaaacagtcgcggaagctgtcggaaacatagcggcccgcgccacggaagccgagcatcgggttctcttcatctggctcgtaacgcaccgaccaggttggcatattcgttcgatttaggtccagcacgttattacgtaccgcctgctgcgcggcccggcaaatgtgctgtggaaagtgggcgagtcggcgtgggataacaacaagattaccgatacgctgaaggcgctgccaacctatggtccgctgctgcctgccgcagtcaccagcgccaatcctcagcaagcgacggcgatgctggcggacgggtcgaccgtcgcattgagtatggaaggcgttcgctgggcgcgtccggtgctgccagtaccgcgccattcggttggctccacaatggttcgtgttgcgctggcggttatgcgccccgggatgtgccgacatggcgacggcgaaaaagaccagccccaagcgatgggtgcgcatcaaaaacatgcagcccatcaggatcggtccggcgatgatcaatcggatcaacggttcgccgtatgaccatttgtagatcaaaaacaggctgccgatctccagcaccgtggcaaccacaaacaagatagcgccagcttctgtctcggtgtaataacgtttgtttttccccgccgttagtagcgactgcagttttttctggctttgtgttttggtcattaatggggtgagtgtgcggatcaccgctgccatgtattcctgagctttcgctttcgcggctttttgctctggcccctggatgggtagccaggtcatttgaatgcttttgatttttaaggtaccgcgctccagcgctgtagaagcatacaagttctcattaattttacttgcagcacgagtgagattggctttgtcgggactgctgtcgatggcacgaaattcgttcagtggcaggctgggattctggctgttaaagtcttctcgaaactggctgatggagagatcgaaagtaggggctccagccagcagataaggcgcggtcgttgccgtatcggttatcgttatgggtacatcgagtgttgcaaatgttttcgtaacggcaatacgtggatctttcgccaactcttcctcgtaagacttcagcgctacgcctgcgatccggttgccggacaggtacaaatcccgtgcattgaacgtaatgccaatctccccctgacagccgacttccgcgccagagatggaggcgttcat

SEQ ID NO: 4041 - DNA, 1578 bp, Homo sapiens
  SIMILAR (1578)..(802): 921254mologous to Escherichia coli K12 putative amidase,accession number AE000365,Smith-Waterman Score=1199.
cgcttttttctatcacgtcgatgtcgcggctgtaggagttcacaagctgtccgccattgcgcccgcttgcgccaaagccgatgcgtgaggcttcgagaaccactacgtcaaagcccgcttccgccagatgcagcgcggaggagagcccggtatagccgccgccaaccacgcaaacgtcgcaggtgattgactcattcagcgtgtcgaatggtgcatatttattcgcactggcggcgtagtaacggctttcaggcgtccggctcatgcggtgcgcgcgggagaggtcgcgcgtccataccgccgcgccaaggccgtactggctgtcgttggcaagctgtagcgcctgttcttctgatgtgaaacgcgtgaccaccagcaccggaccgaaaatctcttcgcgacttaaggacgcattcgggtccacatccacaaagatggtcgggccgatggcggcagccagcccggcgttacggccatccaacaacagttgccctttgctttcgccttcccgaattaaagctattgaaccgagtcggcgtgggcgcagtcgattaaggtgcccatggtggttgcgggatcaagtggatggcccggctggccgtttggccgctcttcctcaacgttactgataaacgccgtttcgaccagaatggagggaatatctggtgcctttaatacggcaaacccggcctgttcaacttgatttttatgcagcttgttgattttaccgagcttattcagtaccgctttaccaaacttcaggctgtcggcaatggtcagcgactgtaccatatcgaacatggtgtggtcgacatagcggtcaccgactggtcttgcacccctttggattgagagcgcaaacacagaggaaccgctcggctgacgactggtaaaggcgtcggcatggatagagacaaacaggtcagcacgctgtttctgggcttttgctacgcgcacttgcaatggaatgaagatgtcttcattgcgcgtcatgtacaccttcatattgccctctttctcgatcagagagcgcaaacggcgagctatttgcaataccacatctttttcgcgcgttttgtatttccccaccgcaccggagtcttcgccaccgtggccaggctcaagcataatgacaatcggacgatcgcgccctgctttacccggttgtggaccactttgcgctggcggcacctgcttttcgaggtcgcctttgttgtaatcctccagcagcgccagcagcgggtcctgcatatcctgtgcattggccggatagaggtccatcaccagacgctctttaaacccggcgaccggcgcaagggcaaacagctgcggttttacgttttgctttaattcaaaaaccatccgtacggtttgcgggtcaaattgcccgacgcgcgccgacttgatgaacgggtcgtctgcacgaatttgtgccgccatccccttgagtaccgagttcaggtttacatcttcgatatccaccaccacgcgttcagggttactcaacgcgaactgcttatatttcagctgacgatttgattccaccgtcacgcgggatgttaggctcaatagccacat

SEQ ID NO: 4042 - DNA, 1387 bp, Homo sapiens
  SIMILAR (1)..(462): 531254mologous to Escherichia coli pot. PBP 1A,accession number X02164,Smith-Waterman Score=336.
atgcgccacggctatcccgcccgggcaaatgtgcttgtgaaagtgggcgagtcggcgtgggataacaacaaagattaccgatacgctaaggcgctgccaacctatggtccgctgctgcctgccgcagtcaccagcgcaatcctcagcaagcgacggcgatgctggcggacgggtcgaccgtcgcatgagtatggaaggcgttcgctgggcgcgtccttaccgttcggatactcacaaggaccgacgccgcgtaaagtgaccgatgttctgcaaacgggtcagcaatctgggttcgtcaggttggcgatgcatggtggctggcacaagtgccgaagtgaactcggcgctggtgtcgatcaatccgcaaaacggtgccgttatgcgctggtcggtggctttgatttcaatcagagcaagtttaaccgcgccacccaggcactgcgtcaggctggagcgcatctgcctgcacatagccagagtggccatcatcagcaaaccgcccgctaaaagtcgaatttttgtgcccgcatgtgaacccctgatcaactatcctggtaataaaaaaactgcccgtttcgtctttcacccacttagcaacgacaatggtcgctacgccgttaccgaccagttagtcagcgcacgagcttctgacataaagcgggtcgataccgaggatagcgccagacccgctaccggcaaatggcccaccgcagagagcgtcaaccccaggacgataaagccactacccgtaaccgtgcgccggtccggctataggggggaggagaggcggggggacggagaggagagggaggaggaagaagtcgaaggcaacgggctggaacaggaagcttaccctttccgattcgccagagcgatgccctggcacatccccagcgacctaccatcagtacccgccggctacgcgatcaacgcctgtccccaagtcatccccagtagaagcaactacaaccaccggcccggtaccctacagccggccgtaatagcgcccctaaaccaaactgagcggccaccactgaccgcgaccacagggcacctatcggctgccccacgggctcggtccatagctttatcgggaagcgagagcaaaggcaactgttgtgatgccgtaacgccggcttgctgccgccatcggcccgaccatctttgtgatgtggacccgaatgcgtccttaagtcgcgaagagattttcggtccggtctggtggtcacgcgtttcacatcagaagaacaggcgctacagcttgccacgacagccagtacggccttggcgcggcggtatggacgcgcgacctctccgcgcgcaccgcatgagccgacgcctgaaagccggttccgtcttcgtcaaaactacaacgacggcgatatga

SEQ ID NO: 4043 - DNA, 551 bp, Homo sapiens
  SIMILAR (117)..(539): 321254mologous to Homo sapiens subunit of RNA polymerase II transcription factor TFIID,accession number Y11354,Smith-Waterman Score=105.
atggcgggctgcaggtcccgagccctgtcccacggggaggcagctgaggcccggggagatttggcgtgcagcgccgctgctggcccaggtgctgagcccttcactgccccgctggcgctggccggccgctccaagtgcggggccgcggagcccgcgcccacccagaactcgcgctggcccatgagcccacacctctccctccacgcctccccgcaagcagagggagccggctccggcctcggccagcccccagggcagcggctggctgaagggctcctcaaatgcggccggagtgggcgccgaggcggaggaggcgccgggaccctgagaaccctgccggcacccagcaccccatgccagccagcaccgctacggctgccatccatcagggctgaaccctgccggcacccagcaccccatgccagccagcaccgctacgggtgccatccatcggggctgaatcctgccggcacccagcaccccatgccagccagcaccggtacggctgccatccatcgggggtgaaccctgccggcccccagctccccatg

SEQ ID NO: 4044 - DNA, 1029 bp, Homo sapiens
  SIMILAR (253)..(378): 541254mologous to Homo sapiens Human secreted protein, SEQ ID NO: 6434,accession number G02353,Smith-Waterman Score=88.
atggctcaggagatagaaggagatcggttgtttcgggcccgtttgacccgtcgggttcaagggaaaggcccttgtggcccgttgaaggctcctctggggatggtccctgaatgccactcggtcaaaccgtctcgagatactttcgactctacaaaatcatttaaggcattactactgagtttcttgaagatacccgccatagatgtccataagcccattgaccacccaatcaactttacgtttccagaccctgggcatcgagccccggcacgtcaccgtcactcgaccgctgccgctgtcaccatgtcaccatcggggccgctgccgctgcaccatcgccttgttcccccatcccccgccatggctgaggacctctccgggccacatcctactgccccgtctcctggaaacagaagcaaaactctgtctcaaacaaacaaacaaacgaacaaacaaaaacagcaaaagcggagggtgctagaagtagggggcctagaaacaaaattccggggctccctccggggccgcggtctgggctgcgcatttggctgccgcctcctcgcgaaggcagtggcttccaaactcctgcgcgcggtcatcctcaacccccctgctcgggcaagggcaccgagtgccagagcatcgcccagaacttggcttccaggatttctccagtgggcacttcttgtgggagaacatcaagacaaactattcgcgttcggaaataagcctggtcgaagggggtacagcagttcatctgagatatgggtgagcgtggaagcggtatccctcgtagttctttgttttttagaacctagcggccgaacgcggatcgaccacgtattacttaccaaggagtacacctcgtgcgtcaacccaagtagtgcagtcttccgcgcctgcacgtcagcgtcgtccaattttgaccgccgaaaagatttgcgcgttaatcgcctggagcaccatatcggtaccgatcacttgggtcgacagtgggtgcatcgccgtagtcgcccctgcccgtggtag

SEQ ID NO: 4045 - DNA, 2160 bp, Homo sapiens
  SIMILAR (364)..(1386): 991254mologous to Escherichia coli BexD protein homolog,accession number D90735,Smith-Waterman Score=1731.
atgaatgatgtagacagggttgggggcaaaaatgcctccctgggtgaaatgattactaatctttccggaatgggtgtttccgttccgaatggtttcgccacaaccgccgacgcgtttaaccagtttctggaccaaagcggcgtaaaccagcgcatttatgaactgctggataaaacggatattgacgatgttactcagcttgcgaaagcgggcgcgcaaatccgccagtggattatcgacactcccttccagcctgagctggaaaacgccatccgcgaagcctatgcacagctttccgccgatgacgaaaacgcctcttttgcggtgcgctcctccgccaccgcagaagatatgccggacgcttcttttgccgcatgtacccttgttcctggtcagaatttatcgaccagtaacaaggatgtcattgaactacctgacaatcagtatgacctggacaaaatggtcaatatctatcccgtcacgccaggattgattgatcagttgcgcgccaaaccgattatgtcgcaggctaacccggagctggagcagcaaatcgcaaactatgaatatcgtatcgggattggtgatgtgttgatggttacggtctgggatcacccggaactaaccacccccgcagggcaataccgtagcgccagtgataccggcaactgggttaacgccgatggtgcgattttctacccctatattggtcgcctgaaagtggccgggaaaacacttacccaggtacgcaacgagattacagcgcgtctcgattcagtcattgaaagcccgcaagtcgatgtcagcgtcgcggcgttccgatcgcaaaaagcgtacgtcaccggcgaagtcagcaaatcgggtcagcagccgattaccaatattcctctgaccatcatggatgcgattaacgccgcgggcggtctgaccgcagatgcagactggcgcaacgtggtgctcacccagaatggcgtaaagaccaaagtgaacctctatgcgctgatgcagcgtggcgacctgcgccagaacaaactgctgcacccgggcgatattttatttattccgcgcaacgatgatctgaaagtcttcgtgatgggtgaagtgggtaaacagagcacgctgaaaatggaccgcagcggtatgaccctggcggaagcgctgggtaacgctgagggtatgaatcaggatgtcgctgatgcgacggggatttttgttattcgtgcaacgcaaaacaagcagaatggcaaaatcgccaatatttatcagctgaatgcgaaggacgcatcggcaatgatactcggaacggaattccagcttgaaccttacgacattgtttatgtcactaccgcgccgctggctcgttggaaccgtgtgatttctctgctgaaaaaacttgagcgtctaacttcgattgccataaccttgccgggaattattgatacggaaaatggtattgtacatcgcatgccgttctacgaggatgtaaaagagatgccgctcggcgaggcgctggaacagcataccggcgttccgggcgaggcaaaaggccttgttggtgcccccccgggggcgcgcgatgtgattcaggtggtatcgatccccaacgtggggcgggcggtcattccgaatggtcatctgctaccgcaaggcagcagtagtctcgtggaaatagcccacacacagggcggaccccttatggggaaacgctgttattgcgggaatcacggctgcctcgaaaccatcgccagcgtggacagtattcttgagctggcacagctgcgtcttaatcaatccatgagctcgatgttacatggacaaccgttaaccgtggactcattgtgtcaggcggcattgcgcggcgatctactggcaaaagacatcattaccggggtgggcgcgcatgtcgggcgcattcttgccatcatggtgaatttatttaacccacaaaaaatactgattggctcaccgttaagtaaagcggcagatatcctcttcccggtcatctcagacagcatccgtcagcaggcccttcctgcgtatagtcagcacatcagcgttgagagtactcagttttctaaccagggcacgatggcaggcgctgcactggtaaaagacgcgatgtataacggttctttgttgattcgtctgttgcagggttaa

SEQ ID NO: 4046 - DNA, 3639 bp, Homo sapiens
  SIMILAR (3210)..(2560): 991254mologous to Escherichia coli K12 putative enzyme of polynucleotide modification,accession number AE000169,Smith- Waterman Score=1158.
ctaaagtgatggacgacaggtccaacgcattgctggaccgctttctgaatcgtgcgcattcatcaatgacttttttggtagtctggctggtcgaagattgccgaaccggcgacgaacatatccgcgcccgccgcagcgatttcgcgcaatgttgttcaccttcacgccaccgtccacttctagtcgaatgtcaaagccagactcgtcgatacggcgacgtacttcgcgcagtttatccagtgtttgaggaatgaaagactgaccgccgaaaccaggcttgacggacatcagcaggatcacatccagcttatccatcacgtaatccagatagctcagaggtgtcgccgggttaaataccagacccgctttacagccattttctttaatcagttgcagcgtgcggtcaacatgctcggaggcttctggatgaaaggtaatgatgctggcaccagcggcagcgaaatcaggcacaatgcgatcgacgggtttcaccatcaggtgtacgtcgataggggcggtaatgccatagttacgcaaggatttcagcaccattggcccaatcgtcagattgggaacatagtggttatccatgacgtcaaaatgcacgacatcagcgccagctgccagggcttttgcggtatcttcacccaggcgggcaaaatcagccgacagaattgagggggcaatcaaatactgtttcatccgcttctccttgagaattattttttcgcgggtgaaacgactcctggtttgtacaaagccagcagttcgtccacgtgtgccgccgttgctgcttatactgcgtcgaactttgacgacatgcaattttgcgcgctgataccactcacgcgttaacatcgtatcgtgattggagatcagcactggaatatggcgctcaaccagaccttcggcgatctccgccagatgcgcttgttgttcaagcgtaaaactgtttgtgtgatacgccgtaaagttggcggtcgcagacagcggtgcataaggcggatcgcaatagacgacggatgcatcatctgcgcgcgccatgctatcggcgtaagactcacaatagaaaaaggcattctgcgctttttcagcgaagtgatacaactctgcttccgggaaatagggttttttgtagcggccgaacggcacgttaaactcaccgcgcagattgtaacgacacaggccgttgtaaccgtagcggttcaaatataaaaacagtaccgcccgacggaacggatcctggctatttgttgaactcaggtggtgtttatcacttccgcatggggccttggtgagatggtcgtgcagggtgcggttaacccggatgagttttacgtgcataaaccgacactggcggcgaatcgcccggctatcgtgcgccgcaccatggggtcgaaaaaaatccgcatggtttacgcgccgacccaggagcacggcaagcaggttaaaatcgaagacgtaccgcaggaacagcgtgacatcttctcgctgaccaacgaaagaagtgcaggaactggcacaacaggccgtacaaattgagaaacacctacgggtcgccgatggatttgagtggggaaagatggccaaccggtaacggccatgtccaggccctccgaaacaggtgcccagaggccagacagcaccgtatgcgcattccgggtagaatattgccaaggccgataggacgcatggcgggaccgaaaacacgaatcgaacacacctccgtgacagtgataagtaaccgcagaaagataaaaactgagaacaggggacataagggatacgaagatcgcaagttacacgaagatcttcaattgcgccaccaaagtcattaatggcgtaaaaatgcacttttgcagaattcgctttgccattaaggccattgactttcatgacctcatcactaaatggtgcaatcattttcacatcaatcggatagcgtttaccgctagcttctaaatcaccactgctaaaagagacgtagtaaggggttggattggtcactcgtaatgacgccttaccttctgaacctgaccagaaccacttcagggctaacggggcttcagagggatttcccttcaatccatccgggcgatagaaaagttttatacgtgtgcgaaatgccagttgcagcaggctttgattcgcgaccttttctgcatctggttttggtggaacttccagtacgttaaaccagaacacgctctctctgtctttaggcagtgaggtgctggctgtgtacattaatttgattgtttgcccacgtttggcatcaatacgcgatactggcggcgtagcagtaaaagggactgtaatactgccaggctcagcgttgtcatcgccagtatctaaccaactctggacaagcaacgggttattccctttattttccagacgtacgttgacacttttttgatcgcttttatatattacgcgagtacccgaaatgacaatgtccgcaatagacgatgaatgataagtaatggtgtatgcagtgttagtttttacataaccagcagttgctgtttggtctgcgacggcacgaacgtaagacggtcctttgtgcaaaaccatctcgaccagtgaacgccccagcgcagagagtttttcatcgctgagtatttcgtataaatgaaaacgcgtacgggcgctgtcgccggggacataaagtagcggttttccctgatcgttaaccagatcacgcgcttcaatcatcatcaccagtaatgggtaataatcgacccgatgctgacggcaccattgcaacattaaagcatccgcctgggtggagggatactcgcgccagtagtcacaaagttctgccaacaggctttcgccttctccacaatagacgcgttgcgcgtattcataataaggcgcatcttcattatcaggttcagtttcccgccatgactgggcgtaatccagaagttcggggatatccaggcgacctgcgctataccagcggagtaaatttctgtgcagttttgcatcatcggggataatcactgcgcgatgttgcgctaaatacaatgtcagccattgtggatgcgatgaccaaatccgagcgaacatttggtaaaaatcgatggtgtcattttgcacggcaacgggcagatgcagaatggtctggaagttaaaaacattccccttcgcaatggcatataacaaggattccagttcttcttcgtctatttccccggtatttcctccgatttctgccgcctgagtcattaaacgcagatggcctaagtgcaatggtgtttcacgcacgcagagcaccaacgggcgacgctctttcagcaccacatctgccgcacgggtcagtaagccatcagtatagctatggacaatgccggaaagggttttgattgaacagggtaaaatcaccatccccagcgtctggaaagaaccggaagagatgctggcggcaatatcgcgcgcatcgtgcgtgacatcggctaatgcctgcacttcgcgcagagaaaaatccgtttcgagggataaggtctggcgcgctgcctggctcatcaccagatgcgtttcgatatctgtgacatcgcgcagaacctgtaataagcgcacgccataaatcgcgccgctggcaccgctgatgcctacaatgagtcgtttcat

SEQ ID NO: 4047 - DNA, 6285 bp, Homo sapiens
  SIMILAR (5181)..(4141): 991254mologous to Escherichia coli asparagine synthetase B,accession number J05554,Smith-Waterman Score=1814.
tcaggtttgaattgcctggttggccaggccggaactgaacccctgctgggtctgacccccgaaaagtggacagttaacacgaggcatataggtctgattccgatattcaattggagtcagaccttttaatttcaggctaattcttctgctgttgtagtattcaatatattccgtaacagcatccttcagttcgcttatattactgaactcatcaagataaaaacactccgactttaaggttccaaagaaacactccaccacagcattatccagacaattgccttttctggacatgctttgtttaataccatgttctttaaggatattttgatatcttctcatacgatactgccatccctggtcagagtgcagaacaggatgctcgtgaggattaagctttttgaatgcctgatcgagcatattctcaaccatgttcatcactggtctttccgaaaggctgtaagaaataacttcgttgttgaagagatctattactggagacaaatacagcttgcgcccattgactgcaaattcagtaacatcggtaacccacttctcgtttggccgcgtagccttgaaatctctttggagaacattaggggcggtttgccctacctctcctctgtaagagcggtatcgcttgaccttaatcgctgctttaagtgagagggttcccatcaggcgctgaacagctttatggttaatctgtttcccttctcgatgaagagacagcgttaccctacggtatccgtatcgggctctattctcgtggattaatctcactaattcgctgtactcgtgctttgcgtcctttatctttgccagtgtcaactccctcacattcttctgctcgctgttccttcgcgggataatcgcgccgcgatactgaataacggtacttgcggtcaggtgcccacgtttcgccgcgtcttccgcgctgccgcctgtcagacgtaccgccagataaccggcactgaaagagtcgccagctgcggtggtatcgatcactttttctttcggcagtttcaccgccggaacatccactaacccttcgccagcaatggacaccaggcaagaatccgccccgcgtttcaccaccacttctttcacgcccgcgttatgggtgcgcgcaatgacgtcttccaccggctgttgaccccacagcgcgtcttcgtcgtccagcgtcaggaaggcgatatccgtgcattccagcatttgttggtacacctgctgtgtctcttctttgctggcccacaggcgcggacgatagttattgtcgaaaatcacttttccgccgttggcgcggcattcgcgcagcaggaaagcagcttttcgcggctggtcgggctgacgggcgatatagacggaagtgttcagggtatcgccgccgaaaccgcgcttaacgtccgcgcctttctcggaaagctcaatcatgcattcgccaatcacggcaatctttttggacatagtcgtgaacctgatcagcccgttcgctttacgcaaacggaagcagttattggcatctatggtgatgatgccggcggcatcctgaccgcgatgctgaagcaccgttaaggcatcataaatcgactggttaaccggcataacaccggcgataccgacaataccgcacatacgtctttttccgaaacagacgcccagcacccgatcggtgcctgacaaccccgttttctccaccaactggcctatcacgaagttcacgatagcaccaacgatcagggtagcgataaacagtaccgcgatggcaatcccatttcgaaccagttcgtcttcaaagcccgtaaaccagacctgcagtttcgggtgatcgctgagatatttcagggaggctttgtagtcttccagcaacagttcagcaaagtccatttcgaagccgcgacgacacataatgcgcatcaccacgatgtcggtggcttcaccgccgagagtgaaggccggaacctgccagccgcgcagacgcagacgttcagagaggtcatacagggtgtatcccggatcttcaccatctttcagtttgaagcaaaacgcccggattgcttcgtcgggcaaccgtttctgccgccgttggcgtttgcactgttttatccacgaggatttgtgatggcgctgggttacgccggtgtggcgctggcggtactggcattgattatcccttcgctgttgaccactaccgcacgggcaaggatcgttacgccccggtttctcttctgctttgatcggttgctgaacagctttttcctgcggatgcgccatccagtacgcatgtagatcaagcgccgccagtcgaatggcatctacgctctcttcaaacgcttctggcgacatcttttctacccgctcgaagttttcctcagtaccgtgcagcgcaatcgcctccagcgctggttttaacgaatcgggcaacgttgaccagtcagaaagtgccacgccccgcatatagccaaagcaccactcctcaacaatcgtcagctcgctgccatcaacttctcgcaagccgaataacggctcaaactgctccgggaattcgttcagacgctctgcggtatcggccatatgttgaaaagccagattcataaagcgcgtcatctctttctctgacgcccagcgcggcacatagtcagccccaccccacacggcaaccagccactgttccggttcaatctcttgcggagaactcaacaccgccgtcaataaaccgtccagctccgccacatcaaggatggcgtggtcagtgttgtatttggtcagaatatcgtccagccattccaactcactttcgtttaacggtcccgttttcatacgcttttccttgtggatctcaactcgccagcaccgagcgcctgtcaacatcgtgcggtagcctatcaggcgtatcaggttgaggactacgccaccgcactggcggcctggcagaaaatcagtcttcacgacatgagcaatgaggatctgcttgctgctgccaataccgcccaggcggcaggaaatggtgcggctcgcgatcgctgggttgcgcgggcgacaatttatcgccaacgtcataatgtcccggccgcggtgagtgatttgcgcgccgcgctggaactggaaccgaataatagcaacacccaggcagcgcttggttacgccttgtgggatagcggtgatatcgcacagtcgcgggaaatgctcgaaccggcgcataaagggcttccggacgatccggcactgatccgacaactggcctacgtgaaccagcgtctggatgacatgcctgcgacgcagcactacgcccggctggtgattgatgacattgataatcaggcgctgataaccccactgaccccagaacaaaatcaacaacgcttcaatttccgccgtttgcatgaggaggtcggtcgccgctggacgttcagtttcgattcttccatcggcttgcgttccggcgcaatgagtaccgctaacaataatgtcggcggcgcagcgccagggaaaagctatcgtagccgacgcgtgttggctggcgtgctgccaccgttggagtaatgataagagaaaccaaaacctgcgccctggtgtaccaatctgccctaacatcgctgcagagtcaccagcatccagtgtattctgttcaccatattgctggcgctgaattccccagcctgccatcagcattgtgcgattcgccgccatcagttcagcgagtttgactatctgcgcttccggtacgccagtaatttccgccgcccagaccgcgctcttcggcgtattatcgctcttacctgtcagatactcttcaaactgcggatacccggtagtgtatttttcaaggaacactttatcgtgtttgccttgtgtcatcagtgtatgcgcaatccctaacatcagtgccacgtcggtgcccatattcggcgcgatccaggtggcattatcgtcaaagaattcgatggtttcggagcggataggatcaatggcaatcactggtttgccagattttttcagctgatggaagtattccagcccttgctcatcggtactgctccaggcaatttttaaggtattcagcgggttcattccccacagcaccacaacctggctgttttccagaatcagcggccaggaggtctgctgttcatacacctcggacagcaccattttaatgcccatcgccttgatcttacgcgacattaaatacatcggtgtcgaagcgcgaatagtggtcacatcataagtatcgatgtggtaaatcacgtcgcggatggcatccagaccttcctgtacagtgaagtgaatttcgtgatgcaccgtgcccagatggtttgccacttcctgggctgctttcagatccggtgaacccggcagacctacagcaaaggagtgtaactgcggccaccaggcttcagagcgttcctgatcttccacgcgacgggctgcgtatttcttggtgatagcggaaataattgaggaatccagaccaccagaaagcagcacaccgtaaggcacatcagacatcaaatggcttttaactgaatcttccagtgcctgacgcagctcgtttttgtcggtcacgttatctttcaccgcatcgtagtcgaaccagtcgcgatgatagtaagaacggatttcgccgtcctggctccacaaatagctccccgccgggaactctttaatcgtgcggcaaactggcaccagcgctttcatttctgaggccacatacagctgaccgtgttcgtcataccccatatacagtgggatgatccccagatggtcgcgaccaatcaggtaggcatctttttcgctgtcgtacagtgcaaaggcaaacatgccctgcaagtcgtcgagaaattccggccctttttcctgatacagcgcgaggatcacttcacagtcagacccggtctggaactggtaacgatcgccatattcggcgcgcaatgcctggtggttgtagatttcaccgtttaccgccagtacgtgggttttttgttggttgtagagaggttgcgcccccgcgttaacgtcaacaattgacagacgttcgtgggcgagaatggcgttatcgctggcataaataccggaccagtccgggccacgatgacgcatcaggcgtgacagctcgagggctttcttacgcagctcaactgcgtctgttttgatatcgaatacgccaaaaattgaacacataaccttctccgttaacctggtatttgttgcaatgatgagcaacatgtcctgagccaacaccattttcatccccgaattacggttatcaaacatcaacagcaacgtagtgcagtgacctgtcaccattgtgaagatgcgccctgcgcccgtagctgccctaatggcgcaatcagccacgttgatgacagcattcaggtcaatcagcaaaagtgtattggctgtaaatcctgcgtggtggcctgtccttttggtacgatgcaaatcgtcctgacacccgtcgcggcaggaaaagtaaaagccacggcgcataaatgcgacctttgtgcggggcgcgaaaacggtcctgcctgtgttgagaattgcccggcggacgcgctgcaactggtcactgacgtcgcactctccggcatggcgaaatcccgccgcttgcgcaccgcgcgtcaggaacatcaaccgtggcatgccagtaccgcggcgcaagaaatgccggtaatgagtaaagtcgaacagatgcaggcaacgcccgcgcgtggcgagccggatagactgactgcgtagcgcactgtgcggttgcgcccgccagtagagtgccagcgccgcgcccacctggcccgcgcctgccattgaaaggatgggaaataagctgttgaatccctggctgtccattaacgcgaggtaaacaggaataaagccctgatgcacgccaaataccacggcgatcaggaacagcccggcttcgaataaccagccacccagcggcataatgatcaggtacgcaagcgtagcggtgatcagcagggtgattaacgaggtcagcagcatgtcgagatcgtccggcataaagcggcgcaccatgccttcaatgcgggcgcaggcccacgcggcaatcagcacgccgattatattgccgcgcggatcgatgggcagaccaaagaaatcgtgaaaaccggcgtagtaaccggtggtcgctgcggggttataaccgagcaaaaagagcgcggcgataattgcgccatttacgcccgtgccgcctaatgcctgggcggcgttatagcccaccagaatcaccaggaaagtggacaaacctttgctgaacaccttcat

SEQ ID NO: 4048 - DNA, 1251 bp, Homo sapiens
  SIMILAR (989)..(942): 1001254mologous to Escherichia coli pyruvate,water dikinase,accession number X59381,Smith-Waterman Score=80.
atgaaggctgggaagcactatgacctggaccatttgttcttggtccttttgctgacccttccttctcactgccatcaagagggcaatcctttctccacaccatccaggggcagcgattggggcctcagccttagttctccagctggaccctgggatggtgcggggctgtggctctgggaagtatctggcctgcacgcggtttacatcattgggagcacaggcctcgccctccgaatacgaggcccagagcccttcgcgccgagcgtttcccgcctttcccctgttcaagtcattgcccagaggccactgcgggccgttcctgcctgtccgtgggctgcggcccccgtgttcccagggcaggatagtgacgggccgtgtgactgtgacgcctcatcaggttgggcattcgccgaagtggtgatttacccgaatgcaaaatgggtagtcgaatctaatcaaatgatacgcgcaggaaacgtcgaaatttcgagggtgtctgtattgcctttacaacgtcgtcaatttgaccgccaaaagattgcgcgtaatcgcctggagcaccatatcggtaccgatcacttgggaaaaagggccggaatttctcgacgacttgcagggcatgtttcctttgcactgtacgacagcgaaaaagatgcctacctgattggtcgcgacatctggggatcatcccactgtatatggggtatgacgaacacggtcagcgtatgtggcctcagaaatgaaagcgctgcccattccccggatgcccgttcacggcgatatcgccctgacaggacgaccgccacgtttgtgacgatggcagatgctttcttcatatcggttcccagtccgggtcggtcattgtcggtttatgcacgtaaaactcatccggttaaccgcaccctgcacgaccatctcaccaaggccccatgcggaagtgtaaacaccacctggtcaaagccggattcggtatcaatggagaacatcacccagatgatgcgagagaagcaaatacatgtttcactgccacgagaacggctcaaaaccctgaacgttgaggaaggtttcctgctgaccggcaaaagaaggtccggcatatcttctgcggtggcggaggagcgcaccgcaaaagaggcgtttcgtcatcggcggaaagctgtgcataggcttcgcggatggcgttttcagctcaggctggaagggagtgtcgataatccactggcggatttgcgcgccgctttcgcaagctga

SEQ ID NO: 4049 - DNA, 1161 bp, Homo sapiens
  SIMILAR (242)..(682): 341254mologous to Saccharomyces cerevisiae multicopy suppressor of a budding defect,accession number M77354,Smith- Waterman Score=119.
ttataatacaagcatcgtcattttcaccacactgtggaaccgaaaataaatttccctagtgggtgaccatcgtccatggatgtaagggctgtctagtgtaggacaatcaatagatgaccatcttccatggacgtaagtgctgtctagtgtaagacagtcaatagatgaccatcttccatggacgtaagggctgtctagtgtaggacaatcagtagatgaccatctaccatggacgtaagggctgtctagtgtaggacaatcagtaaatgaccatcttccatggacgtaagggctgtctagtgtaggacaatcagtaaatgaccatcttccatggacgtaagggctgtctagtgtaggacaatcagtaaatgaccatcttccatggacgtaagggctgtctagtgtaggacaatcaataaatgaccatcttccatgggcgtaagtgctgtctagtgtaagacagtcaatagatgaccatcttccatggacgtaagtgctgtctagtgtaagacagtcaatagatgaccatcttccatggacgtaaggtctgtctagtgtaggacaatcagtagatgaccatcttccatggacgtaagggctgtctagtgtaggacaatcaatagatgaccatcttccatggacgtaagtgctgtctagtgtaagacaatcaatagatgaccatcttccatggacgtaaggtctgtctagtgtaggacaatcagtagatgaccatcttccatagatgtaagggctgtctagtgtaagacagtaggtcacatgagcaaaggtgaaccccaaaatctccgcggtcaccaggaatcgaggttcagtagaatcaccccatcttgaaggccgcagcctcaaggtccaagtcttcattccccaggttgaagacatgagctggggacccccatggctgtgggtggagggcgagtcctggacgtagtgcttcattctgtcttttgaaaggggtgatgttagaaagtgagttctggcagtggtcagaaccagcagcactggggtcacacccaggctgggaacctgcagacggcactgcccgtgcggcatctcctgggacctgggagctttcacgccacgcgtatgataagttttggggggcgggagtgaggaaaaggcccccctctggtggtccgggcccat

SEQ ID NO: 4050 - DNA, 706 bp, Homo sapiens
  SIMILAR (294)..(368): 401254mologous to Homo sapiens Human secreted protein, SEQ ID NO: 6812,accession number G02731,Smith-Waterman Score=41.
aggagacggcagtgacctgctgtgtaaactttcaaattatacgcgccaagtgggtctaaataaatgaatcaggttaattagcaaacaacagccatttattctctttaatagcctcatgggatatcaagaggctattatatgatatgatatcatgcattttggcatgaaaattagggagtagctctacattgctaaagggatgcagctttttacctgggtgacggatgtatatgttttaaagtaacttaaatgcattaccctttgctcttcacgtcagccacataaactaaggaccaggggcagctggagactcactggtcagaaccagcagcactggggtcacacccacgctgggaacctgcagacggcactgcccgtgcggcatctcctgggacctgggagctttcacgccacgcgtatgataagttttggggggcgggagtgaggaaaaggcccccctctggtggtccgggcccatggtcctgccaggggcccacagcatgaagacgtagctccctcacacacacgttgaatttggatttgcttgtctggcttctgctggggcgcaggatgtggggatggaaggaccaagacacacgacagagaacagcgtcacggggtcaccgtcccacttcccaccccgcgcctcacagcacagacgggggatttgccggcctcacgccggccgagccactgctgacttcac

SEQ ID NO: 4051 - DNA, 1872 bp, Homo sapiens
  SIMILAR (89)..(529): 351254mologous to Saccharomyces cerevisiae multicopy suppressor of a budding defect,accession number M77354,Smith- Waterman Score=132.
ttataatacaagcatcgtcattttcaccacactgtggaaccgaaaataaatttccctagtgggtgaccatcctccatggatgtaagggctgtctagtgtaggacaatcaatagatgaccatcttccatggacgtaagtgctgtctagtgtaagacagtcaatagatgaccatcttccatggacgtaagggctgtctagtgtaggacaatcagtagatgaccatctaccatggacgtaagggctgtctagtgtaggacaatcagtagatgaccatcttccatggacgtaagggctgtctagtgtaggacaatcagtagatgaccatcttccatggtcgtaagggctgtctagtgtaggacaatcagtagatgaccatcttccatggacgtaagggctgtctagtgtaggacaatcaatagatgaccatcttccatgggcgtaagtgctgtctagtgtaagacagtcaatagatgaccatcttccatggacgtaagtgctgtctagtgtaagacagtcaatagatgaccatcttccatggacgtaaggtctgtctagtgtaggacaatcagtagatgaccatcttccatggacgtaagggctgtctagtgtaggacaatcaatagatgaccatcttccatggacgtaagtgctgtctagtgtaagacaatcaatagatgaccatcttccatggacgtaaggtctgtctagtgtaggacaatcagtagatgaccatcttccatagacgtaagggctgtctatgtcactcatcccttcacagctgtgtggcctctctgctgtcaccccattctccgcggtcaccaggaatcgaggttcagtagaatcaccccatcttgaaggccgcagcctcaaggtccaagtcttcattccccaggttgaagacatgagctggggacccccatggctgtgggtggagggcgagtcctggacgtagtgcttcattctgtcttttgaaaggggtgatgttagaaagtgagttctggcagctttcgcccatttttcccagttgggtttgatgcaccagcatcctgccgtataacagtctggttctgatgcttgttctgtttcttcaagctgtgtcttctgtgttgaaatatgccttgtggtagttttgctgaaagccgaaacagtggtcagaaccagcagcactggggtcacacccaggctgggaacctgcagacggcactgcccgtgcggcatctcctgggacctgggagctttcacgccacgcgtatgataagttctctcaggcccagggttctctctgggcagccctcctgcagcagagcctggaaagggggcggtggctttgccaccttccgcctggagcctcttgtcctcagtcaacatggctttgccattgcagctgtagggacaggtgagtgggtgaccagatgaccgagctgaaacaggccctggcagtaaggagcctggccttccataatgcttaatcgaaaatgtaatgaaattctgagagtctagtgtgtcggctataatgtaacagtcatgacacgtgagtagcattagccccagtttctccattaaaggaattaaaccgtttgtgacagtcaactcggtgtagcaggacaagcacgagttgagtgagaatttaacttgtgcctggagccagaagcgcgacgcagagtggactggggtgcactgagccttgccagggtcccgcaccctcaccgggagctgtgatggggccaccttctccctctccaggccccactttcctgtttgaaggatgcccgccctcaccaggagctgtgaaggggccaccttctccctctccagactccactttcctggagggttggggttggacacgatgggaaaactctcactccccat

SEQ ID NO: 4052 - DNA, 1194 bp, Homo sapiens
  SIMILAR (842)..(1192): 671254mologous to Escherichia coli dicarboxylate membrane- transporter protein,accession number X79887,Smith-Waterman Score= 355.
ttagtctgggaccacgatcccactcgtgttgtcggtctgattatcggtctgggaccacggtcccacttgtattgttgcctgtttgcggggttcccgccttgctggtctttgcgctgctttctcctctctgtgtggtgtgctctgctctttgtggggggttgcttccggtgctccgtgcctcgctgttcctctggtgtgttgcttttcttgccggtcttgtcttcgtttttggctttgcgttctttggttcccttgtccgcggtcggtttctggtggtggttcctttcttccttctgtttgctctctgtcgcttgttgtttctcgtttgctggctgcgttcattcggtgcttgccctgtttcggtgtgtgttgctggctttgcctgttttgctgggctctttcttgtcctggtgtcgctgctttcctccggttttggttttcgtctgtctttctcttgtgtcgttggcagtttgtgcctgcccgggttcgctttccgcgctttctgtcttttctttctgccttgtgtcgggccggctttacttgcgtttcctggtttctgtggtccctcctctccctccctgtcttatggtggtttgttcgccccctggtcctgtgccttgttggggttcttcggttgtctggggtggtcggcgccgggtttcctttcctcctttgggctttcggtccgtgttctgtccctgccttgcgcgtctggcctgcgttccctttcgggctgtgctcttgtccccggtttgtttctcccttgggtgttctccccccggtctcttcgtcctcttgtttcgttcggttgtcttctttgttctttcgtttcccacaaacatggattggatcaaagaatccgtctggtaaagtaatccagggcaatccgtgatggctgcccgtcatcttattctttggttcggttccgctgacctccaaggctgcaacggcaaagccactgatgcggatgggtccgggcattgaccgtttcacagctgacggtgtggcttctttcgctgcggtgtatggtctgttcattctgccgacataaccgacgctggttggtgcggtacagatggatgacacgggcactacccgtatcggtaaattagtctcaaaccatccgttcttcatccgggtacttctgggtgttgcactgaccgtttgcttcggcttcgtgctgggtagcttcat

SEQ ID NO: 4053 - DNA, 1950 bp, Homo sapiens
  SIMILAR (1)..(1950): 811254mologous to Mus musculus MGA protein,accession number AF205935,Smith-Waterman Score=2628.
aaagaagcagaagcgtttgcttattatcgccggacacacactgccaatgagcggcggcggcgtggtgaaatgagggatctctttgagaaattaaagatcacattgggattacttcattcttccaaggtttccaaaagtctcattcttactcgagccttcagtgaaattcagggactaacagatcaggcagacaaattgataggacagaaaaatctcctgactcgaaaacggaatattctgatacggaaagtatcgtctctttcaggtaagacagaagaagtggtcctgaagaagctagagtatatttatgcaaaacagcaagcactagaggcacaaaaaagaaaaaagaagatgggatcagatgagtttgacatatctcccagaattagcaaacagcaggaaggatcttctgcatcatctgtagatcttggacagatgtttataaataacaggagggggaaacctttgattctttccagaaaaaaagaccaggccacagaaaatacctcacccttgaacactccacacacctctgccaaccttgtgatgactccgcaagggcaattgctcaccctaaaaggtcccctattctcaggaccagtggtagctgtttctcctgatctcttagaatctgatcttaagcctcaagttgccggtagtgctgtggctctaccagaaaatgacgacttatttatgatgccacgaattgttaatgtgacatcattggccacagagggaggtttggtagatatgggtggcagcaaatatcctcatgaagttcctgatagcaagccatctgaccatctgaaagacaccgtcaggaatgaagataattccttagaggataagggtagaatctcttccagaggaaacagagatggcagagtgacgttgggtccaacgcaggtttttctggcaaacaaagattctggttatccacaaatagttgacgtttccaatatgcagaaagcacaagagttcttacctaaaaagatttctggtgatatgagagggattcagtataaatggaaagagagtgaatcaagaggggagagagtgaagtcaaaggattcttcatttcataaattaaagatgaaagatctcaaggactcaagcatagagatggaactgaggaaagtaacatcagctatagaggaagcagctcttgattccagtgaactgctgactaacatggaagatgaggatgatactgatgagacactgacttcactgctcaatgaaattgcctttcttaatcaacaactaaatgatgactctgttggcctggctgaactacccagctctatggatacagagttcccaggggatgctcggcgggcttttattagtaaggttcctcctggaagcagagcaactttccaggttgagcacttgggaactggtttgaaagagttgcctgatgttcaaggggagagtgactctatcagtcccctcctcttgcacttggaagacgatgacttttctgagaatgaaaaacaacttgcagaaccagcctctgagccagatgtccttaagattgttattgactctgaaataaaggattccctcctttccaacaagaaagctattgatggagggaagaatacttctggcctccctgcagagcccgaaagtgtgtcctcaccccccaccctacacatgaagactggcttggagaacagcaacagcacagacactttgtggaggcctatgccaaagttggcccctctaggtttaaaagtagctaatccttccagtgatgcagatggtcagagtctcaaggtgatgccttgtttggcacctatagctgccaaagttgggtcagttggacacaaaatgaacttaacagggaatgaccaggaaggccgggaaagcaaggtgatgcctacattggcacctgttgtggctaaattgggcaactcgggggcctcaccaagttctgcagggaaa

SEQ ID NO: 4054 - DNA, 4890 bp, Homo sapiens
  SIMILAR (805)..(2340): 961254mologous to Homo sapiens beta V spectrin,accession number AF233523,Smith-Waterman Score=2460.
  misc_feature (1)...(4890): n = a,t,c or g
aaaatgacgacttatttatgatgccacgaattgttaatgtgacatcattggccacagagggaggtttggtagatatgggtggcagcaaatatcctcatgaagttcctgatagcaagccatctgaccatctgaaagacacctggaaggaattgttggagcctgcaggcagggtgcagaagctgtgtccccgggcttcaggcccatgcggtgcagcagaggcagcaagctgtgacgcaggcgtgggcagtgctgcagcgacgcatggagcagcgcagggcccagctggagcgggcacgcctccttggcccgctttccacggcggtgcgtgactatgcctcctgggcagcccgcgtgcgccaggacctgcaggtggaggagagttcgcaagagcctagcagtggcttgctgaagctcagtgcccaccagtggctccgggcggagctggaggcccgggagaagctgtggcagcaggccacccagctggggcagcaggcacttcttgctgcagggacacccaccaaggaggtccaggaagagcttcgagccctgcaggaccagcgggaccaggtgtatcagacctgggcacggaagcaagagaggctgcaggccgagcagcaggagcagctcttcctcagagagtgcggccgcctggaggagatcctcgcggcccaggaggcagctccatgccaagctcagtgggcactcctaaggccctgccatacccagagtgcccatgggcacagactgcagctggaggggctggctggctggaaggcttggtggcctctgacttttctgtggatccaggtctccctgaaaaccagtgccttggggagctcggtggaagaggtagagcagttgattcgcaagcacgaggtcttcctgaaggttctgactgcccaggacaagaaggaggcagccctgcgtgagcggctgaagacgctccggcgcccccgggtgcgggaccggcttcccatcctgctgcagcgccggatgagagtgaaggagctggcggagagccggggacacgccctgcatgcctccctgctgatggccagcttcacccaggccgcaacccaggctgaggactggatccaggcgtgggcccagcagctgaaggagccggtccctcctggggacctgagagataagctgaagcccctgctgaaacaccaggcctttgaggctgaagtccaggcccatgaggaggtcatgacctctgttgccaagaagggagaggctctcctggcacagagtcaccctcgagccggagaggtctcccagcggctgcagggcctgcggaagcactgggaggacctgaggcaggcaatggccctcaggggccaggagctggaggacaggcggaacttcctggagttcctgcagagagtggaccttgcagaggcctggatccaggagaaggaggtgaagatgaatgttggtgacctgggccaggacctggagcactgcctgcagctccgacggcggctccgcgagttccgaggaaactcggccggggacacagtgggtgatgcctgcatcaggagcatcagtgacttgtcactgcagctcaagaaccgggaccctgaggaagtcaagatcatctgccagcggcgaagccagctcaacaacaggccagtgggcgagtttccatggcaacttgctccggtaccagcagcagctcgaaggggcttggagatacacgtgttgtcccgagagctggacaatgtcaccaagaggattcaggagaaggaagccctgatccaggccctggactgtgggaaagatctggagagcgtgcagaggctgctgcggaaacacgaggagctggagcgggaagtgcaccccatccaggcccaggtggagtccctagagcgtgaagtgggccgcctctgccaaagaagccccgaggcagcccacggcctcaggcacaggcagcaggaggtggctgagagctggtggcagctccggagcagggcccagaagcggagggaggcgctggatgccttgcaccaagctcagaaactccaggcaatgctgcaggaattgctggtcagcgcccagaggctgcgggctcagatggacacgagccccgctcctcgcagccctgtggaagcccggcgtatgttagaagagcatcaggagtgcaaggccgagctggactcctggacagacagcatcagcctggcccgaagcactgggcagcaactgctcacagcggggcaccccttcagctccgacattcgccaggtgctggctggcttagaacaggagctgagcagcctggaaggggcctggcaggagcatcagctacagctgcagcaggccctggagctacaggcaggcacagtcccatccccagcctgcatcttgcccccccgaacagggcctgcgctgaccccacagcctctgctgtttctgagctcagtggagaagatggaacgttggctttgcagcaaggaagactccctagccagtgagggtctatgggaccccttggcccccatggagccccttctgtggaagcacaagatgctggagtgggacctggaggtgcaggcgggaaagatcagtgctctggaggccacggcccgcggcctgcaccaggagagccgatcagagagccaaccagcacccacaaatgccatggctccttgtgctggtgtcctggcagtggtcgcggccaccccctctccattcttgcaggtggaccacacctggacgctgtctccaaaaacacttctggagaaggaagtgcagagcctgggccaggccaaggtgtatgccctgaggaagttggcaggcaccctggagcggggtgcacccaggcgctatccccacatccaagcccagaggagccgcattgaggctgcttgggagaggttggaccaagcaataaaagcccgcacagagacccatatcatcacgttcactgagggctgcagcatggaggatggtttctgtacctggggacacatcaagccccatgatcctccttgttcaaaaggaggtggcccagaaggccatgtctccagggagaaaggaatcctgggagcagagaacagccctgagcagaacttggctgcagcccatgaggtccacagctttcagcaggcagcagctgagctccagggaaggatgcaggagaagacggccctgatgaagggggaggacggaggccacagcctgtcatctgtgcggaccctgcagcaacagcacaggcgcctggagagagagctggaagctatggagaaggaggtggcacggctacagacggagggctgccgactgggccagctacatcctgcagctccggggggcctggccaaggtgcaggaggcctgggccaccctgcaggcgaaggcccaggagcgaggccagtggctggcgcaggctgcacagggccatgccttcctcgggcgctgccaggaactgctagcatgggcacaggagaggcaggagctggcgtcctccgaggagctggctgaggacgtggcgggggctgagcagctccttgggcagcatgaagagctggggcaagaaatcagggagtgccgccttcaagcccaggacctgcggcaggaaggacagcagctggtggacaacagccacttcatgtctgcggaggtgacagagtgcctgcaggagctggaagggcggctgcaggagctggaggaggcttgggccctgcgctggcaacgctgtgccgagagctggggcctgcagaagcttcggcagaggctggagcaggctgaggcctggctggcctgctgggagggactcctgctgaagcccgactatgggcactcagtgtcagatgtggagttgctgctgcacagacaccaggacttagaaaagctgctggcagcccaggaagagaagtttgcccaaatgcaaaagacagaggatgcaaagggtacccccaccatggaggggtctttggagttcaagcagcacctgctgcctggcgggaggcagcctagctcgagctcctgggacagctgccgcgggaccttgcagggcagctctctgagcctgttcctggatgagaggatggcagcggagaaagtagcttccatagccctccttgacctcacgggagcccggtgtgagaggctgcggggccgccacggcaggaaacacacattctccttaaggctgaccagtggggcagagatcctgtttgcagcaccgtccgaagagcaagctgagagctggtggcgagccctgggcagcactgcagcccagagtctgagcccaaaactcaaagccaaacctgtcagctctctgaatgagtgcacgaccaaggatgcccggcctggatgtctactcaggtctgatccctgaggtgaaccccagtgcaacaccaaacttcaggggcacaagcgaggacacatctaagggaccagaataagactcagctacaggcaaaagggctccttcccgggggtggttcaacccaagttccccaggcccagcttctggaatagacagttccttctggttagatgggtcctaccatgtggcaggaaacagccatttgcctggcctccccctgcattcctcgtctgggtgaagaggagacgtgttacggcagagcaggttgggcaaggccagggctaccccaggcccatgtggcttcctccttgcttggaaggggtgactctgagcacaggtagacgccagacgtgtgcagagaatgtgctcttcggaggaagaacactgatgagcgagctctgtaccagcccttgccatgtacagccaagagcctagaatgacatggcccttctcagcagtaataacagatggtctcagcgcctcannnnnnnnnnnnnnnnnnnnnnnnnnaaagcgccccttcaatttaaggggcccctttaaaccccctgt

SEQ ID NO: 4055 - DNA, 458 bp, Homo sapiens
  SIMILAR (5)..(457): 981254mologous to Homo sapiens semaphorin SEMA6A1,accession number AF279656,Smith-Waterman Score=806.
agaatctcggcacgaggcgttctctacctgtgtgataaaggttccccttggccggtgtgaacgacatgggaagtgtaaaaaaacctgtattgcctccagagacccatattgtggatggataaaggaaggtggtgcctgcagccatttatcacccaacagcagactgacttttgagcaggacatagagcgtggcaatacagatggtctgggggactgtcacaattcctttgtggcactgaatgggcattccagttccctcttgcccagcacaaccacatcagattcgacggctcaagaggggtatgagtctaggggaggaatgctggactggaagcatctgcttgactcacctgacagcacagaccctttgggggcagtgtcttcccataatcaccaagacaagaagggagtgattcgggaaagttacctcaaaggccacgaccagctggttcccgtcg

SEQ ID NO: 4056 - DNA, 1095 bp, Homo sapiens
  SIMILAR (426)..(259): 461254mologous to Homo sapiens Human secreted protein, SEQ ID NO: 6812,accession number G02731,Smith-Waterman Score=107.
tcagccaacagaaaggggcctatgtgcaagcttgaaacccagcagggcagccattaaatcacaaagctccaaggtaatctcctttgactccatgtcccacatccagggcacagtggtgcaaggggtaggctcccaaggccttgagcagcaataccgctctggcgttgcagtgttcaggctccacagcttctcccataggttgttgagtgcctgtgaattttctaggtgcagggtgcaagctgtgagtagatctatcattctgggttctggaaggtggcagcccccttcccacagctccactagggagtggcccagtgggcacactgtgtggggcctccaaccccacatttcccctctgcattgtcctagtaaagattctctgtgagggctctgcctctgcaacaagcttccgcctgaaaacctaggcttttcatacgtcctctgaaatctatgagactgccaagcctcactcactcttgcaatctgcatgcttacaggcttaacaccacacagaagccaccaaggcttatggctcatgccctctgaagcgtcagcctgagatgtctctggggttctttgagccaaggctgaagccagagtggctccatgactcacatccaagccacactgatgcaagtggtgggtttccaaggtcttgggcagctctgcctctgtggctctgcagggtacagatcccttggctgctttcatgggctggcatagagtacctgcagctttttgaagtgcacagtgcaagctgtcagtggatctaccatcctgggttccctgcaggtagcagtgtcctgaggctttgtagggtagcaaggtcatgcgcctgggcttgggcctggtcctggcccatgaaaccattctttttttcttctgcctggacatcaaggcattttcatatatcctctgaaatctaggtggaggcttccaagcttcaactcttgccttcttcgcacccacaggaccaataccacatggaagccaccaaggcttgcggcttgcatcctctaaagtaacagcctgagctccaccttggccccttttagccatggccatagctgaagcagctaggatgcagggtgccat

SEQ ID NO: 4057 - DNA, 2592 bp, Homo sapiens
  SIMILAR (1351)..(2589): 961254mologous to Homo sapiens semaphorin SEMA6A1,accession number AF279656,Smith-Waterman Score=2068.
atggtgtggtttttaaaaaatgtaaatcatggcactcacactaatgcaaagaaatataatgatgtggaaaataaagaaaggactgggtggaagtgggggtctactgagtatcttctgtgtgcaaggcctctgcgcaaagggaatgtgggtctctctggtgatgttttcctaactgtatttgtgatgaaaacagggcattccagttccctcttgcccagcacaaccacatcagattcgacggctcaagaggggtatgagtctaggggaggaatgctggactggaagcatctgcttgactcacctgacagcacagaccctttgggggcagtgtcttcccataatcaccaagacaagaaggctatgctgaaggatggagaagagcgtccctttaatgaacccggagtatttcatttattagcagatcatcagttgacccagaaagtggccagcatccctgggtctgcagtctgtgcctatgacatgcttgacattgccagtgtttttactgggagattcaaggaacagaagtctcctgattccacctggacaccagttcctgatgaacgagttcctaagcccaggccaggttgctgtgctggctcatcctccttagaaagatatgcaacctccaatgagttccctgatgataccctgaacttcatcaagacgcacccgctcatggatgaggcagtgccctccatcttcaacaggccatggttcctgagaacaatggtcagataccgccttaccaaaattgcagtggacacagctgctgggccatatcagaatcacactgtggtttttctgggatcagagaagggaatcatcttgaagtttttggccagaataggaaatagtggttttctaaatgacagccttttcctggaggagatgagtgtttacaactctgaaaaaaagtggagcaccgcaaaacctgtgagggttaccattatcttaaaccctggtcaagctagtttctgcatcacacttagagaaacagtggctgacggagaaaacatatttggtgtccgccatatcgttgcacccttcaatgacacttttgtccatgtcactgatctttctggcaaagaaaccctctgccgtgtgactggtgggatgaaggtgaaggcagaccgagatgaatctttgccatatgctgctatgttggctgcccaggatatggctcagaggtgcaaggaactgggtattactgccttacacatcaaacaccgggccacaggaggaaataggacaaagactcctggacctggggcccagtcggccctcgagcccttgccccctcggttgcttaaaaggcaaacacttttccccagacggaggctccggtggccacaagggggtcgtcggaaaagatcccaactggaagcccagagagtgattcgggaaagttacctcaaaggccacgaccagctggttcccgtcaccctcttggccattgcagtcatcctggctttcgtcatgggggccgtcttctcgggcatcaccgtctactgcgtctgtgatcatcggcgcaaagacgtggctgtggtgcagcgcaaggagaaggagctcacccactcgcgccggggctccatgagcagcgtcaccaagctcagcggcctctttggggacactcaatccaaagacccaaagccggaggccatcctcacgccactcatgcacaacggcaagctcgccactcccggcaacacggccaagatgctcattaaagcagaccagcaccacctggacctgacggccctccccaccccagagtcaaccccaacgctgcagcagaagcggaagcccagccgcggcagccgcgagtgggagaggaaccagaacctcatcaatgcctgcacaaaggacatgccccccatgggctcccctgtgattcccacggacctgcccctgcgggcctcccccagccacatccccagcgtggtggtcctgcccatcacgcagcagggctaccagcatgagtacgtggaccagcccaaaatgagcgaggtggcccagatggcgctggaggaccaggccgccacactggagtataagaccatcaaggaacatctcagcagcaagagtcccaaccatggggtgaaccttgtggagaacctggacagcctgccccccaaagttccacagcgggaggcctccctgggtcccccgggagcctccctgtctcagaccggtctaagcaagcggctggaaatgcaccactcctcttcctacggggttgactataagaggagctaccccacgaactcgctcacgagaagccaccaggccaccactctcaaaagaaacaacactaactcctccaattcctctcacctctccagaaaccagagctttggcaggggagacaacccgccgcccgccccgcagagggtggactccatccaggtgcacagctcccagccatctggccaggccgtgactgtctcgaggcagcccagcctcaacgcctacaactcactgacaaggtcggggctgaagcgtacgccctcgctaaagccggacgtaccccccaaaccatcctttgctcccctttccacatccatgaagcccaatgatgcgtgtacataa

SEQ ID NO: 4058 - DNA, 1857 bp, Homo sapiens
  SIMILAR (730)..(1050): 961254mologous to Homo sapiens Human secreted protein from clone CJ145_1,accession number W64221,Smith-Waterman Score=525.
atggatgggaggaaaacagagggaacaccaacaaaagactctccacaatttcgtggtggtggtggcaatgatgatgatgaagatgaatgcaaaagtaggcatcagcaaagatattgccatctgagagatcgagattttgaatgtgatactcaactatgcaagtttaaacttgacacaacttgggataaaggtgattctgttttattggttctcagcagctgtgtaatcctcctactaacaaatataaaaattagcccgatgtggtggtgcccacctagtacgtacccagtcgtagcgttccgtgcgcaacgcggcctttgcacgtggtcccaaagggcgccacgggaacacgtttcggcgttgacacccatggaagacgtgacgggttgcaacagagaattcaaaatagctgtgttgaggaaacttgaagataacacagaaaatgaattcaggattctatcagatacagttaaaaagattgaaataattaaaaagaatcaagaaagaattctagagttcaaaaatgccattgacattcctgcatcagatgtcctgcactgtggctgtagtccatcatccaaactgcatggagtcccggatggtgtcaagtcatgtgacctgccaaagcccatcacttgcagtcctggtgccaaacgggcctgtgagttggagagagcatccgtaggagggaaaattcaaaatgtaacctctggcaagggagaggtccctgggcagagcaggctgagaaaaagatatgcaacctccaatgagttccctgatgataccctgaacttcatcaagacgcacccgctcatggatgaggcagtgccctccatcttcaacaggccatggttcctgagaacaatggtcagataccgccttaccaaaattgcagtggacacagctgctgggccatatcagaatcacactgtggtttttctgggatcagagaagggaatcatcttgaagtttttggccagaataggaaatagtggttttctaaatgacagccttttcctggaggagatgagtgtttacaactctgaaaaaacctgtattgcctccagagacccatattgtggatggataaaggaaggtggtgcctgcagccatttatcacccaacagcagaacccaggatggtagatccactgacagcttgcactgtgcacttcaaaaagctgcaggtactctatgccagcccatgaaagcagccaagggatctgtaccctgcagagccacagaggcagagctgcccaagaccttggaaacccaccacttgcatcagtgtggcttggatgtgagtcatggagccactctggcttcagccttggctcaaagaaccccagagacatctcaggctgacgcttcagagggcatgagccataagccttggtggcttctgtgtggtgttaagcctgtaagcatgcagattgcaagagtgagtgaggcttggcagtctcatagatttcagaggatgtatgaaaagcctaggttttcaggcggaagcttgttgcagaggcagagccctcacagagaatctttactaggacaatgcagaggggaaatgtggggttggaggccccacacagtgtgcccactgggccactccctagtggagctgtgggaagggggctgccaccttccagaacccagaatgatagatctactcacagcttgcaccctgcacctagaaaattcacaggcactcaacaacctatgggagaagctgtggagcctgaacactgcaacgccagagcggtattgctgctcaaggccttgggagcctaccccttgcaccactgtgcccctggatgtgggacatggagtcaaaggagattaccttggagctttgtga

SEQ ID NO: 4059 - DNA, 502 bp, Homo sapiens
  SIMILAR (128)..(460): 361254mologous to Homo sapiens Human apolipoprotein E mutant protein fragment 5,accession number Y20289,Smith-Waterman Score= 111.
ctatctccatgcgttccggtcaaggcacgggatggtggtctccagttcagttgaaatttccaaaatcacggcctggaaaaaatcaaggcgctgatttccagagattccccagagctgtcgcgagggggcgcccggccctgccaaacccggagggccgcgcgcgcgcgaaccgtgtccgaaccgcacggcggcgtcctggggggtccactgtgaggacggggggtccactgtgaggacggggggtccactgtgaggacggggggtccaccgtgaggacggagcttcctctcctcagcacccacccaggaggggccggggcttgggacacctggggccgcgtccgctgtgaggacagggagacgctgctgcagctccgggacaccgaggcaaaagtgaggaaaaggcttcctgcccgcgctgcgagtgcagcggggcgagcgcggccgcgtttcccgtcgggctgtttgtatgtggacttcactttgtgcaagcgtcccttcat

SEQ ID NO: 4060 - DNA, 653 bp, Homo sapiens
  SIMILAR (2)..(649): 961254mologous to Homo sapiens HKR1,accession number AB013897,Smith-Waterman Score=1178.
agacagttttggcagtatgtcagtcctcatcaaaaacccaaggacactctttgggggaaagccttatgtgtgcagggaatgtgggcgaggctttacgtggaagtcaaacctgatcacacatcagaggacacactcaggggagaaaccttatgtgtgcaaggattgtggacgaggctttacttggaagtcgaacctctttacacatcagcggacacactcagggctcaagctttatgtgtgcaaggaatgtgggcagagctttagcctgaagtcaaacctcattacccaccagagggcgcacactggggagaagccttatgtttgcagggaatgtgggcgtggctttcgccagcattcacacctggtcagacacaagaggacacattcaggagagaagccttacatttgcagggagtgtgagcaaggctttagccagaagtcacacctcatcagacacttaaggacacacacaggagagaagccttatgtatgcacagaatgtgggcgtcactttagctggaaatcaaacctcaaaacacaccagaggacacactcaggggttaaaccttatgtctgcctggagtgcgggcagtgctttagcctgaagtcaaaccttaacaaacaccaagaggtcacacacgggggagaagcca

SEQ ID NO: 4061 - DNA, 821 bp, Homo sapiens
  SIMILAR (180)..(236): 891254mologous to Homo sapiens HKR1,accession number AB013897,Smith-Waterman Score=84.
ctcgtgattgcccgcctcggcttcccaaagtgttgggactacaggcgtcataagttttgagaacacgtgcaatatttgccacttcttctttcttcttctccttttcttctcctcctcctcctccttcttcttccttcctttctctttctcttttcgtgtctccctcttttgaattcaacccctgaagacaacagccagcacagtccaaggaagacaacacagtggtggatatagggccagccctgaacggagggcagatcagagggcgcacactggggagaagccttagtttgcagggaatgtgggcgtggctttcgccagcattcacaccttcaattgtcagtgtatcctcattctttttggactcaggacaagcgctcgaaccactaaacatgggtataagcaaattgctctcatttgccacattttgtggataggcagcacattccacctttggaagacagatcaaggaagggtctttggacacagaggagatacaggctctggaagcaggctgggtccatttgaacaggaaatcccaagcattcaaccagtcagccccgcgcgcagcctggccgctttccccaacacagcagctcaaggtcactggagagcctacgaccgcacacagccctctccggtacctgcccccgtggcgcaggcgcgcagtggagggggccgcggggttctctgggagatgtagttcaacgatgacggccgtggcgcaaagcgttctggggctcgtggttcgcggggtccatggggaacgcggtgtcgctggttcagatctcgcagagctcagagtcctgcatgccacgaaa

SEQ ID NO: 4062 - DNA, 916 bp, Homo sapiens
  SIMILAR (699)..(256): 341254mologous to Cynomolgus Epstein-Barr Virus TsB-B6 EBNA- 1,accession number AB037275,Smith-Waterman Score=141.
gaagggaagcggggcaggcccttccgcataccacgtcctgctcatccctttcctcatgaactccagtcgcgcctctgcattctcaaacccctccaccatcccacaccctcctcgtgcccttcctcatgaaccccagtcgcgcctctgccttctcatccgtgcgcaccacacaggctcgctcgtgcccggtgagtgatgaggctgctctgcacgtagagtatggccctgtgggcaagggctgggctcttggaggcccccacgaccctacttcccgcggccccggacgcctcctcacctgcgagccgccctcccggaagctcccgccgccgcttccgctctgccggagccgctgggtcctagccccgccgcccccagtccgcccgcgcctccgggtcctaacgccgccgctcgccctccgctgcgccctccccgagcgcggctccaggaccccgtcgacccggagcgctgtcctgtcgggccgagtcgcgggcctgggcacggaactcacgctcactccgagctcccgacgtgcacacggctcccatgcgttgtcttccgagcgtcaggccgcccctacccgtgctttctgctctgcagaccctcttcctagacctccgtcctttgtcccatcgctgccttcccctcaagctcagggccaagctgtccgccaacctcggctcctccgggcagccctcgcccgggttttgtccgccttccctgcctcctcttctgggggagttagatcgagttgtaacaagaacatgccactgtctcgctggctgcagcgtgtggtccccttaccagagtgaggatgcgaagagaaggtggctgtctgcaaaccaggaagagagccctcaccaggaacccatccagctgccaccttgaacttggacttccaagcctccagaactgtgag

SEQ ID NO: 4063 - DNA, 387 bp, Homo sapiens
  SIMILAR (267)..(61): 491254mologous to Crypthecodinium cohnii Dip1-associated protein C,accession number AF255446,Smith-Waterman Score=122.
agaggcacgcttcctgatggtaaaggagaggcacctgtgtgtgagtgatggatggtaaagaagaggcacgcttcctgatggtaaaggagaggcacctgtgtgtgagtgatggtaaagaagaggcacgcttcctgatggtaaaggagaggcacctgtgtgtgagtgatggtaaagaagaggcacgcttcctgatggtaaaggagaggcacctgtgtgtgagtgatggtaaagaagaggcacgcttcctgatggtaaaggagaggcacctgtgtgtgagtgatgtcagcaagggactttagtaattcctttttcatttctattcctggcagccaaacaaggagctccagaataatctgtttgaccggatagcccagcactatgccttac

SEQ ID NO: 4064 - DNA, 622 bp, Homo sapiens
  SIMILAR (2)..(103): 701254mologous to Homo sapiens putative p150,accession number U93563,Smith-Waterman Score=110.
  misc_feature (1)...(622): n = a,t,c or g
atgcccactttcaccacttctattcaacatagtactggaactcctagccagagcaatcagaaaagagaagtaaccaaaggcatccaaattggtgaagaggaagtcaaactgtctctgtttggtgatgatttgattgtatacctggaaaaccctaaatattcatccaaaaagctcctagaactggtcaatgaattcaacaaagtttcaggatacaaaatttatgtacacaaatcagtagctctgctatacaccaacagtgaccaagctgagaatcaaatcaagaactcaaccccttttacaacagctgnnnnnnnnnnnnnnnnnnnnnnnnnnnnnnnnncccaaggaatttttttaaccaaaaggctaaaaaatttttaaaggggaaaatttaaaaccctggtaaaaaaaaaccagggggacccaaaaaaagggaaaaaccccccgggccccaaaatgggaaaaaacaattttgggaaaacccccttttgggccaaaaaaatttaaaaattccattcaatttccaaaaaaaaccccacctttttttttccaaaaacttaaaaaaaccggggtaaaatttttttgggccccaaaaggccccaaaggttttcttagcaaaaaa

SEQ ID NO: 4065 - DNA, 1045 bp, Homo sapiens
  SIMILAR (265)..(882): 591254mologous to Homo sapiens b34I8.1 (Kruppel related Zinc Finger protein 184),accession number AL021918,Smith-Waterman Score= 714.
atgaggtatgacttcccacctgttacaatcactattagcaaaaacagccggtatggcaaagatgcagagaaattggaacccttggatactgtggctggaaatggacgcttgacattcatggacgtggccatcgaattctctcaggaggagtggaaatccctggaccctggacagagggctttatacagggacgtgatgttggagaactacaggaacctggtctttctggaagagaaagcatacattagaggaaaatcttatgaatatgaatgtagtgaagatggtgaagtttttagagtccgtgcaagccttactaaccatcaagtaatccatactgcagagaaaccttacaaatgtactgaatgtggcaaggtcttcagtcgcaattcacaccttgtagaacattggagaattcatactggacagaagccttacaaatgtagtgaatgtgacaaggtgtttaatcgcaattcaaaccttgcacgacatcaaagaattcatactggagagaagcctcacaaatgtaacgaatgtggcaaagcttttagagagtgttcgggacttactacccatcttgtaatccatactggagagaaaccttacaaatgtaatgagtgtggcaagaacttcaggcacaaattttctctaaccaatcatcagagaagtcacacggcggaaaaaccttacaaatgtaatgaatgtggcaaggtctttagtctgctttcataccttgcacggcatcaaataattcatagtacagagaagccctacaaatgtaacgaatgtggaagagcatttcacaagcgtccgggccttatggcccatcttctaatccatactggagagaaaccttacaaatgtaatgaatgtgacaaagtctttgggcgcaaatttatacctaaccaaccatcagagaattcatactggagagagaccttacaagtgtaatgcatgtggcaaggtcttcaatcaaaatccacacctttcacgacatcggaaaattcatgctggagagaattcactgcgtaccttacagatggaatga

SEQ ID NO: 4066 - DNA, 1010 bp, Homo sapiens
  SIMILAR (271)..(846): 651254mologous to Homo sapiens ALR,accession number AF010404,Smith-Waterman Score=543.
agcagcagcatcagcagcagcagcactttgtaggacaggtggcaatccagcagcaacagcagcagggtcctggagtacagacaaaccaagctttgggtcccaagccccagggccttatgcctcccagcagccaccaagacctcctggtccagcaggtgtcccctcgaccaccccaggggccccagggcatggtgggccctgcccaggtgggtgtgttgcagcatcagctccatggagctttgggcccgcagggccttcactgacaggtgtttatgccccatgtctcgggtgttcagttccccccagctggcacagcagggtcagggccttatgggacacaggctggtcacagcccagcagcagcagcagcaacaacagcaccaacagcaagggtccatggcagggctgtcccatcttcagcagagtctgatgtcacacagtgggcagcccaaactgagcgctcagcccatgtgctctttactgcagcttcttcagcagcagcagctgctgagctagcaacagcatcttcagcagcagcagcagcagcagctacaacagcaacagcaactttagcagccacagcttcatcagcagcaacagcagcagcagcttcaacaacagcagccgcaacagcttacaacagcagcaccagcagctccaacagccccaaatcaactcccagctctgttccccagcaggcggccccccaaccatatgggccttttaacccacagcccgaatctcactgcctccctccgcctcaccagtacgcacaaagcggcccttggacctggactgcaggctgccttaggtcatcccaaagacggccttttatggaagacactggggacatggagggccaggggactgatatgcaccggaggcattatttcttactttactcaacactcttgggaagtcaaagtcttcacaacactttagtctctgcctctacactccttctcaattcttacatcattaggaatgaggggcttcctttcttctcctga

SEQ ID NO: 4067 - DNA, 2772 bp, Homo sapiens
  SIMILAR (1120)..(2118): 411254mologous to Homo sapiens similarto human ZFY protein,accession number D86966,Smith-Waterman Score=785.
atggagaaaaacaaagttgttaagagagaagcagaagccaattctataaacctgagtgtttatgaaccttttaaagtcagaaaagcagaggataaattgaaggaaaactctgacaatgtgctggaaaacagagtcctggatgggaagctgagctccgagaagaatgacacctgcctccccggcactgcgccatcaaagacaaagtcatcctccaagctctcatcctgcagctctgccatcatggctctcagcgctaaaaaggcggcttcagactcctgcaaagaaccagtggccaattcgagggaatcctccccattaccaaaagaagtaaatgacagccaggcgcgggcgcctctccagtccacggtcatgaccaatgcagtttcacctgcagagctcacccctaaacaggtcacaatcaagcctgtggctactgctttcctcccagtgtctgctgtgaacgaaatgaagacggcaggatcccgagtcattaatttgaagctcgctaacaacaccacagtgaaagccacagtcatatctgctgcctctgtccagagcgccagcagcgccatcattaaagccgccaacgccatccagcagcaaactgtcgtggtgccggcacccagccgggccaacgccaaactcgtgccaaagactgtgcaccttgccaacattaaccttttgcctcagggtgcccaggccacctctgaactccgccaagtgctaaccaaagctcagcaacaaataaagcaggcaataatcaatgcagcagcctcgcaaccccccaaaaaggtgtctcgagtccaggtggtgtcgtccttgcagagttctgtggtggaagctttcaacaaggtgctgagcagtgtcaatccagtccctgtttacattccaaacctgagtcctcccaccaatgcagggatcacgttaccaacgcgtgggtacaagtgcttggagtgtggggactcctttgcagttgaaaagagtctgacccagcactatgacagacagagcatgcgcatcgaagtaacatgcaaccatggtacaaagaacctcattttttacaacaaatgcagcctcctttcccatgcccgtgggcataaggagaaaggggtggctgcagatacacgtggacaaaagacttgcactatctgccagatgctgcttcctaaccagtgcagttacgcatcacaccagagaatccatcagcacaaatctctctacacctgccctgagtgcggggccatctgcaggtcggtgcacttccagacccatgtcaccaagaactgtctgcactacatgaggagagttggttttcgatgtgtgcattgcaatgttgtatactctgatgtggctgccctgcagtctcacattcaaggttctcactgtgaagtcttctacaagtgtcctatttgtccaatggcatgtaagtccgccccaagcacacattcccacacctacacacagcatcctggcatcaagataggagaaccagaaataatatataagtgttccatgtgcgacactgtgttcaccctgcaaaccttgctgtatcgccactttgaccaacacattgaaaaccagaagttgtctgttttcaagtgtccagactgttatcttttatatgcacagaagcaacttatgatggaccatatcaagtctatgcatggaacattgaaaagtattgaagggcctccaaacttgggtataaacttgcctttgagcattaagcctgcaactcaaaattcagcaaatcagaacaaagaggacaccaaatccatgaatgggaaagagaaattggaaaagaaatctccatctcctgtgaaaaaatcagtggaaaccaagaaagtggccagtcctgggtggacgtgttgggagtgtgaccgcctgttcattcagagagatgtgtacatatcccacgtgaggaaggagcaagggaagcaaatgaagaaacatccctgccgccacctgtgccagcacaaccggatcaagcacaaaggcatcaggaaagtgtatgcctgctcgcactgcccagactccagacgtacctttaccaaacgattgatgctagagaagcacgtccagctgatgcacagcctcaaggaccctgacctgaaagaaatgacagatgccaccaatgaggaggaaacagaaataaaagaagacaccaagttccccagtcccaagcacctcttcattgtacacaagttaaaggaacctcagccagtgtccaagcaaaatggagctggggaagataaccaacaggagaacaaacccagccatgaggatgaatcccccaatggcaccgtgtcagacagaaagtgcaaagtagacactgatgaagctgcttttgagccagattataatgaaagtgacagtggaagttatgtatctgtaaaagatgaggaaacttcaggaaacacttctaaggtcctgaaagataagataatggagaaagcaggagaaagcaaaagaaagcctggacacagttggccaggccctgtatgcctgtgcttccaggagccagagagatgtccaggtaaacttcctggccacctccaggccctggctgcccgggagaggcaaagcagtggcagagcacagtcatcagagcaccacgtcatcctcacctacaactcaggacacccagagccacagtcatcagagcaccacgtcatcctcacctacaactcaggacacccagagccgtccaggaaagacccaggccctgcctggggtgaacgagtgcttcttaaagcacctaagcttcactag

SEQ ID NO: 4068 - DNA, 466 bp, Homo sapiens
  SIMILAR (13)..(441): 221254mologous to Dictyostelium discoideum myosin heavy chain kinase C,accession number AF079447,Smith-Waterman Score=108.
atggagaaaaacaaagttgttaagagagaagcagaagccaattctataaacctgagtgtttatgaaccttttaaagtcagaaaagcagaggataaattgaaggaaaactctgacaatgtgctggaaaacagagtcctggatgggaagctgagctccgagaagaatgacacctgcctccccggcactgcgccatcaaagacaaagtcatcctccaagctctcatcctgcagctctgccatcatggctctcagcgctaaaaaggcggcttcagactcctgcaaagaaccagtggccaattcgagggaatcctccccattaccaaaagaagtaaatgacagccaggcgcgggcgcctctccagtccacggtcatgaccaatgcagtttcacctgcagagctcacccctaaacaggtcacaatcaagcctgtggctactgctttcctcccagtgtctgctgtgaacgaaa

SEQ ID NO: 4069 - DNA, 311 bp, Homo sapiens
  SIMILAR (2)..(145): 951254mologous to Homo sapiens unnamed protein product,accession number AK001559,Smith-Waterman Score=250.
gcacctcttcattgtacacaagttaaaggaacctcagccagtgtccaagcaaaatggagctggggaagataaccaacaggagaacaaacccagccatgaggatgaatcccccaatggcaccgtgtcagacagaaagtgcaaagtagacactgatgaagctgcttttgagccagattataatgaaagtgacagtggaagttatgtatctgtaaaagatgaggaaacttcaggaaacacttctaaggtcctgaaagataagataatggagaaagcaggagaaagcaaaagaaagcctggacacagttggccag

SEQ ID NO: 4070 - DNA, 1937 bp, Homo sapiens
  SIMILAR (1003)..(1935): 881254mologous to Homo sapiens KIAA1629 protein,accession number AB046849,Smith-Waterman Score=1508.
atggtaggggaccagtggccaagggagaagaagaaagcagcagtgagactgccctgcgatggctctcttggcattaccccagggaaacgcagagtcagtgccatcaacgagccagggtccgcaccagcaatcctcaaagtccgcataaaaaccattaagatgtcttctggggaaatcaagagaacagtgaccagggtattgccagaagtggatcttgactctgggaagaaatcttctgagcagacggcgtctgtgatggcctctgtgacattccttctgtcatctccagcatcagctgccatcctttcctctctcctcagggcgcctctccagtccacggtcatgaccaatgcagtttcacctgcagagctcacccctaaacaggtcacaatcaagcctgtggctactgctttcctcccagtgtctgctgtgaacgaaatgaagacggcaggatcccgagtcattaatttgaagctcgctaacaacaccacagtgaaagccacagtcatatctgctgcctctgtccagagcgccagcagcgccatcattaaagccgccaacgccatccagcagcaaactgtcgtggtgccggcacccagccgggccaacgccaaactcgtgccaaagactgtgcaccttgccaacattaaccttttgcctcagggtgcccaggccacctctgaactccgccaagtgctaaccaaagctcagcaacaaataaagcaggcaataatcaatgcagcagcctcgcaaccccccaaaaaggtgtctcgagtccaggtggtgtcgtccttgcagagttctgtggtggaagctttcaacaaggtgctgagcagtgtcaatccagtccctgtttacattccaaacctgagtcctcccaccaatgcagggatcacgttaccaacgcgtgggtacaagtgcttggagtgtggggactcctttgcagttgaaaagagtctgacccagcactatgacagacagagcatgcgcatcgaagtaacatgcaaccatggtacaaagaacctcattttttacaacaaatgcagcctcctttcccatgcccgtgggcataaggagaaaggggtggctgcagatacacgtggacaaaagacttgcactatctgccagatgctgcttcctaaccagtgcagttacgcatcacaccagagaatccatcagcacaaatctctctacacctgccctgagtgcggggccatctgcaggtcggtgcacttccagacccatgtcaccaagaactgtctgcactacatgaggagagttggttttcgatgtgtgcattgcaatgttgtatactctgatgtggctgccctgcagtctcacattcaaggttctcactgtgaagtcttctacaagtgtcctatttgtccaatggcatgtaagtccgccccaagcacacattcccacacctacacacagcatcctggcatcaagataggagaaccagaaataatatataagtgttccatgtgcgacactgtgttcaccctgcaaaccttgctgtatcgccactttgaccaacacattgaaaaccagaagttgtctgttttcaagtgtccagactgttatcttttatatgcacagaagcaacttatgatggaccatatcaagtctatgcatggaacattgaaaagtattgaagggcctccaaacttgggtataaacttgcctttgagcattaagcctgcaactcaaaattcagcaaatcagaacaaagaggacaccaaatccatgaatgggaaagagaaattggaaaagaaatctccatctcctgtgaaaaaatcagtggaaaccaagaaagtggccagtcctgggtggacgtgttgggagtgtgaccgcctgttcattcagagagatgtgtacatatcccacgtgaggaaggagcaagggaagcaaatgaagaaacatccctgccgcca

SEQ ID NO: 4071 - DNA, 1833 bp, Homo sapiens
  SIMILAR (533)..(637): 391254mologous to Homo sapiens KIAA1629 protein,accession number AB046849,Smith-Waterman Score=41.
atgtgcatcgaagtaacgtgcaaccattgtacaaagaacctcattgtttacaacaaatgcaacctcctttcccaagcccgtgggcataaggagaagggggtggtaatgcaatgttcctactcaattttaaagccagtctcagcaggtcatatcatagtttctccatcgagcaatagttcttcttcatcttccactcttcagagccctgtgggaactggcatacacactgtcacaaaaattcagtctggcataactgggacagtcatatcggctccttcaagcactcccagcaccacagccatgcccctagatgaagacccctccaaactgtgtagacataatctaaaatgtttgaagtgtaatgaaatcttccaggacaagagatccctggctacacatttccagcaggctgcagatatgagtggacaaaagacttgtactatctgccagatgctgcttcctaaccagtgcagagaatccatcagcacaaatctccctacacctgccctgagtgcagggccatctgcagaaaaaagaggacagcaaatccatgagtgggaaagagaaactggaaaagaaatctccatctcctttgaaaaaaaatcaatggaaaccaagaaagtggccagtcctgggtggacgtgttgggagtgtgaccacctgttcatgcagagagatgtgtacatatcccacctgaggaaggagcatgggaagcaaatgaagaaacacccctgccgccagtgtgacaagcctttcagctcatcccacagactgtgctggcacaaccggatcaagcacaaaggcatcaggaaagtgtatgcctgctcacactgcccagactccacaggtacttttaccaaagggttgatgctggagaagcatgtccagctgatgcatggcatcaaggaccttgacctgaaagaaatgacagacgccaccaatgaggaggaaacagaaataaaagtagacgtcaaggtccgcagtcccaagtggaagttgaaagaaccggttctggagtacaggcctcccagaggagcaataactcaaccactgaaaaagctgaaaatcaatgtttttaaggttcacaagcacctctttgttgtacacaagttaaaggaacctcagccagtgcccaagcaaaatggggctggcgaagataaccaacaggagaacaaacccagccacgaggacgaatctcccaatggcgtcatgtcagacagaaagtgcaaagtgtgtgcaaaaacttttgaaactaaagctgccttaaacactcacatgcagacacatggccacgccgaagggtgtttaaagcagccttgcaggtcgctcctttcccagccgcggataaaaactgaagccaggaatctaataaggaatgctgatttcctcaattccattttgaggaatggggaaggttattctaaagaaaaaaagaatgggactggttttctgggcagatctgcaaggctggctttaggagcacaaggagggaaaagttggcgtttcctgttctgggtgttactgccaaacgttctggtgcttagagttgggatgcacgacgtcaaccaccgacttatcaatgcagccggctgtgtatcgcaattggccgttaccttaagcactgagccacatgggattagttcagccatttcaagagtgcccaggcattgccacccctctggagagaattctatggctacatccctgaatgtcaaccgttccatttctaggcttgcagcaggctctggtgtcttagctatggatctcccaatacctgctggtcacagggccatagagactgggcttctaggaacagaagacacagagcagtga

SEQ ID NO: 4072 - DNA, 1154 bp, Homo sapiens
  SIMILAR (181)..(495): 601254mologous to Homo sapiens Human secreted protein, SEQ ID NO: 8138,accession number G04057,Smith-Waterman Score=298.
caaatgtcccacgtttatttacatatgaaatgtgtttcatacagttatgatggatggagtgcataacacctgacagcagcaagaccttttgaggaaccgaacattgactacagtatatcatgcaagtatctatatatacacaaaagaattccttttcttaaaaaaaaaaaaaaaaaaaggtacaaaacatgttcagggataaatccaagatccaaaatgccaaagaaaaacccaaaccaaacccaaaaaataggtctctctcagagaactataaacgaaagggacagaagagtacctctgctgcattttaataaagcagaactaccgacgttaaatatacttcttgaaatggctgaactaatcccgtgtggctcagtgcttaaggtaacggccaattgtgacacacagccggctgcattgataagtcggtggttgacgtcgtgcatcccacctctaagcaccagaacgtttggcagtagcacccagaacaggaaacgccaactcttttgacagcaaaggattaagtcagctgatttttttttctatcaagagccagagaaatacttgatattcttagctgtgtttctgtaatagttaggttaataaattacatgacaaaaaaccctggactatataaaatctattggtctaactacgtatttgtaacttttacagtagtccagccctttcgttactttccctccttgtgctcttaaagccagacttgcagatctacccagaaaacctgtcccattttttttttctttagaatagccttccccattcctcaaaatggaactgaggaaatcagcattccttattagattcctagcttcagtttttatccacggctgggaaaggagcgacctgcaagactgctttaaacacccttcggcatggcctgaagacaaaggcacgtccacactggagtgcagttgtctcaaatgtgaactcactccctcagggcaggcacatcgaggaagtgctaagacacttaaaagttcctagtgtttttgagacccacaattacttacaatttatgtagtgaattctaaaaattaaaaacactaaaaaaggcattattttagcctgtaattagttaacccattcaaaatccaaaaatacaaaatggtttatttgaattcaggaactgc

SEQ ID NO: 4073 - DNA, 417 bp, Homo sapiens
  SIMILAR (43)..(330): 401254mologous to Torpedo marmorata male sterility protein 2- like protein,accession number AJ272073,Smith-Waterman Score=202.
ctgaaagtggagacggacggcaggatggattcacttggcgacatggcggggagctgggaagacggacaccgacctaagtcaatgttagtctaccactgtacgtctggtaacctcaatccctgcaaccggagcaaaatgtgattccaggtcttggcaacctctgaaattccaactccatttgcgagagctttgaggaggccatatgctgatttcaccacaagcaacttcacaacccagtactggaatgccatcagccagcaggcccctgccattatctgtgacttctatctgtggctcattggaaggaaacccagctaccgaaggaagataccctcatcaacccaattttacaaatggagaaatagaagctcagggaatgtattgcgggcgctctggaggatacacgctaggtcctat

SEQ ID NO: 4074 - DNA, 678 bp, Homo sapiens
  SIMILAR (154)..(474): 891254mologous to Homo sapiens Human immunogenic prostate tumour protein sequence SEQ ID NO:380,accession number Y82019,Smith -Waterman Score=495.
atgggcgtgggcaggcctgctggccacctgcccctctgtgtcctgctgctggtcctaagcacgacccctcttgcctggcccaagctgctcccaaccacactggcagcctactggatggtgctcacccacattacagactggaaaaaagcaaaaacatccatcaaggagcagcggagaaataagtggactgctctacatctggcctctgccaatgggaattcaggagtagtaaaactcctgctggacagacgatgtcaacttaatgtccttgacaacaaaaagaggacagctctgacaaaggccgtacaatgccaggaagatgaatgtgcgttaatgttgctggaacatggcactgatccaaacattccagatgagtatggaaataccactctgcactacgctatctacaatgaagataaattaatggccaaagcactgctcttatacggtgctgatatcgaatcaaaaaacaaggttgaagaagaaatgaagaagcatgaaagtaataatgtgggattactagaaaacctgagtaatggtgtcactgctggcaatggtgatgatggattaattcctcaaaggaagagcagaacacctgaaaatcagcaatttcctgacaacgaaagtgaagagtatcacagccacactgaattcttgccatcccgtatctacccctag

SEQ ID NO: 4075 - DNA, 685 bp, Homo sapiens
  SIMILAR (573)..(442): 431254mologous to Torpedo marmorata male sterility protein 2- like protein,accession number AJ272073,Smith-Waterman Score=99.
  misc_feature (1)...(685): n = a,t,c or g
tttttttttttttttttattcaagatcaattttatttgttgtaaaaacaaacaagcgttatgttccagacaaacagatataagtgagtagacttatgccctggtgcctccttggctcttcacaggatgcaaaaacaaatcctgccagcaggaggtggcagattgcagaggtggctggttgctctttcagccagcttggccttgtctgggtttccttccaatgagccacagatagaagtcacagataatggcaggggcctgctggctgatggcattccagtactgggttgtgaagttgcttgtggtgaaatcagcatatggcctcctcaaagctctcgcaaatggagttggaatttcagaggttgccaagacctggaatcacattttgctccggttgcagggattgaggttaccagacgtacagtggtagactaacactgaccttaggtctgtgaactgcagcacaccatcctacagttagtgggagactgacggctgtatcacctggaattggaattaagtctcccacagccattggagtagcttttatggacacaagaaaccctttcccagccggtgtccgtcttcacagctccccgccatgtcgccaagtgaatccatcttgcgccccctcnttcnnnnngnnngtnccagtttgcagttcttagtcccgggccctgnnaatc

SEQ ID NO: 4076 - DNA, 2064 bp, Homo sapiens
  SIMILAR (568)..(1077): 541254mologous to Homo sapiens Human immunogenic prostate tumour protein sequence SEQ ID NO:378,accession number Y82017,Smith -Waterman Score=445.
tttttgctttcaagctttctttgaactttactactgaatgatttatttgcaactcattattctgttgtagtggtgaagagctacttatgtctctttaagccaatatatatttaagattacaataatgatataatatatatttcactatctagatttgattttgacacaatgataagctgattggttcacaattaaatggacaaattttccacaagtaagagatgaaactcctggcttggaaatcctggggattgacaggttgaatgtccttggtctgtggtgagcatgttcacatttcaacacatgagatctggtgtgctttccgtatcagctcctcagattttgtgaaaaactgggtttccttccaatgagccacagatagaagtcacagataatggcaggggcctgctggcctgatggcattccagtactgggttgtgaagttgctggtgggtgagatcggcatatggcctcgttgaagctctctcaaatggaattggaatttcaaaggttgccaagacctggaaacctgggggaaaaaagagactagaaaattttatggctatcgaagaaatgaagaagcacagaagtactcatgtcggattcccagaaaacctgactaatggtgccactgctggcaatggtgatgatggattaattcctccaaggaagagcagaacacctgaaagccagcaatttcctgacactgagaatgaagagtatcacagggatttctccaagctctgtctgggttctgctgccaatggtgttgtccatgtagaagtcaaaatgtgtgtgtataatgggaaaggagagaggcaggaggagaagatgaagggattaatatccatgaaccttgtagttgaagaagaaatgaagaagcatgaaagtaataatgtgggattactagaaaacctgactaatggtgtcactgctggcaatggtgataatggattaattcctcaaaggaagagcagaacacctgaaaatcagcaatttcctgacaacgaaagtgaagagtatcacagcctgggcgacaagagtaagacttcatttcaaaacagcaacaacaacaacaacaaacaacaagaacaacaacaacaaaacccaacattttctaatacaaggaaactcactaagctttataaggcccccatccctccaagtattatcctttccggctgccccaacattaatgacagcaactggcaggaaattgagcatggaatgcagacggcaggcttgccaacaaggcctctttcccacggcctgcagcagaaaggggctgctttccgctgcttgggctgcaaatgctctgagcccttcaccggcagccttattttacagaaggcgaaaactaacacccagaaatggcaagctacttacccaaagtcacagaacgaacaacttgtaccgtcagtgggtaaaagctacaggtgctcaacaccagcccagcccatgaagacagccgtggggcataaaccctgcaaagccacaggtgcagagctgcccaaggccttgggagcccagcccttacatccctgtgccctggatgtgggacaaggtttcaaaaagggtaattttggagctgtaggattgaatggccttctgggtttggagtttcatggggtctcgggggtcttgttagtgggtcctggtgatgggggtctaatcagtgagggtgtggtcagggaagacctgatgtgtggggtctggtcagcaggaacctggtcagtggggactgctgagcgctgcttggagaagccaggtgcattgcacgttatcgagggccctctggacagctgggatggcccagtgatgcccaatggcccggtcaaaagtagacaaagcagttgtttggatggacctgggagatgttgctcagagattctgacaggacaaagccatggtaacaagaagccagccagagccagttcaaaatctagtcaatcgatcaatgaccgaccactggctgtgctcaccaaccaatatcagtgtgagcagcttgcttctgaaagacagccaagcagcaacagctgctccatcagaatagacagtgcctga

SEQ ID NO: 4077 - DNA, 411 bp, Homo sapiens
  SIMILAR (86)..(133): 561254mologous to Homo sapiens Human Zcytor5 epitope-bearing region,accession number W70854,Smith-Waterman Score=44.
ggcaagttaatgcttcctggcagcaccaggaagccgcaggtacctgtggacaggaaaatgggtcatgagggagtgtttgtgtggcaggcaggcttgcgtgccaggcccggccccagcctccccttctcacacggactcacactccatctccactggcctctggctcttccagtcgggccacgtcctctccatgtgaggcaggggacttaggtgtgctcacttgcagctgggacttggtgtccatgggaggcttgaagacaggaggaagccggttggcaggccccagggagggctggtcctgctcgggtaggctggggtggtacaggtttgacttctgccgaggttataataacgatctaacgatgactggtgttcatggggtgctttctggctcagaagacgccttcatat

SEQ ID NO: 4078 - DNA, 771 bp, Homo sapiens
  SIMILAR (201)..(767): 311254mologous to Mus musculus alpha-2 type VI collagen,accession number L06343,Smith-Waterman Score=116.
atgctcatcagccacaagcagctgtcaccgcagctcctctctctgactctgcctttatcagaaggcaaggcgggctgggcaggagaatgcccaaatccgcccagcaaagactctccagtacaaggaattggagacctccaccagttaccaaaaatgcagataagatacagcatccatgctgacgatggctccgtgccacgggccggtctgcccaccacacccagggtggagacccaggagtggttccagggtcatccttcctgcaccccctgggcaccacccctggccaaggcccgagagccagaaatgggcttggcaccttccagggctgctccaccggctggcaggtgcaagaaacgtgctttggtccaggggggtggctgggggatcgccatctggtgggacctgctgctactggcgctcgctgtctgcctgcagcgcgtggtccggtggggccttacacccagcagtcccaacgggcaagctgaaagggcagccttggcccaggtgccaggcaccagagaacttatgactgactgccaagaccctgcggagcagctggcctgggctctccacctgcctgacaccccatatcagaggagacagaaaatcagtggggcctgcatggccctcctcagccagcctgggcaagaccagaccacgggtgtcaacccctacgctgtcaccctccctgaagaggaagccagggagggtgacagcaggagggccgatgcctggctgcttctccacctcatcggtccccacgactga

SEQ ID NO: 4079 - DNA, 1119 bp, Homo sapiens
  SIMILAR (270)..(893): 321254mologous to Homo sapiens collagen type I alpha 1,accession number X98705,Smith-Waterman Score=119.
atgctcatcagccacaagcagctgtcaccgcagctcctctctctgactctgcctttatcagaaggcaaggcgggctgggcaggagaatgcccaaatccgcccagcaaagactctccagtacaaggaattggagacctccaccagttaccaaaaatgcagataagatacagcatccatgctgacgatggctccgtgccacgggccgcacacaaaagggggctgagaaaaagaacactgaaaaccatttctctccctcggcaagagtcagccttccctttccatggtcagggtggagacccaggagtggttccagggtcatccttcctgcatcccctgggcaccacccctggccaaggcccgagagccagaaatgggcttggcaccttccagggctgctccaccggctggcaggggggtggctgggggatcgccatctggtgggacctgctgctactggcgctcgctgtctgcctgcagcgcgtggtccggtggggccttacacccagcagtcccaacgggcaagctgaaagggcagccttggcccaggtgccaggcaccagagaacttatgactgactgccaagaccctgcggagcagctggcctgggctctccacctgcctgacaccccatatcagaggagacagaaaatcaatggggcctacatggccctcctcagccagcctgggcaagaccagaccacgggcgtcaacccctacgctgtcaccctccctgaagaggaagccagggaggtccccagaaagccgcagtctctcagcaaattccacgggctgggcaggaaggtacgcactgagatcctactgaatgggggcctccagatggggatcaaggaggccccagggagtcctgcaggggtctccaggggggccgaggacagtgcttgtgtgactggtcccccaacacctctgagatttagtatcctcatgcgtgaaatggggactgaaaagcaggatcctcccatggacaccaagtcccagctgcaagtgagcacacctaagtcccctgcctcacatggagaggacgtggcccgactggaagagccagaggccagtggagatggagtgtacctgcggcttcctggtgctgccaggaagcattaa

SEQ ID NO: 4080 - DNA, 337 bp, Homo sapiens
  SIMILAR (337)..(218): 971254mologous to Mus musculus dynamin,accession number L29457,Smith-Waterman Score=220.
  misc_feature (1)...(337): n = a,t,c or g
tatagatatttatagaacagggcaagggcataccacagaaggggcacaagttttcaccaacggtcacacctgaatgtatcagctcaccactacaacagattaagtcacagatgaagggggctggctttggggctgggggagccactgtcaagtcacagaacagccgtccaggcaggcttggaaagggaggtctccgagaagaggagggatctgtttagaggtcgaaggggggcctggggctctcaggacgggatggacttgcctgacccgatcggctggggaccccgggcggggcgcggttggggcgcnagggcacctgagggggagggccgaaagg

SEQ ID NO: 4081 - DNA, 453 bp, Homo sapiens
  SIMILAR (417)..(331): 411254mologous to Gadus morhua metallothionein,accession number X97269,Smith-Waterman Score=64.
ctggtggcctgttctctctgtccctccagagtgccggctgcccggcaggctcccttcaggctgagttcgtggccctgccccctggtggccagagccggcttcacaggacaagagccagctaagttccaggggctttccaggaaaagtgtcccttggaaagggtatggccttttcacccctccaaacagcaccctagaaatggcttggcctttcccctcccctgagctccacagagaacacagccagcagaggacacacttccccgtcatccagaaatgggtttgattctcagccaagggacagcaggactggtagagagtgtcaggccacacagctgcctgcacagcactcccatgcggaggtcttgcactttggaggggcaatgtcgggacagctttctcttgttgggccacaagactccaagaggacagcacggttgactgattcccagca

SEQ ID NO: 4082 - DNA, 1858 bp, Homo sapiens
  SIMILAR (1412)..(1218): 401254mologous to Chlamydomonas reinhardtii vegetative cell wall protein gp1,accession number AF309494,Smith-Waterman Score=76.
tttttttttttttttttttttttttttttttttttttttttttttttcattccccatcatccagaaatgggttttattctcagccgagggacagcaggactgggtagaaactgtcaggccacacggctgcctgcacagcacccccatgcttggtagggggtgggagggatggcgggggctggctgtccacaggccgggcatgacaaggaggctcactggaggtggcacactttggagttggattgtcgggggcacaagcgttcttttggtaggttgggccacaaggcccccacaaggatagcacagtgactgattcccagcgctagagggcgagggcggttggcccatgtgtagggtgtgtatatatatgagtatttatagatatttataggaacaggggcaagggcataccacagaagggggcacaaggtttttcaccaacggtccacacctgaatgtattcagcttcaccactaccaacaggattaagttcacagatgaaggggggctggctttgggggctggggggagccacttttcaagtcacagaacagccgtccaggcaggcttggaaaggggaggtctccggaggaagagggagggatctgtttaggaggtcsgaaaggggggcctggggctctcaggacgggatggacttgcctgacccgatcggctggcagttggagagaaagcagagagaaaacgggagagagaaaagtgaggagagagctggtaaggcaagcgcagcacacggccggggccggccgcgccgcagcagtggtgggagggccggggaggggaggctgcaggtgtgggtgtggcaaggttcctggaaaaggggctggaagggaaaggggaggaagatggagggaggagccgtagcttcacagatagcgcctgggggctgtggcggccctccccaccccacacacgctggcccttctcaacacggcaaccccaggcagggcaacccgcaaattcaaggctgaatgctcgggccccctcgggcttcccctcttctctggtcaccctgtcttcccaacccaactggcctggggccaccccttgccttggggagccccatgcaacagccacccaggcctgatagagaaagaacactgcttgaaccaggagggtgaaactaaaagggatggctggagggagcgccggaggcccctctgggtgttcagaaagcccaggcccctctgaagggaccctgggggaggcagggagggcaggcagccggatgccagggcccatagacttataagtctaagaggggaccctcagctggtcggggggctgcaggtctcgtaaggtgaagctgggcccttcctgctgggaaaagcagaagagcgagagtcagtggcaggagaatggggggtgggctcactgggcggagctcagctgggccagcaggcacggtcgtccccttggctgaatggcacaagtgaccctaggagcaacaggccaaggtgcgtgaagcccgctggctggctacggtgcttcagctggggccagggacactgccttcagtcacactagcagctatgacggtacctggaagggagggaagggggctgtgtgtccctgcctggcctgtgaggtatgtcgtgggatgaccgtgtgtatgggactctcaagcttttaccctaggtcaccactggattgccggcagatagaggaggtgggaccctgactctcacccctgctctacggtggatttggctctcagcactcccaggctgggagctggatgccctacccagggagcatcactcagactgcacaccacgcacggtgtgcccaggataacgttcctaggcctctggccgcctcagagtccagacgaaatcgt

SEQ ID NO: 4083 - DNA, 1704 bp, Homo sapiens
  SIMILAR (669)..(1664): 301254mologous to Rattus norvegicus GABA-A receptor epsilon- like subunit,accession number AF189262,Smith-Waterman Score=235.
atgcccatccttcaaccaaactacagtgaacaagggatagtaggcacttattggcttaagccaatccagacctactctagagctgggggtgagatcaatctcggtgaaaacaacagagctgaagatatgtgcatcatgacggtaaacatttcttggttatttagaaacagcccatgggcccagcgctcagcagtgtccaacgggtctttttgctttcagatcactgggtcggggtctgctgctgacctctttaccaaaacagccagcccgctcaccacctcgcgaggacgttcccaggagtacgactcaggaaatgacacgtcctcgccaccctccacgcaaaccagctcagccaggtctcggggccaggagaaggggagccccagtgggggcttgagcaagagccgggagctcaacagtggcaacacctctgattcagggaactccttcaccacctcctcaccccagaacaagggggccatgttggagaatctctcccccaccagcaggggcagagagtcaaggggatgctatgctgttggccagaatgtgtcagatgccatcactagggctaatgagtcgaaccttcccacactcctctacaggaaaagccaggggatttcagtcaccgtgtctggaatgtgccgaagtgaagaagtccagtttggtcccatccacagcccggagctcacccatgaaagggtgttcccgcagctcctcctatgccagcacccgatcctccagtcactcgtcccaatccccaaatcccagggcttcccccagggtaaggactattattacctgcattttatagacaagaaaacggcccagggaaacgaaatcatctgccaaggtcacacagctactattcctccaagtctggcaagaggagcccgcccagcagaagctctaggtcccgccgcagccctagctactcccgctacagccccagcagcccaaacagtcccgcagacataccccagaattcacatccccagccctcagcctctacagaccgtccccatattcagagcccccagttcttacccacgcaccagggcctgcgtaacattcacgtcctcacccctgcagcacctgccctgctatgatgcccacctgcaaatgctgacacccctgcacaagcccagcccccacccctacggtactaacaaccctcgcagactcttaccgcagccccgtcatcctccctccggtctcccttgcggcaacgtgcagaccccatcccgtgacccagtgggggagcgggatcccaaatacagtgagaaggactcgcagcagcgggagcgcgagcgagcgcgtcggagacgtcggtcctactcgcctatgagaaagcgccggagagactccccgagccacctggaggcccggaggataaccagtgcccggaaacgccccatcccctactatcggcccagcccctcctcatccggcagcctcagcagcacctcctcctggtacagcagcagcagtagccgctcggccagccgcagctactcccggagccggagtcggagccggagccggagacggagccggacccgcacgagcagcagctctagctcccgcagccctagtccgggctcccgcagccggagccggagcaggagccggagccggagccggagcaggagccagagccggagctacagctcagcagacagctactccagcacgaggcgctaa

SEQ ID NO: 4084 - DNA, 1068 bp, Homo sapiens
  SIMILAR (608)..(1066): 801254mologous to Homo sapiens Polypeptide identified by the signal sequence trap method,accession number Y02377,Smith-Waterman Score=609.
atgcttctcttggaactcaatgcacctgagcatgtgttggaaaccattaatttccagacacttacagctttctgcaatacattccacatcttgaggcctaccaaagctcctggctttgtatatgcctggcttgaactgatttcccatcggatatttattgcaagaatgctggcacatacgccacagcagaaggggtggcctatgtatgcacagctactgattgatttattcaaatatttagcgcctttccttagaaatgtggaactcaccaaacctatgcaaatcctctacaagggcactttaagagtgctgctggttcttttgcatgatttcccagagttcctttgtgattaccattatgggttctgtgatgtgatcccacctaattgtatccagttaagaaatttgatcctgagtgcctttccaagaaacatgaggctccccgacccattcactcctaatctaaaggtggacatgttgagtgaaattaacattgctccccggattctcaccaatttcactggagtaatgccacctcagttcaaaaaggatttggattcctatcttaaaactcgatcaccagtcactttcctgtctgatctgcgcagcaaccgtacaggtatccaatgaacctgggaatcgctacaacctccagctcatcaatgcactggtgctctatgtcgggactcaggccattgcgcacatccacaacaagggcagcacaccttcaatgagcaccatcactcactcagcacacatggatatcttccagaatttggctgtggacttggacactgagggtcgctatctctttttgaatgcaattgcaaatcaagctccggtacccaaatagccacactcactacttcagttgcaccatgctgttacctttttggcaggagggccaattcgggaaggccattccaaggaacagatcacaagagttctcttggaacggttgattgtaaataggccacatccttggggtcttcttattaccttcattgagctgattaaaaacccagcgtttaagttctggaaccatgaatttgtacactgtgccccaga

SEQ ID NO: 4085 - DNA, 984 bp, Homo sapiens
  SIMILAR (748)..(981): 641254mologous to Homo sapiens unnamed protein product,accession number AX059850,Smith-Waterman Score=232.
atgcaggccaatttagaaatggcaggaaatggggtgacttccatgggaatggagcctctggccattcctcacatctactgctgctctgagggcacctgcaacttcagcaacacagagaaccactgcctgagagcggccttgtcaatgctgctaaatggtactccatttgcctttgttattgaccttgctgcacttgcttcacgtcgtgaatacctcaaacttgataagtggctcacagataaaattcgagagcatgggccttccgtccacggcctgttccctagccgggtgctctcgcctgctcttggccctggggcttttcctggacgccataattgtggttcctgtgtggccccccagtctgggcttcccggagttcatcctgtggaattaccttggtcaattagtaagttattccgcttgcgttctccagcaaacttcagtgatgttttggggtcaagatcgaaagttcttctgcttatgtgcaccctcaagtactgcgggatgcagctcggcgctgatgctactagagtcgacatgctaaccttcctacctaccctgggattcataaggaacaacgactatacggacgacaccaaggcgtcggaactcacggaactctcccacaacttacacgcgtacgactcggtaactggggtgccgggcgacgagactgaatgtagtaaaactgtctccacttgggcatacacggcagaaagtttgcaaggctacatggcagccaaacttcttggcagaaatctgacggtgcccagtcgctatctctttttgaatgcaattgcaaatcagctccggtacccaaatagccacactcactacttcagttgcaccatgctgtacctttttgcagaggccaatacggaagccatccaagaacagatcacaagttggtacgtgaaaggatataaagttaagccaatgcttactggcattcggaaaaattttaccaatttacatgtgaactag

SEQ ID NO: 4086 - DNA, 399 bp, Homo sapiens
  SIMILAR (377)..(246): 531254mologous to Homo sapiens multiple inositol polyphosphate phosphatase-like protein,accession number AF084944,Smith-Waterman Score=90.
atggcttgggaaaagaggaaagagaactggggggcatcggaaaagcccagtgtctgggggaggcgggagagcatccatggcgggtgggaggaccgggacagcacactggccgcccggggggtcacctgcgacgttcggcggcggcaagccaaggtggtagtgctgccacagcccctgcaggaaagctgcgctgctattcatgcagcggtgcttggaactggtgatgagccgcaagcggacgaagtttcactgcttgaaagggcccggaagagcgaggccagacgcagcggcagctgttggaaatactgccgtccttttttactagactgccgtcattcagatcgggtccacaaaagccagtcggcagcgcttaacccagttggggtggcggtattctag

SEQ ID NO: 4087 - DNA, 957 bp, Homo sapiens
  SIMILAR (88)..(798): 991254mologous to Homo sapiens FcR-II protein sequence,accession number W69232,Smith-Waterman Score=1264.
atggccaacgtctgtaatcccagcactttgggaggcagaggcgggcggatcacaaggaggcccgaggacccaggcagccccgtttattcagtccccccagcttcataccaccctaagccatggctgggagctcagccggctacagttgtgacccctggggtcaacgtgaccttgagatgccgggcaccccaacccgcttggagatttggacttttcaagcctggagagatcgctccccttctcttccgggatgtgtcctccgagctggcagaattctttctggaggaggtgactccagcccaagggggaatttaccgctgctgctaccgaaggccagactgggggccgggtgtctggtcccagcccagcgatgtcctggagctgctggtgacagaggagctgccgcggccgtcgctggtggcgctgcccgggccggtggtgggtcctggcgccaacgtgagcctgcgctgcgcgggccgcctgcggaacatgagcttcgtgctgtaccgcgagggcgtggcggccccgctgcagtaccgccactccgcgcagccctgggccgacttcacgctgctgggcgcccgcgcccccggcacctacagctgctactatcacacgccctccgcgccctacgtgctgtcgcagcgcagcgaggtgctggtcatcagctgggaagactctggctcctccgactacacccgggggaacctagtccgcctggggctggccgggctggtcctcatctccctgggcgcgctggtcacttttgactggcgcagtcagaaccgcgctcctgctgttcccccaggtaccacatcgagcaactactccctgggtaacttcgtacgactgggtctggctgccgtaattgtggttatcatgggagctttcctggtggaggcctggtacagccggaatgtgtctccaggtgaatcagaggccttcaaaccagagtga

SEQ ID NO: 4088 - DNA, 270 bp, Homo sapiens
  SIMILAR (1)..(270): 1001254mologous to Homo sapiens myosin,accession number L29140,Smith-Waterman Score=460.
tgtgtcatcattagtggagagagtggagctgggaagacagtggcagccaaatatatcatgggctacatctccaaggtgtctggcggaggcgagaaggtccagcacgtcaaagatatcatcctgcagtccaacccgctgctcgaggccttcggcaacgccaagactgtgcgcaacaacaattccagccgctttggcaagtactttgagatccagttcagccgaggtggggagccagatggtggcaagatctccaacttcttgctggagaag

SEQ ID NO: 4089 - DNA, 919 bp, Homo sapiens
  SIMILAR (449)..(502): 771254mologous to Mus musculus myosin-I,accession number X97650,Smith-Waterman Score=84.
ataagaatgtccaggaaaattctgccctacaggcagcaatgtgccggaaaatgcttatcgtctgtcagacccagtgtgtcatcattagtggagagagtggagctgggaagtcagtggcagccaaatatatcatgggctacatctccaaggtgtctggcggaggcgagaaggtccaggtgagacgaggaaaacagaaggataagctgggtcgccctcacctgcatggtagtgcagccccacccatctgcactcctgcctcagtgtgacttcttcccactccacctgcctctgccccagcacgtcaaagatatcatcctgcagtccaacccgctgctcgaggccttcggcaacgccaagactgtgcgcaacaacaattccagccgctttctgctggaagggcctcccaggagcaaaggcagaacctgggcctcatgacaccggactactatactacctcaaccaatcggacacctaccaggtggacggcacggacgacaaagcgactttggccaaccacaacctccgggagctggacttgagtttcacgacctgggagactggggcctgtggttgctggctgaggggctgcaacatccgcctgcagactccagaaactgtggcctcacggagactggggccactcaacgggtacgggcaccctagtccggaaggagacagccccagcgtcaaaggcgggaagtctgtccagataggagagattgtagaaaaaagacacaagacaaagagagagaagaaaaggcagctgggcctgggggacactaccaccaagacgtggagaccggtagtggccccgaatgcgtggccggccgttatttattgtatacgaggcaaaagggcaggaaggcggagccaggtgtgcgagcggaacgtgaaagtggaccaggagcgtgaccgctga

SEQ ID NO: 4090 - DNA, 466 bp, Homo sapiens
  SIMILAR (18)..(281): 391254mologous to Acanthamoeba castellanii Myosin- IA,accession number AF085185,Smith-Waterman Score=95.
atggccgcgcgctctgcccgccccgcctcctcgctgcgggaagggtcctgggccccgggcggcggtcgccaggtctcagggccgggggtacccgagggtgacgctaaggtggggccgagcctcgaccgggtgcgcctagaggtcgagtgctgccgccctccgctgggtctggacagttctcggcggcgacaccagctcaaaacggcctccccgccctccgcggacctgggtcgcgcccaggaatccgatccaaggctgtgaggcctgtccctttgggaagggtgggtgtttatttccgggatgcactcagagcctctggacagtcaggtcggaaactttgctgtattgggaacactctgtcacctacttccttctcagttgggaaggaagtgccaagaaaacatgaaacaaaccaaaaacacgaaaaagggattctctgtatggaagccgtgaagcctcaaaaata

SEQ ID NO: 4091 - DNA, 1647 bp, Homo sapiens
  SIMILAR (1)..(735): 961254mologous to Escherichia coli O-SUCCINYLBENZOIC ACID-- COA LIGASE (EC 6.2.1.26) (OSB-COA SYNTHETASE) (O-SUCCINYLBENZOATE- COA SYNTHASE),accession number D90856,Smith-Waterman Score=1238.
atgtggcgctggttatacgctggtgcgcggatgacggtacgtgataaacagccattggagcaaatgctggcaggctgtactcacgcttcactggtgccaacacaactctggcgtttgctggttaaccgtagttccgtttccctgaaagcggtgttacttggcggcgcggctatcccggtcgagttgacggaacaggcgcgcgacatggggattcgttgcttttgcggctatggtctgaccgagtttgcctccacggtgtgtgcgaaagaagccgacggcctggcagacgttggttcgccgctgccgggtcgggaagtgaaaatcgttaataatgaagtgtggctgcgggctgccagtatggcagaaggttactggcgtaacgggcaactggtttcactggttaatgacgaaggctggtacgctacgcgcgatcgccgtgagatgcataatggcaagctgaccattgtcggacgtttagacaatctattcttcagtggcggagagggtattcagccggaagaagtcgagcgcgtaattgctgcacatcctgcggttttgcaggtgtttatcgtccccgttgccgacaaggagttttgtcatcgaccggtggcggtgatggagtatgaccacgagagcgttgatcttagtgaatgggtgaaagataagctggcccgttttcaacacctggtgcgctggctaactctgcccgcggagcctaaaaacggcggtattaaatttcacgtcagcgctaaaagagtgggtgcactaaccacgcggatggaagccgcacagcaacatgctgacgataaaattcgccagatgattaacagcgagcagcgcctcagtgagcagtttgaaaacctcgccaaccgtatttttgagcacagcaatcgccgggttgatgagcaaaaccgtcagagtctgaacagcctgttgtcgccgctacgtgaacaactggacggtttccgccgtcagttcaggacagcttcgttaatgaaagtagccggatgggattacctgatgaattcactctacaacgcgaattcgagcgcgctcgtcaacagggtgcgctacaaatggattgcggcttttgaaggtggtttcactggtatcgtcgccaccctggataccggtcgccccggtccggtgatggctttccgtgtcgatatggacgcgctggatctcagtgaagagcaggatgtcagccatcgcccctaccgcgacggttttgcgtcatgtaacgccggaatgatgcatgcctgtggtcatgatggacataccgccattgggcttgggctggcgcatacccttaaacagttcgagtccggactacatggcgtcatcaaactgatttttcagcctgcagaggaaggtacgcgtggcgcgcgggcgatggtcgatgcaggtgtcgtagatgatgttgattattttactgccgtgcacattggcactggcgtacctgcgggcactgttgtgtgcggcagtgataattttatggcaaccaccaaatttgacgcgcacttcaccggtaccgccgctcacgcaggcgcaaaaccagaagacggtcacaatgccttgttggcggcacacaagccactcttgcactgcatgcaatcgccccgcacagcgaaggagcttccagagtaa

SEQ ID NO: 4092 - DNA, 1812 bp, Homo sapiens
  SIMILAR (1251)..(379): 1001254mologous to Escherichia coli ugpA protein (AA 1- 295),accession number X13141,Smith-Waterman Score=1487.
ctacccaggaagataactctgccctggagaaagcggcatgttctcttcatcacgacgataggcacaggtaacgtgcttcgctccctggcgcacggacgtacgcacgcagtccatcgcagtgtcgccaccgccaaggaccaccacgcggaccgcaggcatggaagttccaaacccgtgtgcgctgatgtctgtaggtgtgagcctgtcgcatgggccgtagtacacatgcttgggcgctgtcggtgggcggggctcgccctcgtgcggggcttcagcaggtttgtggttgttgccgcccgtgtgatggcaggtgttgggaactaaagaattttcaaggtttgtggagctgtgccctgtgtggtacgggccgttgttagtcttgctttcaacatagcggaactgcaccaccgtcagcacgatgacgaggaacatcaacaccaccgactgtgcggcagacgaagccagatccagtccggtaaaaccttcgcggtagatcttataaatcagcgtcgtggtggcctgaaccggcccgccggacgtggcggcgtcgatcaccgggaaggtgtcgaagaaggcatacaccaggttcactaccagcaggaagaaactcaccggggcgataagcggcagcgcaatcttaaagaagcggcgaatcggccctgcaccgtcgatggctgcggcttcgatcaacgaacggggaatggattgcagcgcggcatagaagaacaggaagttgtagctgatttgcttccatactgaggcaaacaccaccagaaacattgcctgaccgctgttttgcgcgtggttccagtcgtagccgaactccgcgagaaaatgggtgatcagcccgcgaccggggttaaacaggaagatccacaatacggcggcaacggcgggagccacggcgtaaggcagcaacattaaggtttgatagaaacggctgccgcgcacgatgtactccaccagcgccgcaaagaacagcgataccagcaaaccgctgacggtgacaaaggtgctgaattttatcgtcgtccagaaggagtcgagatagtagctgtcatggaacagcgtgacgaagttatccaggccgacaaactggctggagaaaccaaacggatcgacgctttgtagcgagtaccacaacgcttcgcccgcaggccagataaaaaagataacggtgatgatgagctgcggcgcgaccagcagataaggcagccagcgcgagcggaacaccggacgggatgatgacattacggttaattcctgaactgtgccggatgcgcttcgcttatccggcttcgtcgatttctcaaagcggcgcagcaactgatttccacgctcaacggcggtatccagtgcctgctgtggtgtcttcttaccggtccacacgctctccagctcttcatccacaatcacgcggatctgcggcatgttgcccagacgcagccctttggtgaacggcaacggcggcttattcagcatctgacgcgtcgcggtatccgcccctgggtttttctcataaaagccctgctcacgggtcaggtcatacgctgctttggtgattggcagataaccggttttctgatgccactcggcagcgttttctggcttcgcgaggaaatcgaggaacttcgccacaccggtatacgtttctttatctttaccctgcatcacccacaggctggctccggcgataatggcgtttaggggggatctttcgctcggggtctccgccattgtgtgtccgcccgagttattatccctcgttaatgtgtgccgcttcatattacttgttcgatcatccaggatcat

SEQ ID NO: 4093 - DNA, 2340 bp, Homo sapiens
  SIMILAR (1246)..(2058): 941254mologous to Escherichia coli branching enzyme (EC 2.4.1.18),accession number M13751,Smith-Waterman Score=1429.
atggggcttgatgatggcgtggcgcgcaatctcgggctggccttgtcgcttgcgcgtctggcagacgctgtcgctggcgatgtcatcagtgcgctgctggtgaacgctgtggggattatcgggcttatcgggttgttcgcgaccgctgtggccaaaattgtgggggagcggtggttcgccagacgccattttttcgatattgcgccgtggatggaggaaatcgccatcaagaaacgcggcatgaagttgatgcgccacttcactggcgaccgcagatttgccgctgcccgatacgcccatcaagacgtaaatgtggtgatcatggttagtcgtgctcaaagtggtgcccccacaatacaagaattaaaaatgttacgggtaactgttatcggtaacattgtccagccggacaatatcagaagcaatatccatccatgccttaagtgtataagtattcgccacgaatacgcgccagcaggcgttcagcgccaatactgcccatccgctcacgcggcgtcagcacgctcgcaagtcgtggctccatcacctgaccaatgtcatgaccgtggaaaccggcaatcgccatatcgtcaggaacttttaaccccagacgctgacattcaaacgccgcgccgaccgccaggtcatcattcgtacagaacacgccatccagctgcggatattcccgccgcgcctggcgaatcagttcaataccggaagaaacagaccgaacttcataccggaatattcaatgtggtaaccatccgccagttcctgctcggcttccggctggtcaaacgggtgacggtgacataccgccacgcccgcgatggcaaagcccgcaaacagcaccgcgtaaaccgccagacctgccatcatcaggaagaacaaaatcccgatgttcaggtcggcaaccacccaacccggactgactggcacaatcgcaaaggccagcagcagcgaggtaaaggcaatcatcggtgccagggtaaagatgacgcgatccgagaatttcgggatccagtcttctttaaagaacattttgatcatgtccgcaaccagctggagcgaaccgccccagccaacacggttaggtccgtaacggttctggaacagacccagcaggcgacgttcgccaaagctcatgaatgccccgcaggtgacaaccaccagcaggatcaccaccgctttgaggatgatcctcaagatgcgcgccagccagcaccggagcatgccgacatttcctcggaagccacctgcctggcggcaggcctcggcgaattcaccggggcgggacgggatatgggcggtctgggcttctggtacaagtggaacctcggctggatgcatgacaccctggactacatgaagctcgacccggtttatcgtcagtatcatcacgataaactgaccttcgggattctctacaactacactgaaaacttcgtcctgccgttgtcgcatgatgaagtggtccacggtaaaaaatcgattctcgaccgcatgccgggcgacgcatggcagaaattcgcgaacctgcgcgcctactatggctggatgtgggcattcccgggcaagaaactactgttcatgggtaacgaatttgcccagagccgcgagtggaaccatgacgccagcctcgactggcatctgttggaaggcggcgataactggcaccacggtgtccagcgtctggtgcgcgatctgaacctcacctaccgccaccataaagcaatgcatgaactggattttgacccgtacggctttgaatggctggtggtggatgacaaagaacgctcggtgctgatctttgtgcgtcgcgataaagagggtaacgaaatcatcgttgccagtaactttacgccggtaccgcgtcatgattatcgcttcggcataaaccagccgggcaaatggcgtgaaatcctcaataccgattccatgcactatcacggcagtaatgcaggcaatggcggcacggtacacagcgatgagattgccagccacgttcgtcagcattcactaagcctgacgctaccaccgctggccactatctggctgggcacagtggcgacatttggcacggttatctgccggatgcgcgcccgggtttgcgttatggttatcgcgttcatggccctgcaacccgccgaggggcatcgcttaacccgcgaagagcgtctaacagtcgccatctctaaggccttcagattcaggcaacgctattcgaagcggagtagactctccattcgcactcggcaagacgttagtgtcatcattgtccacggcttaccattgcatgacaaggctaaaccacatgacggcaacgtgaacgactcttaa

SEQ ID NO: 4094 - DNA, 3201 bp, Homo sapiens
  SIMILAR (2439)..(2480): 641254mologous to Escherichia coli K12 putative membrane protein,accession number AE000312,Smith-Waterman Score=54.
tcatcggcgcggcatagacggcctgtttatccagcgcgccgcgacaaacgccacgtacagcgggaagaggatcaccgcgatcccgggatcagcatggtatggcttgctttcaacatagcggaactgcaccaccgtcagacgatgacgaggaacatcaacaccaccgactgtgcggcagacgaagccaatccagtccggtaaaaccttcgcggtagatcgggcgataagcggcagcgcaatcttaaagaagcggcgaatcggccctgcacgtcgatggctgcggcttcgatcacgaacggggaatggattgcagcgcgcatagaagaacaggaagttgtagctgtatgcttccagtaggaccgcgattggcgattgccggtttccacggtcatgacattggtcaggtgatggagcccgacttgcgagcgtgctgacgccgcgtgagcggatgggcagtattggcgtgaacgcctgctggcgcgtattcgtggcgaatgtcttgatgggcgtatcgggcagcggcaaatctgcggcgccagtgaagtggcgcatcaacttcatgccgcgtttcttgatggcgattcctccatccacggcgcaatatcgaaaaaatggcgtctggcgaaccactaatgacgacgatcgcaaccgtggttgcaggcgcgaacgacgccgcgtatctatgcagcgcactaataaagtgtctaaatcgtggttggtccagctagtccctcgcccgggaattttcccgaccacccgtcctggacctttggaagcttctcccacttctttctggtcgattggcatccgtttcatggtgtgtgccccgggaagccctgcatcgaccatcgcccgcgcgccacgcgtaccttcctctgcagctgaaaaatcagctttgatgacgaccatgtagtcacggacatcgaactttcccgtcatcagtaaaaagtgtgacccggttccggccttcggtcgcgctgttggtgctgctcggtctgctcgccgccctctcgcgctttcctccggtcgtccgcggctcggtgctcgttcgcgctcttcctgtgccactccgttggccgcgtgcttcgccagccgtgctggtctcgctttccgtcgctctgtccgcttcttcttcgttactacccgttcctgctcactgtcgtcctcgccctgtcctcctcctgtctccgccgctggtcggtctcggatcgtggctgtcctcctgccttctcttgtgttgctgctaccctctctatacgacgcacccccgctctctggccctgcagttggtgtattctctactcgtcgtgtggtctgtcgcgtggtggtctcttgccacggcattgatgtggttcgtgcgtgtggcttgttcgcttcgtgactatcagttgtccgtgggtagtgtggtgtcttgttctgtgttgattctctttgtgtgtgtgtggtgtgtcttggtgtctccgtgtgtgtttggcttgttctgttccgttggttgttggctgtcgcgttctggctctcgtgttttggtctattggtgtttggtctgctgtgtgtgggcggtttctttgctctgtgcgtggtctccttgctcggttgttcatgctgtcgcttgggggctatcgtactggctggtcccgtgtggtctctgcttgcgtgtggctcggtgctgtttgtttggttgtaggcttgtagggcaatgtagtaaagttggcctgtggaaactcccagtatagtcgagtatatgttggacagtgtgaagtctggaaggatgctctggtcacacgggcaaacgctgcaaggcccattcgttgtgactgcgcctgatatgttccggtattcgatgtcggtagccacgtcgtaccgggttctcaccaccagctggccggcacctactcggcgtggatcctcccgtgtcttgttctcaaacttcaaggctgaggctgaggggcttggtggtttggcaggactggcggtcttgggtgggtgcagggactctccctggactgtgtgaacgaggtattggcatccggcagctgtcccagtccctgctccctgccattgtggagcggctgaggacgccaagtggcgggtgcggctggccatcattgagtacatgccctcctggctggacagctggtgagtgaggaggccttggaacccttggtttctcctgtagggagtgagttctttgatgagaaacttaactccttgtgcatggcctggcttgtggtcatggtgagtaccttcacaggagcagcaagaggagatgggagctccagaaggcaggatggattggctggggctgtggcggtcagtggaggaggctaggtcactccccacgccgctggatgctcgtatggaccagctcgcatgcttgtagagtcctagagaagtgttgagtgggaggaggacgaaacagatcacccggggttgcctgctgggttgaagatggcaatggtgacgccgtccgtgacggatggggcattggacgccgactgtcaggccagccaggcgatgcggcgtaagcaacaaccggaatgactggcagcatgatgctgcgacagctgacgcggacaggcagatgaacatgccggtgattgcatgcgggcgctggtggctggcagggcgcaggagatgaatggggcacagggcaaaacgttgttgaaagggtggggatgaagcgagcgcccggcgcggaactgaaaactgaagatttgctgcgaggaagacacccgcgatgatgcaatgatagcctggatgccgcgatgacccggagtgctgccacgggcagatgcgtgggcaaacgtgctgaaccatggcgttggctggaaaaaagcgcagttgaagtgccacgtggatggccacaggtgcagcaatgatggcgtggggatgaaagcggcaaacagcaatgcagccgtggcgcacacggttgtgctgctgaatagcggtggcgacgctacccagacgccgcgttcccaatatcgtcaccgttgtccgtagggaagtgtgtgtcaccatggtcatagcatagttttggatgtgggacagtggtagtggtggtgtcgtgttgtgttcaagtagtggaaggtcgttgacgtcgtggtcagccaccaaggtgcgtggtagggtcacaagggtagatggtgtagtcgtcaaggcgtcacgtgtcaagtccgtcacggcggtcacgtagcaccccat

SEQ ID NO: 4095 - DNA, 1944 bp, Homo sapiens
  SIMILAR (1061)..(1930): 571254mologous to Homo sapiens phosphatase 2A regulatory subunit,accession number J02902,Smith-Waterman Score=647.
cggttctcactcttgacgttgtccagctccagcaccttggcaactcccccagcttggacggccggcccgccgctccatgggggagtcatctgagcacagctgctggccgcagtctgacaggaaagggacggagccaagatggcggcggccgacggcgacgactcgctgtaccccatcgcggtgctcatagacgaactccgcaatgaggacgttcagcttcgcctcaacagcatcaagaagctgtccaccatcgccttggcccttggggttgaaaggacccgaagtgagcttctgcctttccttacagataccatctatgatgaagatgaggtcctcctggccctggcagaacagctgggaaccttcactaccctggtgggaggcccagagtacgtgcactgcctgctgccaccgctggagtcgctggccacagtggaggagacagtggtgcgggacaaggcagtggagtccttacgggccatctcacacgagcactcgccctctgacctggaggcgcactttgtgccgctagtgaagcggctggcgggcggcgactggttcacctcccgcacctcggcctgcggcctcttctccgtctgctacccccgagtgtccagtgctgtgaaggcggaacttcgacagtacttccggaacctgtgctcagatgacacccccatggtgcggcgggccgcagcctccaagctgggggagtttgccaaggtgctggagctggacaacgtcaagagtgagatcatccccatgttctccaacctggcctctgacgagcaggactcggtgcggctgctggcggtggaggcgtgcgtgaacatcgcccagcttctgccccaggaggatctggaggccctggtgatgcccactctgcgccaggccgctgaagacaagtcctgggccgtccgctacatggtggctgacaagttcacagagcttccagaaagccagtggggcctgagatcaccaagacagacctggtccctgccttccagaacctgatgaaagactgtgaggccgaggtgagggccgcagcctcccacaaaggtcaaaagagttctgtgaaaacctctcagctgactgtcgggagaatgggaacatgttccaaaattttgccttgattcaaggagcttgtgtccgatgccaaccaacatgtcaagtctgccctggcctcagtcatcatgggtctctctcccatcttgggacaaaggacaacaccatgcgcagacacctgctttgcccctcttgcctggctcagactgaaggatgagtgccctgaggttacggctgaacatcatctctaaccctggactgtgtgaacgaggtgattggcatccggcagctgtcccagttccctgctccctgccattgtggagctggctgaggacgccaagtggcgggttgcggctgggccatcattgagtacatgcccctcctggctggacagctgggaagtggagttctttgatgagaaacttaactccttgtgcaatggcctggcttgtggatcatgtatatgccatccgcgaagcaagccaccagcaaccctaaagaagcttagtggaaaagtttgggaaggagtgggcccatgccacaatcatccccaaggtcttggccatgtaaagagacacccaactacctgcacctgatgactacgctcttctgcatcaatgtgctgtctgaagtctgtgggcaggacatcaccaccaagcacatgttacccacggttctgcgcatggctggggacccggttgccaatgtccgcttcaatgtggccaagtctctgcagaagatagggcccatcctggacaacagcaccttgcagagtgaagtcaagcccatcctagagaagctgacccaggaccaggatgtggacgtcaaatactttgcccaggaggctctgactgttctgtctctcgcctgatgctggaagag

SEQ ID NO: 4096 - DNA, 1359 bp, Homo sapiens
  SIMILAR (366)..(247): 1001254mologous to Homo sapiens cisplatin resistance related protein CRR9p,accession number AB045223,Smith-Waterman Score=206.
ctaagcacacatacatgctttcaatactgaaaccagtgcgcacatccgcactcccgcctccggctcccgcacagacgctgtgcacgcagctctctcgcgtgtcttctcgtttgctctaagaccacccttccaggtggggattgcggcatccactgggatgagccaggccagggcctgcagccctgggagcctcgggtggatgcagcgtagctcattcacaccaggcgccggccgtgtgcggcacataccgaactgctgcagggagtacacggcgtcctgcatgtggatccagaagcgcagccgccccagtgagaccttgtcgtaggacacggtgaggggcagctcggtggtggagcggtttatgacggcgctgagcttggcctgcagagccctgccagggccgtaagcagccccaggccccagcatcacccggcgtttcacaatcagtgctgaactcaaagacacgaggttgccagagaacatgtggtccctctcgtgtgcactcacgccatcgcggtgcccgacaggggtgctgcggtgaggcccaccaggcgcagggatgctgcggcccctccgagcccacttgttggagatgtcacactgcagtgccccagccagtgaaggggctccaatgcacctgaccaggtacgcctgccgtgtgtgggttagaggcccaggtccagcctccagcgctctggcctgagcgtcttcagtgcagacggcagcacttctgggcctgagccggcctctgggaggaaggatgctggctggccagcgcgtgtgcttcgttttggcaccttgtccagaggcgctcccgaggctggtgctgactggggtccgtacagtcctggcagtccaggcgcagcagcgtccggggctccgtggcttggacaacctcaggctctgcagggggcaggcggccagctggtgggatctgagaatggtgaacgggggacaggaaccaagccccgtgtgagtgtgagtgttgcttatggtgaaatagcccttcccgctgacacaagctggagctcccgtgcaggggctgccgtgctcctgggtctgagccggagcacaggtggtgagggccccgggaacatgggacacgggggacagtcgcagatgctgacattggaggtcctctgactctgccatcaggacactgcttgaattcctctcttgaacacagagctgcttccctgtggccactttccgttggactgcgcccgtctcttgatttcttctactgttttcctgcgagaatcctggtctgaccgggacacgaacacaggccgtatatactggatcagaggatggggacctgcagggcgtggccggctggagcccatggccagcagccat

SEQ ID NO: 4097 - DNA, 588 bp, Homo sapiens
  SIMILAR (139)..(336): 301254mologous to Homo sapiens Human secreted protein sequence SEQ ID NO:161,accession number Y87122,Smith-Waterman Score =67.
  misc_feature (1)...(588): n = a,t,c or g
atggaggncccacttgaaatggagctcaatcttataagtatagaagtctggggtgagcgtctaggaatttcaacaggcactgagaaaatgcccactctgaagcacagaacatggcctgtggaatgctcgaaagcttccagcctggagggcgacctgagatccctgactgattggaagtcatttccgctttttcagcagacccagcctcagctgatgattcacctggttgctggaagaagaaagatgactgctcgatggtacacctccacagacaggaatggcagcagcaacaatgctgtcaatgaaagtaaaggaagcaaccaccaggagagcgaaggaataaatgtgggagccacccagtctgtggtactgtgctatggcagccttagcaaactcatccagatctcttcctgtcctacggtgggctgtccaccttcccacagctccttcagcatcctcgatggggccaatgctggccaagagaagcagagcacgaccgaaccagagcccgcgctcttcctcctgccacccagccgtggagcatttggaccctttgggctgctgtctgatctaagacggcagctctga

SEQ ID NO: 4098 - DNA, 477 bp, Homo sapiens
  SIMILAR (127)..(306): 661254mologous to Homo sapiens Amino acid sequence of protein PRO235,accession number Y13373,Smith-Waterman Score=209.
atgctggggggctccaggcctctgttctttgtggtgcatcaggctctggccctaggaagagttctctttagatgtcagcagccccctcccttgtttccaaagccagattgcaagtggctcttaaccattgacgataacttctgtggcctggacatgaatgctcccctgggagtgtccgacatggtgcgtggaattcccgtcttcacggaggacagggaccgcatgacgtctgtcatcgcatatgtctacaagaaccactctctggcctttgtgggcaccaaaagtggcaagctgaagaagagaaggcatacgcagacaatgcacatcagagacctgttggagcggctctgtggtgggttacaagggggcggcagcaatacagaaaacacgaccatgatcttggctctcattagactatgcaacagatgtgccagcgtctcctctcttcttatttgtgtccagtgctacccaatgtga

SEQ ID NO: 4099 - DNA, 612 bp, Homo sapiens
  SIMILAR (137)..(12): 381254mologous to Homo sapiens Human secreted protein, SEQ ID NO: 7376,accession number G03295,Smith-Waterman Score=75.
ctatgcagctgtagtttgttcattcttattgctgtgtagcattccgttgtgtgggtacaccaacattgacttttccatgttattgttgatgaacatttgaataactttcagtttttgccttctatgaacagtgctgcccttgatactctcatgcaggtcttctggtgaccatatatattcacatttctgttggaaatatacctgcttctcttggccagcattggccccatcgaggatgctgaaggagctgtgggaaggtggacagcccaccgtaggacaggaagagatctggatgagtttgctaaggctgccatagcacagtaccacagactgggtggctcccacatttattccttcgctctcctggtggttgcttcctttactttcattgacagcattgttgctgctgccattcatcccgatcccatctctcctagtaacttctgtgcgagcctgagcaagttgcatggcctctgtggatatcagtgtgctcacctgtatgtggaggtgtaccatagagcagtcatcttccttcctctgcctcctcacccctttatgggagtagagctggtgccatgtgaccaggatctgtccgttcatctctttgggcat

SEQ ID NO: 4100 - DNA, 1314 bp, Homo sapiens
  SIMILAR (358)..(558): 621254mologous to Homo sapiens Amino acid sequence of protein PRO235,accession number Y13373,Smith-Waterman Score=209.
atgggaagaccagatctgattttgtcttccatcctggggctcagatggctgctgctgccccagagcagcagggcaggaagaaggggagccatcagagaggcttcagatgctgagcaggtcaccttctctggagggacagtgcctgcccgcacctcttctgggagggagtggaggagcctgctggggccagatatggagaccacatccctcttctgtatagatacgaagaccacattcctctttgtgtatagatacggagaccacatccctcttgtgcctgagcagagcggcctggagcccctgctcatctgggctgacccagggcttttccacgtgaggcttttccacctcttaaccattgacgataacttctgtggcctggacatgaatgctcccctgggagtgtccgacatggtgcgtggaattcccgtcttcacggaggacagggaccgcatgacgtctgtcatcgcatatgtctacaagaaccactctctggcctttgtgggcaccaaaagtggcaagctgaagaagggaggtcaagtgcagcaccatgagtttgggatcaggacacccccaggagcctgggccagcaaggcgctcagagacaaccctcctgaggcagtgtgtttataccttcttccaattaaactgaaggtgcccccacagtactgcccgaagagagctaaggactggggggtttattccaactcggtcacaccaggatggattgaggagtgcagccagatgtacccaaggaaccacccagtgagccagctggagctgtgtgcatgtgtgtgcaagtgtgagagccatgtgcagttactgctgatggcattagaggggacaggaataaaacatggtcgttatttggatgggtccttaggtgacttcactccaatccaaggaccaagctctggggatcagaagtccaaaataggattcactggcctgaaaccaagctgcacgcttgatgcacaatttcgaagcccagaaagaaaggtcagggtggtacttctacagcctcaggctgccacccagtgcagggatacacagaacctgcttctcttggccagcattggccccatcgaggatgctgaaggagctgtgggaaggtggacagcccaccggccatttcccaggcagcttcttgttaaagccaagaaatgcccctcacagaacccaagccccttttcttgcaagggtgataagtcagcttttggctttgtggtttgcaaattaactgcaaagaaaatggagaggcttcttgttgttgttcttaagaaggcaatgcagaagcaggaacaagaactttga

SEQ ID NO: 4101 - DNA, 237 bp, Homo sapiens
  SIMILAR (33)..(161): 791254mologous to Homo sapiens calbindin D28K,accession number S46006,Smith-Waterman Score=189.
atgaaattttggtgccatgactcggatcaggggacctcccttgggagatcaatcccctatcctcctgctcttcgctctgtgagaaagatccacctaccacctcaagtcctcagaccaactagcccaaggaacatcacaccaattttcaatcagagacaggagacgagttttatccgtggacccaaaacttcagcaccggtcacggactcgggaagacagtcttcccttggtgtttaa

SEQ ID NO: 4102 - DNA, 1779 bp, Homo sapiens
  SIMILAR (594)..(4): 921254mologous to Homo sapiens similar to yeast SSU72; similar to P53538 (PID:g1711532),accession number AC005521,Smith- Waterman Score=964.
tcagtagaagcagacggtgtgaagaaagctttttcctgccttctcctccatttgcaagagcagctcctccagattgtcttccatgtcgtctgactgctgcaggcactggcaaatctcacagatgaggaaagctcccagggtggcatcttccagggtatcttggatgtccatgttgatcacgtgcacaggctgaaaggtctgctgttctctggaacacagatcttccaccactgtgtcatagacactctcctcacaggtgaagatgacatcaaaggaatcagtgcactcctgaaatctttctggaccgggcttgattctctcatttcttcccaagatgtgtaagattccgttgcgggtgtagcattctctatctttcctgaggaggtcattgtacatctccttatatgttgttgcaaaatcataaactacaggacgattgggtcttggtcctggtagcctcacatgagattcagttccaaaagaccggacacttatcccttttctcctgaggatgctgtgggcctccatgctcctgttgacattgctcacgcacaccacatccaccctgagtgtggaggatagcatgatggtggccacttccattgtgagagttacccagagcatctgtgatggtcctgtaggcttccgaggtgatcgggcaatgtcagtcttcagctggaaggcgaggttaattagatcctgttgtggggtttgagggccggaatttaatttttgaagttttttcctaatgttgggagtggactgggtgataaaatgcatattaagaataaggcggccctctggcccttctgggtctagggcagtaaagcgtctaagggtcactgctaagtgggccatgtactgggctgggttttcatctttaccttgggtagtttctttcagcttgtcataattaacagctttgtaagctggggaatctgcctgatagttccattggggatcctctcgaggaactgctctaataccttcctggaggtctggctcatgaagccggtggttatcagcatgagattgggctctgaaacgtggatgaataatcaggtgtccccgtgtgattaaacaccaagggaagagtgtcttcccgagtccatgaccggcgctgaagttttgggtccacggataaaactcatctcctgtcttgggcagtatggccattttcacgatattgattcttcctacccatgagcatggaatgttcttccatttgtttgtgtcctcttttatttccttgagcagtggtttgtagttctccttgaagaggtccttcacatcccttgtaggttggattcctaggtattttattcttgctttgaatgtgtcccagagattctggtatgttgtgtctttgtgctcgttggtttcaaagaacatctttatttctgccttcgtttcattatgtacccagtagtcattcaggagcaggttgttcagtttccatgtagttgagcggttttgagtgagtttcttaatcctgagttctagtttgattgcactgtggtctgagagacagtttgttataatttctgttcttttacttttgctgaggagtgctttacttccaactatgtggtcaattttggaataagtgcggtgtggtgctgagaagaatgtatattctgttgatttggggtggagagttctgtagatgtctattaggtccacttggtgcagagctgagttcaattcctggatattcttgttaactttctgtctcattgatctgtctaatgttgacagtggggtgttaaagtctcccat

SEQ ID NO: 4103 - DNA, 654 bp, Homo sapiens
  SIMILAR (308)..(454): 811254mologous to Homo sapiens Human secreted protein, SEQ ID NO: 5210,accession number G01129,Smith-Waterman Score=218.
caagggttgctttacctccccaggccctgacctccagcctctgactccccagcaccatcagactgctagtctttgcataactgtttagcttcacagctgctgctttccattcaggtgctgagaatcttgccctgaacatgcacagctaaggaattggcaaactcctcaaggggaatcagcacgctgaattttggcccaattttctctaaggctgcctcttctatctcaggtctcagactccatggtatccctgaactgcaacttctttattcctagcctgctgagtttcactcgcgtccatgtgaagaaattttggtgccatgactcggatcaggggacctcccttgggagatcaatcccctgtcctcctgctctttgctccgtgagaaagatccacctacgacctcaggtcctcagaccaaccagcccaagaaacatctcaccaattttaaatcaggtaagcggcctcttcttactctcttctccaacctctctcactgtccctcaacaactttcttctttccattcttcaatctctcccttctcttaatttcaattcctttcattttctggtagagacaaaggagacacgttttatctgtggacccaaaactccggcgctggtcacggactgggaaggcagccttcccttgg

SEQ ID NO: 4104 - DNA, 468 bp, Homo sapiens
  SIMILAR (178)..(2): 981254mologous to Mus musculus RNA polymerase II,accession number M12130,Smith-Waterman Score=297.
  misc_feature (1)...(468): n = a,t,c or g
gcgtcacattcttggcagacactccagcatagtggaaggtattcaaggtcatctgggtggcaggttctccaagggactgcgcagccagagcccccaccatttccccgggatgcgcaatggcttggttgaacttggactcaatctccccaagcagccagtcgaaggcctcccctctgagccagctgacgtgcccagagacttcttacacaggatgcccatgatcagctccccattctccaccaccaccttggtgtccccaggagagatgtgcttgtaagggccactgtcttcatcatcgggatgggtgctgtgggtacggatacaattgatgtgaccaggtatgatagggagaagacttgcttgcctgtccacaagggcaaaggctttaggatgccggctgtgggaccttcccatcccncgtcgncccgggnnttccggnccggtccgaaggtcatcaaggcttcaaan

SEQ ID NO: 4105 - DNA, 436 bp, Homo sapiens
  SIMILAR (222)..(332): 1001254mologous to Homo sapiens RNA polymerase II largest subunit,accession number X74874,Smith-Waterman Score=198.
  misc_feature (1)...(436): n = a,t,c or g
gtcgattcttacgaggaagtgcaagtatggcatggagatccccaccatatccccggcctgggggctgctggacccaccggcatgttctttggttcagcacccagtcccatgggtggaatctctcctgccatgacaccttggaaccagggtgcaacccctgcctatggcgcctggtcccccagtgttgggagtggaatgaccccaggggcagccggcttctctcccccaaaggctcaacctactctcccacttcccctggttactcgcccaccagccccacctacagtctcacaagcccggctatcagcccggatgacagtgacgaggagaactgagggcacgtggggtgcggcagcgggctagggcccagggcagcttgcccgtgctgccgtgcagttcttgcctccctcacggngcgtcacccccagcccagctc

SEQ ID NO: 4106 - DNA, 1260 bp, Homo sapiens
  SIMILAR (355)..(651): 651254mologous to Crassostrea gigas RNA polymerase II, largest subunit,accession number U10334,Smith-Waterman Score=370.
  misc_feature (1)...(1260): n = a,t,c or g
atggacaacaagttcggtgtggaacaacctgagggtgacgaggatctgaccaaagaaaagggccatggtggctgtgggcggtaccagcccaggatccggcgttctggcctagagctgtatgcggaatggaagcacgttaatgaggactctcaggagaagaagatcctgctgagtccagagcgagtgcatgagatcttcaaacgcatctcagatgaggangatgacctgactcacaaactggctgacatcgtgaagatcaacaatcagctgcggcgcaatgagcagaacggcgcagcggcccatgtcattgcagaggatgtgaagctcctccagttccatgtggccaccatgngcaagcaaatcttctccctcatcatacctggtcacatcaattgtatccgtacccacagcacccatcccgatgatgaagacagtggcccttacaagcacatctctcctggggacaccaaggtggtggtggagaatggggagctgatcatgggcatcctgtgtaagaagtctctgggcacgtcagctggctccctggtccacatctcctacctagagatgggtcatgacatcactcgcctcttctactccaacattcagactgtcattaacaactggctcctcatcgaggggaacactctgcggcagacgtttgagaatcaggtgaaccgcattcttaacgatgcccgagacaagactggctcctctgctcagaaatccctgtctgaatacaacaacttcaagtctatggtcgtgtccggagctaaaggttccaagattaacatctcccaggatgactacgggcctgagagccgtggctttgtggagaactcctacctagccggcctcacacccactgagttctttttccacgccatggggggtcgtgaggggctcattgacacggctgtcaagactgctgagactggatacatccagcggcggctgatcaagtccatggagtcagtgatggtgaagtacgacgcgactgtgcggaactccatcaaccaggaggacctggtgaaggacgtgctgagcaacgcacacatccagaacgagttggagcgggaatttgagcggatgcgggaggatcgggaggtgctcagggtcatcttcccaactggagacagcaaggtcgtcctcccctgtaacctgctgcggatgatctggaatgctcagaaaatcttccacatcaacccacgccttccctccgacctgcaccccatcaaagtggtggaggaaatttattaa

SEQ ID NO: 4107 - DNA, 543 bp, Homo sapiens
  SIMILAR (330)..(22): 951254mologous to Mus musculus RNA polymerase II,accession number M12130,Smith-Waterman Score=516.
  misc_feature (1)...(543): n = a,t,c or g
ttatacatgtgacacgctgacttctaggacccccattacctcttgcatcttgttctcatcgctgttcatgatgcgaatacggagcaccagcttctctgcattgtcatcattaaagatgcagttcaagtcgtcaccaaaaccagcattgatcttttcagcaatctgctccatggtgagcttccggtcagtcatgtgcttccgatccagctccacccgcaacagccagggggagattcgggccacatcaaagtcaggcatttcatagtagacattcacccattcctgatcctctgccaccaccgtgctctgggggttggggtcatagtagatggncttggctctctcagcatctcgagcggactggcccaacaggaagacagtaagcgaaggagtctttggcttcttggaaatgttgatgagctccttaagtcggggcacacccagcgtcacattcttggcagacacaccagcatagtggaaggtattcaaggtcatctgggtggcaggttctccaagggactgcgcagccagagcccccaccat

SEQ ID NO: 4108 - DNA, 3276 bp, Homo sapiens
  SIMILAR (1)..(324): 921254mologous to Mus musculus RNA polymerase II largest subunit,accession number U37500,Smith-Waterman Score=484.
  misc_feature (1)...(3276): n = a,t,c or g
atggatgatgatgtctntcctgcgctgcantcgagtccanacatgctgacagatatgaccctgcagggcatcgagcagatcagcaaggtgtacatgcacttgccacagacagacaacaagaagaagatcatcatcacggaggatggggaattcaaggccctgcaggagtggatcctggagacggacggcgtgagcttgatgcgggtgctgagtgagaaggacgtggaccccgtacgcaccacgtccaatgacattgtggagatcttcacggtgctgggcattgaagccgtgcggaaggccctggagcgggagctgtaccacgtggacgtgcttatggaagcagccgcacacgggagtggaatgaccccaggggcagccggcttctctcccagtgctgcgtcagatgccagcggcttcagcccaggttactcccctgcctggtctcccacaccgggctccccggggtccccaggtccctcaagcccctacatcccttcaccaggtctagttcaccgccgggaccctcgcttttctccccaggcagagctcttggtgcttcgtgatgggattcgcgagggctccctggatctggggcatgcacccctgggtccctacgcccggggacctcactacgatgccggcttcacactcctagtgcccatgttttcactggacggcactgaactgcaactggacctggaatcctgttacgcacaggtctgcctcccagagatggtgtgcggaacccccatccgggagatgtggcaggattgcttaggacccccagtcccaggagcacgtgattcgatccaccgaacggagagcgaagaaagttccaaggactggcaaagctctgtagaccagccgcacagctacgtcactgagcacgaggcgccgcggcgcgtgtgtccccgcggcaccaagtccctttgccagaagcagctcctcatcctgctgtccaagctacctcgccagccagccctctatgcgccctcctcctgtgacctgcgcttcaagaacggagctgggcacccctcccataacccccgcgccactccgaaatcgggtcccctcccaccccccatatccttgccgcatttcacagctgagtgtcgctttaaggagtgtgtctttgagaattactacgtcctgtacgcctctgctctctaccgccagcgtcgttctggccgggcctggtacctcggcctggacaaggagggccagacctcccaaactccaccagcgctgactggttctctggcagctctagtgactctctcctccatccaggtcacctacttccccttcgactggcagaattgcactatggtgttcagctcctacagctacgacagctcggaggtgagaaggtacccagaggcctacacctctccccctgcttcttccccaccccgggtcctggagttgccaggagtcccagcagctgcgttttctgatgtcctcaacttcatctacagcgcccggctcgcactgcctggtggtggaggggacggggcagctgtagcagagattggagctttggggcgccgtctgggcatctcccgccttcagggcctgggggagggaggtgatgcctggtgtggaaaaagcttcatccatcccaaacggctgcagacccatgaggcccagtgccgacgaggggccagcacgcgggggtctacagggctgggagctgggggcgctggccctggtggtcctgcaggggtggacgcctcagccctgcctccaccagtgggcttccgagggggccccgagcacgtggtgaagcgttcctacgtgaccctgtccagtctgaagagacacagcaatgtacactcgtggcggaggaagtacccctgccgctattgtgagaaagtgtttgctctggcggagtaccgcacgaagcatgaagtgtggcacacgggggagcgcagtgagaagacacccaatggaggctacaagcccaagctcaatacactcaagctctaccgcctgctccccatgcgggcagccaagcggccctacaagacctacagccagggagccccggaggctcccctttctccaaccctcaacacaccggcccctgtngcaatgccagccagcccgccgcctgggcctccacctgccccagagcctggccctccaccctctgtcatcacttttgcccacccagccccctctgtcattgtccatgggggcagtagcagtggtggaggggggagtgggacggccagcacaggagggtcccaagctgcctcggttatcacttacactgctcccccgaggccacccaagaaacgagaatacccacctcctccccctgagcctgcagccacacccaccagcccagccacagcagtcagcccagccaccgctgcagggccagccatcgccaccaccacggaggaggccaagggccggaatccacgggctggaaggactctgacttacacagccaagccagtgggcgggattggtggaggtgggggtccccccacaggggctggccggggcccctctcagctgcaggctccacctccactgtgtcagatcactgtgcgaataggggaggaggccatcgtcaagcgccgcatctcagagactgacctgcgtcctggggagctgagcggagaggagatggaggagagtgaggaggacgaagaggaggaggacgaagaggaggaggaggaggatgaggaggaatcaaaggctggtggggaggaccagctctggaggccctactactcctacaagcctaagcgcaaggctggagctgctggagctgccctgagccgccacgggcagaggcatgctgctgagcggcccgggggcaccccaacccctgtcattgcctattccaagggcagcgctggcaccaggcccggggatgtcaaggaggaagccccccaagagatgcaagtctcctcatccagcgggggtgaggagcccccagtagtggcaagcgggggcagctatgtatacccacctgtgcaggaatttccactggccttgattgggggcggccgggaacctggcggtggcaggggaaaatctgggagtgaagggccagtgggggctggtgagggggatcggatggaggggataggggctgccaaagtcactttctaccctgagccctacccgctcgtctatggcccccagctccttgccgcctacccttacaacttcagtaacttggccgctctcccggttgctctcaacatggtcctacctgatgagaaggtgttacggagggatgggcaggtaaactaa

SEQ ID NO: 4109 - DNA, 2976 bp, Homo sapiens
  SIMILAR (2404)..(2955): 971254mologous to Homo sapiens RNA polymerase II largest subunit,accession number X63564,Smith-Waterman Score=921.
  misc_feature (1)...(2976): n = a,t,c or g
atggctggagctctgaggggcccaggctccctgagccaggaggagaggagaaagtccaaggaaagatgcctccgctggcaccagtgctgccagccctctgatgccaccaatggcctgctggtggccctgctgggccgggcctacttctatgccctgctcaacgtcctcagcattggatgtgcctacagtgcggttcaggtggtgcccgctggcaacgctgccactgttcgcaaaggttcttccaccgtctgctccgccgtcctcaccctctgccttgagagccagggtctcagtggctacgactgcgcatgcccgctgcgcaccatcaagagagtccagttcggagtcctgagtccggatgaactgaagcgaatgtctgtgacggagggtggcatcaaatacccagagacgactgagggaggccgccccaagcttggggggctgatggacccgaggcagggggtgattgagcggactggccgctgccaaacatgtgcaggaaacatgacagagtgtcctggccactttggccacattgaactggccaagcctgtgtttcacgtgggcttcctgaacaacccaaagatcaaggatatcctggctaagtccaagggacagcccaagaagcggctcacacatgtctacgacctttgcaagggcaaaaacatatgcgagggtggggaggagatggacaacaagttcggtgtggaacaacctgagggtgacgaggatctgaccaaagaaaagggccatggtggctgtgggcggtaccagcccaggatccggcgttctggcctagagctgtatgcggaatggaagcacgttaatgaggactctcaggagaagaagatcctgctgagtccagagcgagtgcatgagatcttcaaacgcatctcagatgaggagtgttttgtgctgggcatggagccccgctatgcacggccagagtggatgattgtcacagtgctgcctgtgcccccgctctcncgccacaaacgtgtttctgaatctataaatgatagtgggcagtcctgcctcctggggtggtgtgaggatgagagctgtgctgtgtgcctgtccctgaagcagcggttgaagggcaaggaaggccgggtgcgagggaacctgatgggcaaaagagtggacttctcggcccgtactgtcatcacccccgaccccaacctctccattgaccaggttggcgtgccccgctccattgctgccaacatgacctttgcggagattgtcacccccttcaacattgacagcgtgacaactccgtacaatgcagactttgacggggatgagatgaacttgcacctgccacagtctctggagacgcgagcagagatccaggagctggccatggttcctcgcatgattgtcaccccccagagcaatcggcctgtcatgggtattgtgcaggacacactcacagcagtgcgcaaattcaccaagagagacgtcttcctggagcggggtgaagtgatgaacctcctgatgttcctgtcgacgtgggatgggnaaggcaagcaaatcttctccctcatcatacctggtcacatcaattgtatccgtacccacagcacccatcccgatgatgaagacagtggcccttacaagcacatctctcctggggacaccaagactgtcattaacaactggctcctcatcgagggtcatactattggcattggggactccattgctgattctaagacttaccaggacattcagaacactattaagaaggccaagcaggacgtaatagaggtcatcgagaaggcacacaacaatgagctggagcccaccccagggaacactctgcggcagacgtttgagaatcaggtcattgctgtcgttggacagcagaacgtcgagggcaagcggattccatttggcttcaagcaccggactctgcctcacttcatcaaggatgactacgggcctgagagccgcgagagcgttgagttccagaacctgggtacgcttaagccttccaacaaggcttttgagaagaagttccgctttgattataccaatgagagggccctgcggcgcactctgcaggaggacctggtgaaggacgtgctgagcaacgcacacatccagaacgagttggagcgggaatttgagcggatgcgggaggatcgggaggtgctcagggtcatcttcccaactggagacagcaaggtcgtcctcccctgtaacctgctgcggatgatctggaatgctcagaaaatcttccacatcaacccacgccttccctccgacctgcaccccatcaaagtggtggagggagtcaaggaattgagcaagaagctggtgattgtgaatggggatgacccactaagtcgacaggcccaggaaaatgccacgctgctcttcaacatccacnctgcgtcccttggagaacctgccacccagatgaccttgaataccttccactatgctggtgtgtctgccaagaatgtgacgctgggtgtgccccgacttaaggagctcatcaacatttccaagaagccaaagactccttcgcttactgtcttcctgttgggccagtccgctcgagatgctgagagagccaaggatattctgtgccgtctggagcatacaacgttgaggaaggtgactgccaacacagccatctactatgaccccaacccccagagcacggtggtggcagaggatcaggaatgggtgaatgtctactatgaaatgcctgactttgatgtggcccgaatctccccctggctgttgcgggtggagctggatcggaagcacatgactgaccggaagctcaccatggagcagattgctgaaaagatcaatgctggttttggtgacgacttgaactgcatctttaatgatgacaatgcagagaagctggtgctccgtattcgcatcatgaacagcgatgagaacaagatgcaagaggtaatgggggtcctagaagtcagcgtgtcacatgtataa

SEQ ID NO: 4110 - DNA, 940 bp, Homo sapiens
  SIMILAR (511)..(909): 1001254mologous to Rattus norvegicus neuroligin 2,accession number U41662,Smith-Waterman Score=720.
  misc_feature (1)...(940): n = a,t,c or g
atgggggatntgtctgtagttctgcggccgctgctggtggttgcagcagcgacggcgacaacgccggtggcggcggcggcggcgacgaacacagcgaagaagactgctactgtgatggttggagaaatggtggcaggagaaagaggagtactgcagatgggtcatgacatcactcgcttcttctactccaacattcagactgtcattaacaactggctcctcatcgagggtcatactattggcattggggactccattgctgattctaagacttaccaggacattcagaacactattaagaaggccaagcaggacgtaatagagacgtttgagaatcaggtgccccgcattcttaacgatgcccgagacaagactggctcctctgctcagaaatccctgtctgaatacaataacttcaagtctatggtcgtgtccggagctaaaggttccaagattaacatctcccaggggggggggtcccagggagggagggggggtcccccgatcagcatgtggctcctggcgctgtgtctggtggggctggcgggggctcaacgcgggggagggggtcccggcggcggcgccccgggcggccccggcctgggcctcggcagcctcggcgaggagcgcttcccggtggtgaacacggcctacgggcgagtgcgcggtgtgcggcgcgagctcaacaacgagatcctgggccccgtcgtgcagttcttgggcgtgccctacgccacgccgcccctgggcgcccgccgcttccagccgcctgaggcgcccgcctcgtggcccggcgtgcgcaacgccaccaccctgccgcccgcctgcccgcagaacctgcacggggcgctgcccgccatcatgctgcctgtgtggttcaccgacaacttggaggcggccgccacctacggggggtgctttagagtccccaaaaaggcgt

SEQ ID NO: 4111 - DNA, 1386 bp, Homo sapiens
  SIMILAR (594)..(139): 961254mologous to Mus musculus RNA polymerase II,accession number M12130,Smith-Waterman Score=767.
  misc_feature (1)...(1386): n = a,t,c or g
ttatacatgtgacacgctgacttctaggacccccattacctcttgcatcttgttctcatcgctgttcatgatgcgaatacggagcaccagcttctctgcattgtcatcattaaagatgcagttcaagtcgtcaccaaaacggggcaagccaggcagctcattgtccaccatggtggccacatggaactggaggagcttcacatcctctgcaatgacatgggccgctgcgccgttctgctcattgcgccgcagctgattgttgatcttcacgatgtcagccagtttgtgagtcaggtcatcctggttacgggcagagccctgcatcacaacagcaggccgcacggagagcgggggcacaggcagcactgtgacaatcatccactctggccgtgcatagcggggctccatgcccagcacaaaacactcctcatctgagatgcgtttgaagatctcatgcactcgctctggactcagcaggatcttcttctcctgagagtcctcattaacgtgcttccattccgcatacaactctaggccagaaacgccgatcctgggctggtaccgcccacagccaccatggccccgtgtgcggctgcttccataagcacgtccacctgactgtcccatcaccacagcccagctgcccaaagtgtgtgcccttcttctcacactactccctccttctgccctattcagaaattccactgtttccgtttcctcaaaggaacacttcatgagtggtcctgtgtcctggcggttgactccgtgtcgggtgatggccatcaagtggccacgacaggtcatggtatcacacaagagagccaagtgtcggtaattgacataggagccatcaaaggagatgacgtggtacagctcccgctccagggccttccgcacggcttcaatgcccagcacggggttcacgttcttctcactcagcacccgcatcaagctcacgccgtccgtttccaggatccactcctgcaggccttggattcccatctgcccgctttccagtcgggaaacctgtcgtgccagctgcattaatgaatcggccaacgcgcggggagaggcggtttgcgtattgggcgccagggtggtttttcttttcaccagtgagacgggcaacagctgattgcccttcaccgcctggccctgagagagttgcagcaagcggtccacgctggtttgccccagcaggcgaaaatcctgtttgatggtggttccgaaatcggcaaaatccccagtcttggcgaagttggtccagtaggtcatgaccacggcactgagcatgacgtcgttcttggagaagttcaggggaagaggtcngtggcacccaccatgggcacgccaaaacataaggcagttcatccccgtgcgccgcat

SEQ ID NO: 4112 - DNA, 402 bp, Homo sapiens
  SIMILAR (190)..(402): 1001254mologous to Mus musculus RNA polymerase II,accession number M12130,Smith-Waterman Score=360.
tccctgaagcagcggttgaagggcaaggaaggccgggtgcgagggaacctgatgggcaaaagagtggacttctcggcccgtactgtcatcacccccgaccccaacctctccattgaccaggttggcgtgccccgctccattgctgccaacatgacctttgcggagattgtcacccccttcaacattgacagcgtgacaactccgtacaatgcagactttgacggggatgagatgaacttgcacctgccacagtctctggagacgcgagcagagatccaggagctggccatggttcctcgcatgattgtcaccccccagagcaatcggcctgtcatgggtattgtgcaggacacactcacagcagtgcgcaaattcaccaagagagacgtcttcctggagcgg

SEQ ID NO: 4113 - DNA, 802 bp, Homo sapiens
  SIMILAR (373)..(771): 1001254mologous to Rattus norvegicus neuroligin 2,accession number U41662,Smith-Waterman Score=720.
gtggtggtggagaatggggagctgatcatgggcatcctgtgtaagaagtctctgggcacgtcagctggctccctggtccacatctcctacctagagatgggtcatgacatcactcgcctcttctactccaacattcagactgtcattaacaactggctcctcatcgaggggaacactctgcggcagacgtttgagaatcaggtgaaccgcattcttaacgatgcccgagacaagactggctcctctgctcagaaatccctgtctgaatacaacaacttcaagtctatggtcgtgtccggagctaaaggttccaagattaacatctcccaggggggggggtcccagggagggagggggggtcccccgatcagcatgtggctcctggcgctgtgtctggtggggctggcgggggctcaacgcgggggagggggtcccggcggcggcgccccgggcggccccggcctgggcctcggcagcctcggcgaggagcgcttcccggtggtgaacacggcctacgggcgagtgcgcggtgtgcggcgcgagctcaacaacgagatcctgggccccgtcgtgcagttcttgggcgtgccctacgccacgccgcccctgggcgcccgccgcttccagccgcctgaggcgcccgcctcgtggcccggcgtgcgcaacgccaccaccctgccgcccgcctgcccgcagaacctgcacggggcgctgcccgccatcatgctgcctgtgtggttcaccgacaacttggaggcggccgccacctacggggggtgctttagagtccccaaaaaggcgt

SEQ ID NO: 4114 - DNA, 384 bp, Homo sapiens
  SIMILAR (246)..(1): 981254mologous to Mus musculus RNA polymerase II,accession number M12130,Smith-Waterman Score=422.
aaggcgtgggttgatgtggaagattttctgagcattccagatcatccgcagcaggttacaggggaggacgaccttgctgtctccagttgggaagatgaccctgagcacctcccgatcctcccgcatccgctcaaattcccgctccaactcgttctggatgtgtgcgttgctcagcacgtccttcaccaggtcctcctgcagagtgcgccgcagggccctctcattggtataatcaaagcggaacctggaagtgcaaggggtagctagtggacaggtgggctctgggaccttggtccccacaaaacgcactgtaccggttcccaaaggtgcacagccgaccaggtacagtggtttggaggcaagaatcctggacagagaaaaatt

SEQ ID NO: 4115 - DNA, 518 bp, Homo sapiens
  SIMILAR (229)..(516): 791254mologous to Cricetulus griseus RNA polymerase II largest subunit,accession number M19538,Smith-Waterman Score=378.
ggtcccccagtgttgggagtggaatgaccccaggggcagccggcttctctcccagtgctgcgtcagatgccagcggcttcagcccaggttactcccctgcctggtctcccaaaccgggggtccccggggtcccccaggtcccctcaaagccccttaaatcccttcacccaggtggagttgtccgccatctgtcaggccaggtttgtttcctccacagttctgggtgagtctgtccattgctcatctcctttgttggctgcttccccacaggtggtgccatgtctcccagctactcgccaacgtcacctgccttacgagccccgctctcctgggggctacacaccccagagtccctcttattcccccacttcaccctcctactcccctacctctccatcctattctccaaccagtcccaactatagtcccacatcacccagctattcgccaacgtcacccagctactcaccgacctccggcagctactcacccacttccccaagttactcacccaccaa

SEQ ID NO: 4116 - DNA, 6798 bp, Homo sapiens
  SIMILAR (1365)..(3152): 801254mologous to Drosophila pseudoobscura largest subunit of the RNA polymerase II complex,accession number Y18879,Smith- Waterman Score=2593.
  misc_feature (1)...(6798): n = a,t,c or g
gagagcgcggccgggacggttggagaagaaggcggctccccggaagggggagagacaaactgccgtaacctctgccgttcaggaacccggttacttatttattcgttaccctttttcttcttcctcccccaaaaaccttttccttttcccttctttttttttcctttttgggagctgaaaaatttccggtaagggaaagaagggctcctttcgctccttatttcgccgcctccttccctccgccaccttcccctcctccggctttttcctcccaactcggggaggtccttcccggtggccgccctgacgaggtctgagcacctaggcggaggcggcgcaggctttttgtagtgaggtttgcgcctgcgcagcgcgcctgcctccgccatgcacgggggtggccccccctcgggggacagcgcatgcccgctgcgcaccatcaagagagtccagttcggagtctctgagtccggatgaactgtttcgaatgtttgtgacggagggtggcatcaaatacccagagacgactgagggaggccgccccaagcttggggggctgatggacccgaggcagggggtgatagaccgcactggccgatgccaaacatgtgcaggaaacatgacagagtgtcctggccactttggccacattgaactggccaagcctgtgtttcacgtgggcttcctggtgaagaccaagaaagacttgcgctgtgtctgcttcttctgctccaaactgcttgtggactctaacaacccaaagatcaaggatatcctggctaagtccaagggacagcccaagaagcggctcacacatgtctacgaccttttgaagggcaaaaacatatgcgagggtggggaggagatggacaacaagttcggtgtggaacaacctgagggtgacgaggatctgaccaaagaaaagggccatggtggctgtgggcggtaccagcccaggatccggcgttctggcctagagctgtatgcggaatggaagcacgttaatgaggactctcaggagaagaagatcctgctgagtccagagcgagtgcatgagatcttcaaacgcatctcagatgaggagtgttttgtgctgggcatggagccccgctatgcacggccagagtggatgattgtcacagtgctgcctgtgcccccgctctccgtgcggcctgctgttgtgatgcagggctctgcccgtaaccaggatgacctgactcacaaactggctgacatcgtgaagatcaacaatcagctgcggcgcaatgagcagaacggcgcagcggcccatgtcattgcagaggatgtgaagctcctccagttccatgtggccaccatggtggacaacgagctgcctggcttgccccgtgccatgcaaaagttctgggcgtcccctcaagtccctaaagcagtggttaaagggcaaggaaggccgggtgcgagggaacttgatgggcaaaagagtggacttctcgggccgcactgtcatcaccgccgaccccaacctctccattgaccaggttggcgtgccccgctccattgctgccaacatgacctttgcggagattgtcacccccttcaacattgacagacttcaagaactagtgcgcagggggaacagccagtacccaggcgccaagtacatcatccgagacaatggtgatcgcattgacttgcgtttccaccccaagcccagtgaccttcacctgcagaccggctataaggtgaaacggcacatgtgtgatggggacattgttatcttcaaccggcagccaactctgcacaaaatgtccatgatggggcatcgggtccgcattctcccatggtctacctttcgcttgaatcttagcgtgacaactccgtacaatgcagactttgacggggatgagatgaacttgcacctgccacagtctctggagacgcgagcagagatccaggagctggccatggttcctcgcatgattgtcaccccccagagcaatcggcctgtcatgggtattgtgcaggacacactcacagcagtgcgcaaattcaccaagagagacgtcttcctggagcggggtgaagtgatgaacctcctgatgttcctgtcgacgtgggatgggaaggtcccacagccggccatcctaaagccccggcccctgtggacaggcaagcaaatcttctccctcatcatacctggtcacatcaattgtatccgtacccacagcacccatcccgatgatgaagacagtggcccttacaagcacatctctcctggggacaccaaggtggtggtggagaatggggagctgatcatgggcatcctgtgtaagaagtctctgggcacgtcagctggctccctggtccacatctcctacctagagatgggtcatgacatcactcgcctcttctactccaacattcagactgtcattaacaactggctcctcatcgagggtcatactattggcattggggactccattgctgattctaagacttaccaggacattcagaacactattaagaaggccaagcaggacgtaatagaggtcatcgagaaggcacacaacaatgagctggagcccaccccagggaacactctgcggcagacgtttgagaatcaggtgaaccgcattcttaacgatgcccgagacaagactggctcctctgctcagaaatccctgtctgaatacaacaacttcaagtctatggtcgtgtccggagctaaaggttccaagattaacatctcccaggtcattgctgtcgttggacagcagaacgtcgagggcaagcggattccatttggcttcaagcaccggactctgcctcacttcatcaaggatgactacgggcctgagagccgtggctttgtggagaactcctacctagccggcctcacacccactgagttctttttccacgccatggggggtcgtgaggggctcattgacacggctgtcaagactgctgagactggatacatccagcggcggctgatcaagtccatggagtcagtgatggtgaagtacgacgcgactgtgcggaactccatcaaccaggtggtgcagctgcgctacggcgaagacggcctggcaggcgagagcgttgagttccagaacctggctacgcttaagccttccaacaaggcttttgagaagaagttccgactttgattataccaatgagagggccctgcggcgcactctgcaggaggacctggtgaaggacgtgctgagcaacgcacacatccagaacgagttggagcgggaatttgagcggatgcgggaggatcgggaggtgctcagggtcatcttcccaactggagacagcaaggtcgtcctcccctgtaacctgctgcggatgatctggaatgctcagaaaatcttccacatcaacccacgccttccctccgacctgcaccccatcaaagtggtggagggagtcaaggaattgagcaagaagctggtgattgtgaatggggatgacccactaagtcgacaggcccaggaaaatgccacgctgctcttcaacatccacctgcggtccacgttgtgttccccgccgcatggcagaggagtgttcggctcagtggggaggccttcgactggctgcttggggagattgagtccaagttcaaccaagccattgcgcatcccggggaaaaggtgggggctctggctgcgcagtcccttggagaacctgccacccagatgaccttgaataccttccactatgctggtgtgtctgccaagaatgtgacgctgggtgtgccccgacttaaggagctcatcaacatttccaagaagccaaagactccttcgcttactgtcttcctgttgggccagtccgctcgagatgctgagagagccaaggatattctgtgccgtctggagcataccacgttgaggaaggtgactgccaacacagccatctactatgaccccaacccccagagcacggtggtggcagaggatcaggaatgggtgaatgtctactatgaaatgcctgactttgatgtggcccgaatctccccctggctgttgcgggtggagctggatcggaagcacatgactgaccggaagctcaccatggagcagattgctgaaaagatcaatgctggttttggtgacgacttgaactgcatctttaatgatgacaatgcagagaagctggtgctccgtattcgcatcatgaacagcgatgagaacaagatgcaagaggaggaagaggtggtggacaagatggatgatgatgtcttcctgcgctgcatcgagtccaacatgctgacagatatgaccctgcagggcatcgagcagatcagcaaggtgtacatgcacttgccacagacagacaacaagaagaagatcatcatcacggaggatggggaattcaaggccctgcaggagtggatcctggagacggacggcgtgagcttgatgcgggtgctgagtgagaaggacgtggaccccgtacgcaccacgtccaatgacattgtggagatcttcacggtgctgggcattgaagccgtgcggaaggccctggagcgggagctgtaccacgtcatctcctttgatggctcctatgtcaattaccgacacttggctctcttgtgtgataccatgacctgtcgtggccacttgatggccatcacccgacacggagtcaaccgccaggacacaggaccactcatgaagtgttcctttgaggaaacggtggacgtgcttatggaagcagccgcacacggtgagagtgaccccatgaagggggtctctgagaatatcatgctgggccagctggctccggccggcactggctgctttgacctcctgcttgatgcagagaagtgcaagtatggcatggagatccccaccaatatccccggcctgggggctgctggacccaccnggcatgttctttggttcagcacccagtcccatgggtggaatctctcctgccatgacaccttggaaccangggtgcaaccccttgcctatggggcctgggtcccccagtgttgggacgtggaatgaccccaaggggcaagccggcttctctcccaagtgctgcgtcagattgccaagcggtttcaagccaaggttactccccttgccttggtcttcccacacccgggctccccgggggtccccaggttccctcaagcccctacatcccttcaccaggtggcgccatgtctcccagctactcgccaacgtcacctgcctacgagccccgctctcctgggggctacacaccccagagtccctcttattcccccacttcaccctcctactcccctacctctccatcctattctccaaccagtcccaactatagtcccacatcacccagctattcgccaacgtcacccagctactcaccgacctctcccagctactcacccacctctcccagctactcgcccacctctcccagctattcgcccacctctcccagctactcacccacttcccctagctattcgcccacttcccctagctactcgccaacgtctcccagctactcgccgacatctcccagctactcgccaacttcacccagctattctcccacttctcccagctactcacctacctctccaagctattcacccacctcccccagctactcacccacttccccaagttactcacccaccagcccgaactattctccaaccagtcccaattacaccccaacatcacccagctacagcccgacatcacccagctattcccctactagtcccaactacacacctaccagccctaactacagcccaacctctccaagctactctccaacatcacccagctattccccgacctcaccaagttactccccttccagcccacgatacacaccacagtctccaacctataccccaagctcacccagctacagccccagttcgcccagctacagcccaacctcacccaagtacaccccaaccagtccttcttatagtcccagctccccagagtataccccaacctctcccaagtactcacctaccagtcccaaatattcacccacctctcccaagtactcgcctaccagtcccacctattcacccaccaccccaaaatactccccaacatctcctacttattccccaacctctccagtctacaccccaacctctcccaagtactcacctactagccccacttactcgcccacttcccccaagtacttggccccaccagcccccaccttactcgcccaccttcccccaaaggctcaacctacttctcccacttcccctgtttattggcccaacaagccaccactacaattctcacaaggccgccttttcagccccggatgacagtgacgaggagaactgagggcacgtggggtgcggcaagcgggctagggcccagggcagcttgcccgtggctgccgtgcagttctctgccctctcaacggggcgtcaacccccagcccagctccgttggtacataaaagcccttgtggcagagctcccgggtgaactttctggattcccgtttctgatgcagattcttgtcttgttctccaacttgtgctgttaaaactcacgtggcccaggtggtgttctcactcctaccccaccccaccccctgcctgtccccaaattgaagatccttcccttgcctgtggcttcgatgcggggcgggtaaagggtattttaacttaggggtagttcctgctgtgagtggttacagctgatcctcgggaagaacaaagctaaagctgccttttgtctgttattttatttttttgaagtttaaataaagtttactaattttgaccaaaaaaaaaaaaaaaaaa

SEQ ID NO: 4117 - DNA, 910 bp, Homo sapiens
  SIMILAR (1)..(723): 531254mologous to Murine leukemia virus pol,accession number M93052,Smith-Waterman Score=609.
  misc_feature (1)...(910): n = a,t,c or g
attgactttacagaagtaaaaccacaccgggctgggtacaaataccttctagtactggtagacaccttctctggatggactgaagcatttgctaccaaaaacgaaactgtcaatatggtagttaagtttttactcaatgaaatcatccctcgacatgggctgcctgttgccatagggtctgataatggaccggccttcgccttgtctatagtttagtcagtcagtaaggcgttaaacattcaatggaagctccattgtgcctatcgaccccagagctctgggcaagtagaacgcatgaactgcaccctaaaaaacactcttacaaaattaatcttataaaccggtgtaaattgtgtaagtctccttcctttagccctacttagagtaaggtgcaccccttactgggctgggttcttaccttttgaaatcatgtatgggagggtgctgcctatcttgcctaagctaagagatgcccaattggcaaaaatatcacaaactaatttattacagtacctacagtctccccaacaggtacaagatatcatcctgccacttgttcgaggaacccatcccaatccaattcctgaacagacagggccctgccattcattcccgccaggtgacctgttgtttgttaaaaagttccagagagaaggactccctcctgcttggaagagacctcacaccgtcatcacgatgccaacggctctgaaggtggatggcnnnnnnnnnnnnnnnnnnnnnnnnnnnnnnnnnnnnnnnnnnnnnnnnnnnnnnnnnnnnnnnnnnnnnnnnnnnnnnnnnnnnnnnnnnnnnnnnnnnnnnnnnnnnnnnnnnnnnnnnnnnnnnnnnnnnnncttaattttgtaaaacaatgcatagcttctgtcaaacttatgtatcttaagaa

SEQ ID NO: 4118 - DNA, 3042 bp, Homo sapiens
  SIMILAR (2062)..(2547): 461254mologous to DG-75 Murine leukemia virus putative gag- pro-pol polyprotein,accession number AF221065,Smith-Waterman Score= 354.
atggactcagagacccggagaacagcgaaagtgagacttttaatgacggtcttgagagatcaagatcgggtgtctggcgtgcaggcacacccagaacagtttcaacaagcaatttgtcccctatgtggcgtttctctaactcgctcgggtacaacatttggaagccccagcgagatatattcgccactgggcgagagccgggctagctccgggctcccccggagggacggccggcttataggcgaggagccacctgaaaaaaaattttccaggtccccgaaaggcgaccgtcttccggaggacagcggatcgactaccgtgtgtgtgtgcccacaaaattcaacctctgagtcctcagcttctgaccccggggtcagggcgctggaggacagagccctggtttttctgttaggcgccttttggttctggtttggtcttctgggacctttgtttagaacgggaaataacaaaaattgttataaactctttgtgaatgtgtgcacgactgaggagtccaggggcctgcctctggatccccagtttgtagctccacggcgaaagctacggagttcgagaaagatccgagtggccctttttcctcctcatccctaccacttaccccgtacatctcgttttcccgtgtcacagcaagttcagcgtctccaggacttggctctgctctcactcctcaaactcttaaaagaaaaggccgaatttgagctatttgcctttgagtcgtggagacaccaaaagtatttaggctacaggtccagggaaagagggaggacgcctaggtccatccagccaaggagacctaaggtcgttttgagccagaccgcacttccgcctggaccctcagtctgttcggctcaccctgtactgcctccctctgaagaagaggagagtctcccccactcagttccgccgccttataaccgtcctgctcccttagaatcttcccttgtctcctcgactacatcccctgtaggctcgccgcctattgcctctcgattgcggccgcggcaggaggaagtagccccccctctaccgcggaaagaagcacaagtccctccgggtgatgagcgctcagccccattcttggtttatgtccctttttctccttctgacctctgtaactggaaggctcataatcctcccttctctgaaaagccccaggtcttgatctcactgatggagtctgtgctccggacccatcggcccacctgggatgactgtcagcagctccttttgaccctttttacctctgaagagagggaacatatccgaagagaggccagaaagtatttcctcacatcagccaataggccagaggaggaagctagagactttcttgaggaggtctttccctctacccggcctaactggcacacgaattcctcgggtaggaagaaagctttggacgattttcaccggtatctccttgcagaacgcctccaggaggcctatcggacttacacctcttttgacccggcggctcccgaaaatagccgtgctcttaatttggcatttgtggctcaggcagcccctgatattaaaagaaaactccaaaaactggagggatttcctgggatgaatatcactcagcttttagagatagcccaaaaagtttttgacaatcgagagtttgaaaaaagaaaacaaacagcacaggcagcagctgataaagcatacaaaagacaagcaaaaatcttagctgcggccatcggagaggagcccacggtgaccgctacagtgaggggccagcctgtacgcttcctagtagctaccggggcggagcactcggtactacagacccccttgggcagtgtctctaataaaagagtggctgtacaaaggtctactggagctattcaggaatatcctgtcacacactcacgagaagagctcgggtatcgagtctcagccaagaaggtccagctttgtcttcccacagtgtcctacctaggatacgacataagccaaggaaaaagggcactcaccagtgcccggaaagaagccatcctacgaatccccactcccaccaccaagagacaggcggtagcagctttctcaaaacagggagtacgaaaggctggtgcagccattactacaaagacagatgtgctatgggcccaggctttaccggcaaatacctcggcacaaaaagctgaattgatcgccctcactcaggctctccgatggggtaaggataaacttattaacatttacactgacagcaggagcgtgggcacctcagcaggaaagactatcaaaaacaaagaagaaattctagccctgcttgaagccgtatggctccctcagcaggtggctgtaatccactgcaaaggacatccaggagaaaacacggccattgcccgtggtaaccagaaagctgactcagcggcccgggatgcagccagacttccagtcatgcctctaaacttattacccacagtctcctttccacagccagatctgccctacaatcccgcgtactcaacggaagaaaaaaaactagcttcagatctcagggccaataaaaatcaggaagtactagtagacaccttctccgtatggactgaggcatttgccaccaagaatgagactgccaccatggtagttaggtttttactcaatgaaatcatccctcgacatgggctgcctgctgccatagggtctgataacggactggccttcacctcgtccatagctcagtcagtcagtaaggcattacacattcaatggaagctccattgtgcctatcgaccccagagctctgggcaggtacaagatatcatccagccacttttccgaggagcccatcccaatccggttcctgaccagatggggccctgccactcattccagccaggtgacctggtgtttgttaaaaagttccagagagaaggactcactcctgcttacataggacctcatactgtcatcctcaccatgccaacagctctgaaggtggatggcattcctgcttggattcgtcactcccgcatcaaaaaggccaacaaagcccagcaagaaacatag

SEQ ID NO: 4119 - DNA, 772 bp, Homo sapiens
  SIMILAR (506)..(664): 921254mologous to Homo sapiens RasGAP-related protein,accession number U51903,Smith-Waterman Score=248.
atggtggcgcgcgcctttctgtggtcccaggtaatccggaggctggggcgaaagggtggcctgagccagggagatcgaggctgcaacacagcgctcgccgagggtcgcttggaccctgatcttacccgtgggcaccctgcgctctgcctgccgcgaagaccggctccccgacccgcagaagtcaggagagagggtgaagcggagcagcccgaggcggggcagcctcccggagcagcgccgcgcagagcccgggacaatggggccgcggcggctgctgctggtggccgcctgcttcagtctgtgcggcccgctgttgtctgcccgcacccgggcccgcaggccagttatggattgaggtatatagccaaagtactgaagaattcgatccatgagaaattccccgatgcaacagaagatgagctattaaagattgttggaaacctcctgtactatcggtacatgaatccagccattgtagctccagatggctttgatatcatcgacaatgacagctggagggcagaataattctgaccaaaggaaaaacttacgatcaacggccaaggttcttcagcacgcagcctccaacaagctgtttgaaggagaaaatgagcatctctcatctatgaacaattatttatcagagacgtatcaggaattcaggtttaagaatgttacatttgatatcatagctactgaagatgtaggcattttcgatgtaagatcaaaatttcttggtgttgagatggaaaaggtgcaactcaatattcag

SEQ ID NO: 4120 - DNA, 447 bp, Homo sapiens
  SIMILAR (214)..(411): 591254mologous to Homo sapiens RasGAP-related protein,accession number U51903,Smith-Waterman Score=182.
atgtccttagctcaggtggcctccctaacttgtggaaaccttaagttataccagttcctattggttttgggagcacgggagccaggcacctctgcccaccaggtgtctattgttggaaacctcctgtactatcggtacatgaatccagccattgtagctccagatggctttgatatcatcgacatgacagctggagaaatactcggagatgagattaaactagatggaaaaggagaacccaaaggggccgaagagagcgaagccacgtcgaagtacactgcagcaaagctgcatgagaaaggtgtcctgctagatatagatgatcttcaaacaaaccagaacgctgtgaatgatttctctgttggcccacaagatgaggttattgttgaagacatcaccaattgctatttgtgtgagatctttaagcggtatgaatgggtgacctga

SEQ ID NO: 4121 - DNA, 571 bp, Homo sapiens
  SIMILAR (182)..(472): 351254mologous to Oncorhynchus mykiss alpha 2 type I collagen,accession number AB008372,Smith-Waterman Score=93.
atgctccctgacaagggggcctggatgtccagggagagccaggagggaagcggagactcaagtggagagtgtgtgggagggaacgttgctgggctccacaaaggagggggcaccagggctgactcccaggttcctggtggcatgcgtggaggcaggatgtcctacgaggaccctcacggcagaaggaccgatggggaggagtggccccagagagcagttccttctctgtacccaccagggttcagcagaggctcctgctccaggcagtacagtggggcccacatgcccatcctcactggccacgtgggctggtcagagtccagcctggatccccccagggcaggacaggacaggttcctgggcacagccaggccctgaggtacatcgcataggggtgcctctcagagaaggtgctgcccacccctctccaaaacagggcccaagacgccctgtgggaaaggagcaccatcagcaccatttattccagcaggtcccacatttgaccacaaagcccttatgtgatacccccaacattccaaagaatttcaactccatggaccgtgacccgtga

SEQ ID NO: 4122 - DNA, 1322 bp, Homo sapiens
  SIMILAR (539)..(1120): 241254mologous to Hordeum vulgare extensin,accession number Z98204,Smith-Waterman Score=96.
  misc_feature (1)...(1322): n = a,t,c or g
gggccgccagcccgccgcagtggccccgcaaggcgtgcggagggggcccccccggccgcggcgcgcccccttcttttaccgcacgagaccctcggagcgcccgccggagagacccgaccccggctgccccatcctcgagcgcgagtaccgnncttttgggcccgccaaaggcggtttaaaggggggaccccccagggtttttcccagtccgccgcgttgtaaacccccggccaggcccaaggcttgcattgcctccaggtcggcctctagaggattccagccgcctcggctttccaaaggtgttaggtttccaggcgtgaccccccccgggcggccaaatttggggagcaattttcttaatctcatggagcctcagttttctcttctacaaaaatgagccgacaattgtactactggtcatagagtagtaagaggataagcgaaatctgagtgacattgcctatcaagagcctcgtataaagtccgagaggttcaggtctgtaagtcagagtccgcctcctggtccctaaacgctcattttaatcccgcgcccctccgtgacacgcccctgctgtctgtctccaaggcaacgcccaccagtttcctctccgggattcctttcccgggggcagtctcttttctctcctcacctgccggctcccctccgcgcctccgggggctccctcaggcctccccacggtcatttcagctggccagaggcagcagcgacagtgacagcgatagtggcagcagcggtggcagcgaaagttatgcggggccagggtccacccctttatagattaggcgtagtggttggcttcccaggcagcctcccgatccttttataacccgacctggcggcctgccaagccttggcccttggccggccgttattacaacatcgtcgacttgcgagaaaaccctggccgtttcaccccacattcacccgcctggctgggcgacactacccatccatcatcctccgctctctccctcccgcgcggcaatacgctacaatgtccgtatcccgtgcccctacagcgcgtcgccgctcagcactcagttcctggtagccaatctacccaccttatcagtcatgactgtgtctcctagtctcccggctgatagatgtgcccgcgtttcattccttctgtctcacctgttaacggcctccctagcgcgccacgccgctgcaccccatgcgctacgcgtgcgccgccgctgacctagacgttgctgacctttgtcacatcctcttcactgctcataactcgtctatacctcgccatatacgctgtgtcgtcgacgcgtattccgccccg

SEQ ID NO: 4123 - DNA, 2151 bp, Homo sapiens
  SIMILAR (463)..(2070): 221254mologous to Homo sapiens plectin,accession number U53204,Smith-Waterman Score=168.
gtccggacattacgggtcgacgatttcgtgatggatcggaggctgccctggaagccaaccagacgccacagctataatggggtggaccctggccccgcatagctctcgctgccaccgctgctgccactatcgctgtcactgtcgctgctgcctctgtccagctgaaatgaccgtggggaggcctgagggagcccccggaggcgcggaggggagccggcagatatttccccccgagtccttcgcagacacagaggcaggagaggagctgtccggggatgggctggttttgcccagggccagcaaacttgacgaggtcctcagcccacaggaggagatagatcctacttctgactcaactgggagcatttaccacaccttactggatctggcgcagaaagggagatggttgtctgtttggagtctctctttcagtctgacccagagagtgatgaaaacctctctgaagatgaggaggacctggagagtttcttccaagacaaggacagggggatggtgcaggtccagtgcccgcaggctctgaggtgtggctccacaaggcgctgcagctccctgaacaaccttccctccaacattcccaggcctcagacccagccaccctcaggctcccggcctccctcccagcacagaagcgtcagctcctgggcatcatccattactgtccctcggccattccgcatgacgctgcgcgaggcccggaagaaggccgagtggctgggctcacctgcctcctttgagcaggagaggcagcgggcccagaggcagggtgaggaagaggccgagtgccacaggcagttccgggcacagcctgtgcctgcacatgtctacctgcccctctaccaagagatcatggagcgcagcgaggcccgaaggcaggcagggatccagaagaggaaggaactgctcctctcttctttgaagcccttcagcttcctggagaaggaggagcagctaaaggaagctgctcgacagagagacttggcagccacagctgaagccaagatctccaagcagaaggccaccagaaggattcccaagtccattctggagccagcccttggggataaactccaggaagctgagctcttcaggaaaattcgcatccaaatgagagccctggacatgctccagatggcctcttcccctatcgcctcctctagtaaccgggctaacccacagccccgcacagccacccgaacccagcaggaaaagcttgggtttctgcacactaacttcagattccagcctcgggtgaatcctgtggtccctgactatgagggcctttacaaggccttccagagaagagcagccaaaagaagagaaacccaagaggccactcgcaacaagcccttcttgctgaggaccgccaacctgcgccaccctcagcggccctgtgatgctgccaccaccggaaggaggcaggattccccacagccaccagctacacccctgccaaggagtcgttctctgagcggccttgcttccctctctgccaacactctccctgtgcacatcacagatgccaccaggaagagggaatctgcagtcagaagtgcacttgaaaaaaagaacaaagcagatgagagtattcagtggctggagatacacaaaaagaagtctcaagcaatgtccaaatctgtgaccttgcgtgcaaaagccatggatccccataaaagcctggaggaagtgttcaaagcaaagctgaaagagaaccggaacaatgaccgtaaaagagcgaaagaatataagaaagaactggaggaaatgaagcagcgaatacaaacaaggccctatctctttgaacaagttgccaaggatctagccaagaaagaagcagaacagtggtatctagacaccctgaagcaggctgggctggaggaagactttgtgagaaacaagggtcaaggcacccgggctgttcaagagaaagagaccaaaatcaaggattttcccaggttccaagaaactacaaaactcagcatcagagatccagagcagggtttagaaggatctctagaacagcctgcaagccccaggaaagtactggaggagctgtctcatcagtcaccagaaaatctcgtatcacttgcttaatcactacacttaaaattactgcttttgaaaaataaaaaa

SEQ ID NO: 4124 - DNA, 637 bp, Homo sapiens
  SIMILAR (335)..(637): 1001254mologous to Cricetulus griseus telomeric repeat binding factor 1,accession number AF043911,Smith-Waterman Score= 536.
gctaatactttgtagtttaaggatttttttccttgatgtatctaattggaaggccgaaagagtcttgtcttttcttttttttgcctgcttcttctgagacatcaaaaaacatcttgatttctgcggagtagatgagatggagaaagatgagacaggcaacagaaatcttaagaggccacaggttaagatggggtactaagcagggagagcaccaaaggaagtaggccaaagtattaatagaagatcctagaacagattaaggcaaatcatttacctgttttccattgccttactatctttctggagccaattacaaactttcctgttttattttaggtctcacaagaatcttttcttatctaagttgcaacatggaacccagcaacaagaccttaataagaaagaaagaagagtaggaactcctcaaagtacaaaaaagaaaaaagaaagcagaagagccactgaaagcagaatacctgtttcaaagagtcagccggtaactcctgaaaaacatcgagctagaaaaagacaggcatggctttgggaagaagacaagaatttgagatctggcgtgaggaaatatggagagggaaactggtctaaaatactgttgcattataaattcaacaaccggaca

SEQ ID NO: 4125 - DNA, 2700 bp, Homo sapiens
  SIMILAR (22)..(1344): 831254mologous to Homo sapiens telomeric repeat binding factor,accession number U40705,Smith-Waterman Score=1821.
ccgggtcgaaccacgcgttcgatggcggaggatgttttcttatcggccccgatcccgcggggctgtgcggatggtagggatgccgaccctactgaggagcatatggcacaaacagagagaaacgacgaggagcagttcgaatgccaggaactgctctagtgccatgtgcaggtgggggcccccgaggaggaggaggaggaggaggaggacgcggtcctggtggccgaggccgaggccgtggctgccggctggatgctcaatttcctctgcctctctctttgccgagctttccgcgaagggcgctccgaggacttccgcaggacccgcaacagcgcagaggctattattcatggactatgcagtctaacagcttgccagttgagaacgatatacatatgtcagtttttgacaagaattgcagcaggaaaaacccttgatgcacagtttgaaaatgatgaacgaattacacccttggaatcagccctgatgatttggggttcaattgaaaaggaacatgacaaacttcatgaagaaatacagaatttaattaaaattcaggctatagctgtttgtatggaaaatggcaactttaaaggagcagaagaagtctttgaaagaatatttggtgatccaaattctccatatgcctttcaaaagcaaattgcttatgataatctctcagaaagatacatttcattccttttttccaacacttcagctacaaccacatgatggagaaaattaagagttatgtggaattatgtgctaagtgaaaaatcatcaacctttctaatgaaggcagcggcaaaagtagtagaaagcaaaaggacaagaacaataacttctcaagataaacctagtggtaatgatgttgaaatggaaactgaagctaatttgggatacaagaaaaagtgttagttgacaaacagtctgcggtaactgaatcctcagagggtacagtatccttattgagggtctcacaagaatcttttcttatctaagttgcaacatggaacccagcaacaagaccttaataagaaagaaagaagagtaggaactcctcaaagtacaaaaaagaaaaaagaaagcagaagagccactgaaagcagaatacctgtttcaaagagtcagccggtaactcctgaaaaacatcgagctagaaaaagacaggcatggctttgggaagaagacaagaatttgagatctggcgtgaggaaatatggagagggaaactggtctaaaatactgttgcattataaattcaacaaccggacaagtgtcatgttaaaagacagatggaggaccatgaagaaactaaaactgatttcctcagacagcgaagactgattgtgtttgtaaaagcttgatgaaaggacagttaagtattttgatcactgcattttgtttgaaacttgtgtcattgatgtaatttaaaacttttgtttaaagcattacagtatttttctgtgacccatcaaataaatgagggtttgtgctaccagagttaaagcatatgctatcattgtattctttaagaaccttattttgataaaatgtaaatttgttgaaccctgccacatttagtatccccacccccaaatcctgttccaatgaaaaaattaaaacctgatacgaaaaaaaaaaaattccagttaacctattttgtgtctgtaggctgacctcaaccctgtaacgtaacccattaaaatgaatttctttttttttaagacagagtttctctctgttgcccaggctggagtgcagtggcgcaatttcagctcactgaacctctgcctcccaggtcaagtgattctcctgcctcagcctctgagtagctgggattacaggcacacaccaccagccagctaatttttgtatttttagtagaggcggggtttcaccatgctggtcaggatgttctccaactcctgacttcatgatccacccacctcggcctcccaaagtgctgagattacagacgtgagccactgcgtcctgcctaaaatgaattttctagatgattgaataacagtagtagtcctttgatagaagataatgacttggtttatggccttaatatactacttaattacttaagatgtttattaatagaatgataaatgtacagagtaacctataagcatgacatacttttgctttcagtagtttcatgtaaagaaaaaaacttgaaaatagtaatacctgagtacccatgggaataatagacactggggaggtagggtggggagcgggacgaagagctgaaaaacttacctactggggactgtgctcactacctgggtgacaggatcatacgtaccccaaacctcaacatcacacagtatactcagctaacaaacctgcccatgtgtttcctgaatctaaaataaaaatcgaaataatttttttaaaaaagaaaaagacaatagtattacccatgggacaaaatttgtactattagcaagaatcattttgtgtctcatttagaaacaatttgacttttgttccagtgtttaaactttgacaaaaatggttttgaatagatctttataacctgatgcctaaatacaagattctctgataccttcatttaatatatcaatattggcctaaaacgtattctgtaaagcttaaattggtattaactatgatcatcttgatgtctatgatagataataaacaaggtcatacataccttaa

SEQ ID NO: 4126 - DNA, 2676 bp, Homo sapiens
  SIMILAR (58)..(756): 981254mologous to Homo sapiens TTAGGG repeat binding factor 1,accession number AF003001,Smith-Waterman Score=1176.
attcccgggtcgacgatttcgtgcctgaaggggcagtacccaagcgagccatttaacatggcggaggatgtttcctcagcggccccgagcccgcggggctgtgcggatggtagggatgccgaccctactgaggagcagatggcagaaacagagagaaacgacgaggagcagttcgaacgccaggaactgctcgagtgccaggtgcaggtgggggcccccgaggaggaggaggaggaggaggaggaggacgcgggcctggtggccgaggccgaggccgtggctgccggctggatgctcgatttcctctgcctctctctttgccgagctttccgcgacggccgctccgaggacttccgcaggacccgcaacagcgcagaggctattattcatggactatccagtctaacagcttgccagttgagaacgatatacatatgtcagtttttgacaagaattgcagcaggaaaaacccttgatgcacagtttgaaaatgatgaacgaattacacccttggaatcagccctgatgatttggggttcaattgaaaaggaacatgacaaacttcatgaagaaatacagaatttaattaaaattcaggctatagctgtttgtatggaaaatggcaactttaaagaagcagaagaagtctttgaaagaatatttggtgatccaaattctcatatgcctttcaaaagcaaattgcttatgataatctctcagaaagatacatttcattccttttttcaacacttcagctgacaaccacatgatggagaaaattaagagttatgtgaattatgtgctaagtgaaaaatcatcaacctttctaatgaaggcagcggcaaaagtagtagaaagcaaaaggacaagaacaataacttctcaagataaacctagtggtaatgatgttgaaatggaaactgaagctaatttggatacaagaaaaaggtctcacaagaatcttttcttatctaagttgcaacatggaacccagcaacaagaccttaataagaaagaaagaagagtaggaactcttcaaagtacaaaaaagaaaaaagaaagcagaagagccactgaaagcagaatacctgtttcaaagagtcagccggtaactcctgaaaaacatcgagctagaaaaagacaggcatggctttgggaagaagacaagaatttgagatctggcgtgaggaaatatggagagggaaactggtctaaaatactgttgcattataaattccaacaaccgggacaagtgtcatgtttaaaagccagatggaggaccatgaagaaactaaaactgatttcctcagacagcgaagactggattgtgtttgtaaagctttgatgaaaggacagttaagtattttgatcactgcattttgtttgaaacttgtgtcattgatgtaatttaaaacttttgtttaaagcattacagtatttttctgtgaccatcaattaatgagggtttgtgctaccagagttaaagcatatgctatcattgtattctttaagaaccttattttgataaaatgtaaatttgttgaaccctgccacatttagtatccccacccccaaatcctgttccaatgaaaaaattaaaacctgatacgaaaaaaaaaaaattccagttaacctattttgtgtctgtaggctgacctcaaccctgtaacgtaacccattaaaatgaatttctttttttttaagacagagtttctctctgttgcccaggctggagtgcagtggcgcaatttcagctcactgaacctctgcctcccaggtcaagtgattctcctgcctcagcctctgagtagctgggattacaggcacacaccaccagccagctaatttttgtatttttagtagaggcggggtttcaccatgctggtcaggatgttctccaactcctgacttcatgatccacccacctcggcctcccaaagtgctgagattacagacgtgagccactgcgtcctgcctaaaatgaattttctagatgattgaataacagtagtagtcctttgatagaagataatgacttggtttatggccttaatatactacttaattacttaagatgtttattaatagaatgataaatgtacagagtaacctataagcatgacatacttttgctttcagtagtttcatgtaaagaaaaaaacttgaaaatagtaatacctgagtacccatgggaataatagacactggggaggtagggtggggagcgggacgaagagctgaaaaacttacctactggggactgtgctcactacctgggtgacaggatcatacgtaccccaaacctcaacatcacacagtatactcagctaacaaacctgcccatgtgtttcctgaatctaaaataaaaatcgaaataatttttttaaaaaagaaaaagacaatagtattacccatgggacaaaatttgtactattagcaagaatcattttgtgtctcatttagaaacaatttgacttttgttccagtgtttaaactttgacaaaaatggttttgaatagatctttataacctgatgcctaaatacaagattctctgataccttcatttaatatatcaatattggcctaaaacgtattctgtaaagcttaaattggtattaactatgatcatcttgatgtctatgatagataataaacaaggtcatacataccttaa

SEQ ID NO: 4127 - DNA, 492 bp, Homo sapiens
  SIMILAR (16)..(177): 721254mologous to Oryctolagus cuniculus junctophilin type 2,accession number AB024444,Smith-Waterman Score=184.
  misc_feature (1)...(492): n = a,t,c or g
gtctgacttccgggtcgagggctgaccaaggcgagggccaagaagaaggcgcggaaggaggccgcannnnnnnnnnnnnnnnnnnnnnnnnnnnaagaggtccccaacaccatcctcatctgcatggtgatcctgctgaacatcggcctggccatcctctttgttcacctcctgacctgaccgtcgcttaccagagccagaagttcctgctgaggacatgaggacccgtctttttgcagtgccaggcagggtggccaaagaggactggactctggacctggagccccgtggtccagttcacattcaccccactcgaggtttcaggaggcctcccacggtgcctgtgctgggtggcggtggtgtagacaagaagaattgtaatgttctggcatctctgcgagtctttctaaccaggcccccggctaggtcattggaggagctccctctgcttcctaaactttcgttagcctcgtccatcttccccaccaaccg

SEQ ID NO: 4128 - DNA, 1044 bp, Homo sapiens
  SIMILAR (497)..(742): 351254mologous to Oryctolagus cuniculus junctophilin type 2,accession number AB024444,Smith-Waterman Score=88.
tcaggtcaggaggtgaacaaagaggatggccaggccgatgttcagcaggatcaccatgcagatgaggatggtgttggggaccttgcccgacagcctcacctcttccacctccacctccgcctctgccgccagtgcggcctccttccgcgccttcttcttggcccccgccttggtcagccctcgagcctcagtcttgcgggccttggccctgggctcggctttggggatgatgggcttgggctccagcttggcgggggtctcgcgtgcaggctcggggcctcggagcgtgggggcctgcagcggggcggtggccggggacgagggcgcggactcggacccggagacctcgggctcgggctggtcctcaaagggtgggggctcgggcggcgtggtgcgcacagcatagctgtggtagccctggtaaagcgccacctccggctcccgcgacggcgcaggcggtgcctgcagagcctcgatggccatgcgctcggtggctggacgcgcggggctgcggcggcccgcgccctcggacggagtgactgaccggctgccctcaccgctgggctcgccgttccaggcgcctgggctcagcaggccgtccttggacaccccgggcctgggccgcttgggctgcgggggcgtcccggccggtgacggggagccaccctcgggccgaggggtctcacgctcgtgcagctgcgggctctcgcggggcggctgtgggaggcccgctgcgccggcgccccggtcggggggctccagcaggctctccgagttctccaggatctcctgcagcagccggcgcttctgatattccggacctggctggtagaagtccggagccagctccctggccaaagtgcgagcaatgttggactcctggttggcagccagggcggcctgttccgctgcctcagctttggccttggcgtggcttgtccatctctggatccatgcctctgggtgagggtctggaggatggctctgaccccatgacaccaagctgctgccttcctggtaccacttctgagccaggtccgtcat

SEQ ID NO: 4129 - DNA, 732 bp, Homo sapiens
  SIMILAR (1)..(732): 771254mologous to Homo sapiens myo-inositol 1-phosphate synthase A1,accession number AF220530,Smith-Waterman Score=890.
tcgctgactcaggcgggcaccgtgagcctgggcctggacgccgagggccaggaggtgttcgtacccttcagcgcggtgctgcccatggtggcgcccaacgacctcgtgttcgatggctgggacatctcgtcgctgaacctggccgaggcgatgcggcgcgcgaaggtgctggactgggggctgcaggagcaactgtggccgcacatggaggccctgcggccccggccttctgtttacatccccgaattcatcgcggccaaccagagcgcgcgcgcggacaacctcatcccaggctcgcgtgcgcagcagctggagcagatccgcagggacatccgagacttccggtctagcgcggggctggacaaagtcatagtgctgtggacggcgaacacggagcgcttctgtgaggtgattccaggcctcaacgacacagccgagaacctgctgcgcaccattgagctcggtctggaggtgtcgccctccacgctctttcgccgtggccagcatcctgggagggctgtgcctttccttcaatgggtctccgcagaacaccctggtgcccggagctcttgagctcgcgtggcagcaccgggtttttgtgggcggagatgacttcaagtcaggccagaccaaagtcaagtccgtgcttgtggacttcctcattgggttccggcttcaaagaccatgtccatcgtgagttacaaccacctgggcaacaacgatggggagaac

SEQ ID NO: 4130 - DNA, 1073 bp, Homo sapiens
  SIMILAR (295)..(564): 911254mologous to Homo sapiens myo-inositol 1-phosphate synthase A1,accession number AF220530,Smith-Waterman Score=407.
  misc_feature (1)...(1073): n = a,t,c or g
atggagaaagcgcctccacagacccagcacgagggcctcaagtccaaggagcatcttccggaacagactgacgaaggcaagacggagtaccgccgggtaccaagcctccgggctgtggtccttttccgccagcgcagctgcatcgagaacatcctcagggcctgcgtggggctcccgccacagaaccacatgctcctggaacacaaaatggagcgcccagggcccagcctcaagcgagttggacccgtggctgccacctaccctatgttgaacaagaaaggaccgctcgtctgggaggtatcgcccgccacgctcttcgccgtggccagcatcctggagggctgtgccttcctcaatgggtctccgcagaacactctggtgcccggagctcttgagctcgcgtggcagcaccgggtttttgtgggcggagatgacttcaagtcaggccagaccaaagtcaagtccgtgcttgtggacttcctcattggctccggcctcaagaccatgtccatcgtgagttacaaccacctgggcatacaacgatggggagaacctatcggcgccattgcagttccgctctaaggaggtggtccaggagcaacgtggtggacgacatggttgcagagcaaccccagtgctctatacgcccggcgaagagcctgaccactgcngtatgggcaggaacctcccggaatgagggtcttccacggagcacgccgagagtgaactttggcggctttgtggcggttaatgctgtgttaccggggggaaagggtcccgtgtctctgtaccgtccttgtggagaggaaactggttgctatgtgttcacggggaaaagggcaaacttggcggaaaagtacccctattaccacgggatcccccaaagtgggaagctccttgcgctcatgacgccaaggggccatcaggccgagcaccgagcgggaactccggggaatgggaaacatgcctgcccacccagccataggctcaccgagtttccactggggctggcccacgggccacgaactcctgggcccctggaagagaccgcggatgacagactctggggctag

SEQ ID NO: 4131 - DNA, 529 bp, Homo sapiens
  SIMILAR (334)..(83): 1001254mologous to Homo sapiens WD-repeat like sequence,accession number AB034912,Smith-Waterman Score=458.
ttattctcggatgtcaacattcccctccgcgctgagctcagcacggaggctgttgtgcggtacatggaattccgtggtgtatgagaatgtggcgcccgtccgggctccagcacgaggccaccagcccggctgagccctcgtctattttgcagtgccattcgggctgctctaaagaccagacctgcaccagccctcgcttgtacatggcgcacaggatgaagagcgagtctgccgaccactcgatgtgctggatctggtctaggcacgtgtacagctgaaggatctgaagggtgttcacatcccggaccactaaccggtactggacacaggaagcctgtccgggcaccgcacctgcaggatccccaagctgcctccacccacgcggccgcccccggccctgcccgccggggacgctggcaccgaggatgtcctgcccgtggcccaggtccccgccgctcaccaggtacttgccgtccggggagaacttgcagagtaagctggagagcttgaatacctcggagaagttcat

SEQ ID NO: 4132 - DNA, 324 bp, Homo sapiens
  SIMILAR (46)..(192): 331254mologous to Arabidopsis thaliana F21B7.8,accession number AC002560,Smith-Waterman Score=68.
  misc_feature (1)...(324): n = a,t,c or g
atgactatgctaagcttggcccgaggtacaaatgtgaagaatgtgaaaaagttttcagtcgcaaatcacatcttgaaagacaaaacttaaaagaggtggcgttgcccttgtttttgagaatgccctactgtgcaagtggtagaggtctttcnnnnnnnnnnnnnnnnaaaacggggcccccccggagcgacccccggcccgggcctaattaataatgggaataannnnnnnnnnnnnnnnnnnnnnnnnnnnnnnnnnnnnnnnnnnnnnnnnnnnnnnnnnnnnnnnnnnnnnnnnnnnccctcnnnnnnnnnnncccaagcg

SEQ ID NO: 4133 - DNA, 505 bp, Homo sapiens
  SIMILAR (2)..(391): 701254mologous to Homo sapiens HTRM clone 438283 protein sequence,accession number Y73345,Smith-Waterman Score=517.
atataaatgtgaggtatgtgacaaggtctttaatcagaattgattccttgtatgccataatagatgtcacactggtaagaaaccttacagttgttatgagtgtggcaagaccttcagtcagacgtcatcctttacatgctatcgtagacttcatactggagggaaaccttacaagtgtagtgagcataacaagacctttggttgaaattcagcccttgtaattcataaggcaattcatactggagagaatccttgcaagtgtaatgaatgtggcaaggtttttaatcagaaagcacaccttgcacgtcatcatagacttcatactagagagaagccttacaaatgtgaagaatgtgaaaaagttttcagtcgcaaatcacatcttgaaagacaaaacttaaaagaggtggcgttgcccttgtttttgagaatgccctactgtatatcaaaatacttcctgtctcaggtcattgtcctgctcttatcctatgtccctaaatggtga

SEQ ID NO: 4134 - DNA, 6195 bp, Homo sapiens
  SIMILAR (40)..(2304): 531254mologous to Homo sapiens high-risk human papilloma viruses E6 oncoproteins targeted protein E6TP1 beta; putative GAP protein beta,accession number AF090990,Smith-Waterman Score=1902.
atgaccacctatcgggccatccccagcgatggtgtggacctggcagccagctgtggcgccagggtgggcgatgtcctccctgggccacacacaggggactacgctcccttgggattctgggcccagaatggcagcatgtcccagcctcttggcgagagcccggccaccgccaccgccaccgccaccgccaccacccgccccagccccaccactcccgcaatgcccaagatgggcgtgcgcgcaagggtggccgactggccgcccaagcgggaggccctgagagagcacagcaacccaagcccctcccaggacacagatggcacaaaggccaccaagatggcccattccatgaggagcatacagaacggacagccccccaccagcaccccggcttcctcagggtccaaagccttccaccgactctccaggagaaggtccaaagacgtggagttccaggacgggtggccccggtcccccggcagggccttcctcccccttcggcaccgcagcagcagcgagatcaccctcagcgagtgtgacgcggaggacgcgggggagccgcggggggcccggcacacgggggcgctgcccctcttccgcgagtacgggagcacctcgtccatcgacgtgcagggcatgcccgagcagagcttcttcgacatcctgaacgagttccgcagcgagcagcccgacgcccgagggtgccaggccctcaccgagctcctccgggcagatcctggcccacacctcatggggggcggcggcggagccaagggggactcccacaacgggcagcccgccaaggacagcctcctgccactgcagcccacgaaggagaaggagaaggcccggaagaaacctgcgcggggcctcggcggcggggacacggtggactcgtccatctttcggaagctaaggagcagcaaacccgagggggaggctgggcgttccccgggggaggccgacgagggccggagccccccggaagccagcaggccgtgggtgtgtcagaagagcttcgcccacttcgacgtgcagagcatgctgttcgacctcaacgaggcggccgccaacagggtgtcggtgtcgcagcggcggaacaccaccacgggtgcttcggccgcttccgccgcctcggccatggcctccctcacggcctcgcgggcccacagcctcggaggcctggacccggccttcaccagcacagaggacctaaactgcaaggagaacttggagcaggacctcggcgatgacaacagcaacgacctgctgctcagctgcccgcacttccgcaatgagatcgggggcgagtgtgagcgcaacgtgagcttctcccgggcttccgtgggctccccgagcagcggcgagggccacctggcagagcccgccctgagcgcctaccgcaccaacgccagcatctcggtgttggaagttcccaaggagcagcagcggacgcagagtcggccccggcagtacagcatcgagcatgtggacctgggcgcccgctactaccaggattacttcgtgggcaaagaacatgccaattacttcggcgtggatgagaagctggggccagtggctgtgagcattaagcgggagaagctggaagaccacaaggagcacggacctcagtaccagtacaggatcatcttccggacccgcgagctcatcaccctgcggggctccatcctggaagatgctacgcccacagccaccaagcatgggaccgggcggggcctgcccttgaaggatgccctggagtatgtcatccccgagctcaacatccactgcctgcggctggccctcaacacccccaaggtgacggagcaactgctgaagctcgatgagcaagggctctgccggaagcacaaggtgggcatcctctattgcaaggccggccagagctccgaggaggagatgtacaacaatgaggaggccggccccgcctttgaggagttcctctccctcatcggcgagaaggtctgcctgaagggcttcaccaagtacgctgcccagctggacgtcaagaccgactccacgggaacccactccctctacacgatgtaccaggactacgagatcatgttccatgtctccaccctgctcccttacacccccaacaacaggcagcagctgctacggaagaggcacataggaaatgacatcgtgacgatcatcttccaggagcctggcgcgctaccgttcacccccaagaacatccgctcccacttccagcacgtcttcatcattgtccgagtccacaacccctgcactgataacgtctgttacagagccaaaatcaccagccaggcctgggcactgggcttcaaggaccaagaggcacgagtgatggcccagaggaaagtcggagggaagcagggcctacctgtggagtgtgcaatttccgaatggccacccgcatcatccctgcagcctgtggactctcaaaacccagtccctcctgctgggaatatggctgtgacccgatccaaagacgctcctcctttcggcccccccatccccagtggaaccacattccgcaaatccgacgtcttcagagacttcttgctggccaaggtgattaacgctgagaacgccgcgcacaagtccgacaagttccacaccatggccaccaggacccgccaggagtatctcaaggacctggccgaaaactgtgtctccaacacccccatcgactccaccggcaaattcaacctcatctccctgacctccaagaagaaggaaaagacaaaagcacgggctggcgctgagcagcacagtgcaggggccatcgcctggagggtggtggcccaggactacgcccagggggtggaaatcgactgcattttgggaatttccaatgagtttgtggtgctcctggacttacgcaccaaggaggtggtgttcaactgctactgcggggatgtcattggctggactccagactcctccacactcaaaatcttctatggacgaggagaccacatcttcctacaggcgacagagggttctgtggaggacataagggagatagtgcagagactgaaggtgatgaccagtggctgggagacggtggacatgacgcttcggcggaacgggctcgggcagctgggcttccacgtgaagtacgacggcacggtggccgaggttgaggactatgggttcgcctggcaggccggcctccggcagggcagccgactagtggagatctgcaaggtggccgtggtcacactgacccacgaccagatgatcgacctgctgcgcacctctgtcactgtgaaggtggtcatcatcccgccttttgaggacggcactccccggaggggcaagtcaaggccagataaccccacaggcaagtgccctggtggctacgctcctcgaggaaggacatgcacccctctccacacactcccacgggtgcacacgataagccagcttgcgcatcgcatgactctcaccccaaacatgcaggctctgatagacgttcatattgttattgttcctcacctggtgcctggtgagacattggcagctgccagtccaaagggacagccagaagacactgccaagtgtcagttccagccatggcgctaccgaggggtgcggggttggccggagacctacgacatgaatacctcggagcccaagacggagcaggaaagcatcactcctgggggccggcccccctaccgcagcaatgctccctggcagtggagcgggcccgcatcccataactctctaccagcctccaagtgggccactccaaccactcccggccatgcccagtccctgagccggcccctgaagcagacccccatagtccccttccgggagtcccagccactgcacagcaagaggcctgtcagcttcccagaaaccccttacacagtatcaccagcaggggccgacagagtccctccctaccgacagccttctgggagcttctccacccccggttcggccacctacgtgagatacaagccatccccagaaaggtacacggctgccccacaccccctgctatctcttgatccccacttcagccacgatgggacgtccagcggcgactcctcttccggcggcctgaccagccaggagagcaccatggaacgccagaagccagagcctttgtggcatgtgcctgcccaggccaggctctcagccatagccggaagcagcgggaacaagcacccgtccaggcaggatgcagcaggcaaagattctcccaacaggcattccaaaggagaacctcaatactcaagtcattccagcagcaacaccctctccagcaacgcatccagcagccacagcgacgaccgctggttcgaccccctggaccccctggagccagagcaagaccccctctccaagggtggctctagtgacagcggcatcgacaccaccctctacacctccagccctagctgcatgtccctggccaaggctccacggcccgccaagccacacaagccccctggaagtatgggcctttgtggcgggggtcgcgaggccgctgggaggtcccaccacgcagacaggcggcgggaggtctcccctgcccccgcagttgccggccaaagcaagggctaccgaccgaagctgtactcctccggctccagcacccccacgggactggcggggggcagccgagacccaccgaggcagcccagcgagacaggaggcaaagtctctgagggggctgaggcttggatctgcatgggaggacgtgggcctgagctggaggacaaagcaactgtggatgtggcagcaggcggcattgccaggaatgacatgggctcgagggttggctaccccgctcaggtttacaaaactgccagtgcagagactcctcggccctcccagctggcccagcccagcccctttcagctctccgcctccgtccccaagtccttcttctccaagcagcctgtacgcaataagcacccaacagggtggaagagaacggaggagcccccaccacggccactccccttcagtgacccaaagaaactagtcattggagaacagatgattgatgtcttagggccggagaaacgcagacggcgtaccacacaggaaaagatcgcaattgttcagcagagctttgaaccggggatgacggtctccctcgttgcccggcaacatggtgtagcagccagccagttatttctctggccaataccaggaaggaagttttatctgctgtcgcccgccggaaaacaggttgttcctgcctctgaacttgctgccgccatgaagcagattaaagaactccagcgcctgctcggcaagaaaacgatggaaaatgaactcctcaaagaagccgttgaatatggacgggcaaaaaagtggatagcgcacgcgcccttattgcccggggatggggaacgaaccgatgactggatggatggccgccgcagtcgtcacactgatgatacggatgtgcttctccgtatacaccatgttatcggagagctgccaacgtatggttatcgtcgggtatgggcgctgcttcgcagacaggcagaacttgatggtatgcctgcgatcaatgcccaacgtgtttaccggatcatgcgccagaatgcgctgttgcttgagcgaaaacctgctgtaccgccatcgaaacgggcacatacaggcagagtgcccgtgaaagaaagcaatcagcgatggtgctctgacgggttcgagttctgctgtgataacggagagagactgcgtgtcacgttcgcgctggactgctgtgatcgtgaggcactgcactgggcggtcactaccggcggcttcaacagtgaaacagtacaggacgtcatgctgggagcggtggaacgccgcttcggcaacgatcttccgtcgtctccagtggagtggctgacggataatggttcatgctaccgggctaatgaaacacgccagttcgcccggatgttgggacttgaaccgaagaacacggcggtgcggagtccggagagtaacggaatagcagagagcttcgtgaaaacgataaagcgtgactacatcagtatcatgcccaaaccagacgggttaacggcagcaaagaaccttgcagaggcgttcgagcattataacgaatggcatccgcatagtgcgctgggttatcgctcgccacgggaatatctgcggcagcgggcttgtaatgggttaagtgataacagatgtctggaaatatag

SEQ ID NO: 4135 - DNA, 3391 bp, Homo sapiens
  SIMILAR (2)..(3361): 471254mologous to Homo sapiens high-risk human papilloma viruses E6 oncoproteins targeted protein E6TP1 alpha; putative GAP protein alpha,accession number AF090989,Smith-Waterman Score=2278.
gttcctctccctcatcggcgagaaggtctgcctgaagggcttcaccaagtacgctgcccagctggacgtcaagaccgactccacgggaacccactccctctacacgatgtaccaggactacgagatcatgttccatgtctccaccctgctcccttacacccccaacaacaggcagcagctgctacggaagaggcacataggaaatgacatcgtgacgatcatcttccaggagcctggcgcgctaccgttcacccccaagaacatccgctcccacttccagcacgtcttcatcattgtccgagtccacaacccctgcactgataacgtctgttacagtatggctgtgacccgatccaaagacgctcctcctttcggcccccccatccccagtggaaccacattccgcaaatccgacgtcttcagagacttcttgctggccaaggtgattaacgctgagaacgccgcgcacaagtccgacaagttccacaccatggccaccaggacccgccaggagtatctcaaggacctggccgaaaactgtgtctccaacacccccatcgactccaccggcaaattcaacctcatctccctgacctccaagaagaaggaaaagacaaaagcacgggctggcgctgagcagcacagtgcaggggccatcgcctggagggtggtggcccaggactacgcccagggggtggaaatcgactgcattttgggaatttccaatgagtttgtggtgctcctggacttacgcaccaaggaggtggtgttcaactgctactgcggggatgtcattggctggactccagactcctccacactcaaaatcttctatggacgaggagaccacatcttcctacaggcgacagagggttctgtggaggacataagggagatagtgcagagactgaaggtgatgaccagtggctgggagacggtggacatgacgcttcggcggaacgggctcgggcagctgggcttccacgtgaagtacgacggcacggtggccgaggttgaggactatgggttcgcctggcaggccggcctccggcagggcagccgactagtggagatctgcaaggtggccgtggtcacactgacccacgaccagatgatcgacctgctgcgcacctctgtcactgtgaaggtggtcatcatcccgccttttgaggacggcactccccggaggggttggccggagacctacgacatgaatacctcggagcccaagacggagcaggaaagcatcactcctgggggccggcccccctaccgcagcaatgctccctggcagtggagcgggcccgcatcccataactctctaccagcctccaagtgggccactccaaccactcccggccatgcccagtccctgagccggcccctgaagcagacccccatagtccccttccgggagtcccagccactgcacagcaagaggcctgtcagcttcccagaaaccccttacacagtatcaccagcaggggccgacagagtccctccctaccgacagccttctgggagcttctccacccccggttcggccacctacgtgagatacaagccatccccagaaaggtacacggctgccccacaccccctgctatctcttgatccccacttcagccacgatgggacgtccagcggcgactcctcttccggcggcctgaccagccaggagagcaccatggaacgccagaagccagagcctttgtggcatgtgcctgcccaggccaggctctcagccatagccggaagcagcgggaacaagcacccgtccaggcaggatgcagcaggcaaagattctcccaacaggcattccaaaggagaacctcaatactcaagtcattccagcagcaacaccctctccagcaacgcatccagcagccacagcgacgaccgctggttcgaccccctggaccccctggagccagagcaagaccccctctccaagggtggctctagtgacagcggcatcgacaccaccctctacacctccagccctagctgcatgtccctggccaaggctccacggcccgccaagccacacaagccccctggaagtatgggcctttgtggcgggggtcgcgaggccgctgggaggtcccaccacgcagacaggcggcgggaggtctcccctgcccccgcagttgccggccaaagcaagggctaccgaccgaagctgtactcctccggctccagcacccccacgggactggcggggggcagccgagacccaccgaggcagcccagtgacatgggctcgagggttggctaccccgctcaggtttacaaaactgccagtgcagagactcctcggccctcccagctggcccagcccagcccctttcagctctccgcctccgtccccaagtccttcttctccaagcagcctgtacgcaataagcacccaacagggtggaagagaacggaggagcccccaccacggccactccccttcagtgacccaaagaagcaggtggacacgaacaccaaaaatgtctttgggcaaccgaggttgagggcatccctccgagacctccggtcaccacggaagaactacaaatccaccatcgaggatgacctgaagaaactcatcatcatggacaacctggggccagagcaggagagagacacgggacagtcaccgcagaagggcctgcagcggacgctgtcggacgagagcctgtgcagcgggcgccgggagcccagcttcgccagccccgctggcctagagccagggctgcccagcgacgtgctcttcaccagcacctgcgccttcccgtccagcacgctgcctgcacgccgccagcaccagcacccccacccgcccgtcggccccggtgccacccctgccgccggcagcggctttcccgagaagaaatccaccatctcagcctcggagctctcgctggctgatgggcgggaccgccccctgcggcgcctggaccctgggctgatgcccctgcctgacacagctgctggcctcgagtggtccagcctggtgaacgcagccaaggcatacgaagtgcaaagagccgtctcactcttctctctgaacgacccggccctgagcccggacatcccgcctgcacacagtcctgtccacagccacctgagcctggagaggggacccccgacccccaggaccacccctaccatgagcgaggagccacccctggatctgacaggcaaggtgtaccagctggaggtgatgctgaaacagctgcacactgacctgcagaaggagaagcaggacaaggtggtgctccagtcagaggtggccagcctgcggcagaacaaccagcggctgcaggaggagtcgcaggccgccagcgagcagctgcgcaagtttgcggagatcttctgcagggagaagaaggagctctga

SEQ ID NO: 4136 - DNA, 1771 bp, Homo sapiens
  SIMILAR (1359)..(1676): 1001254mologous to Homo sapiens immortalization-upregulated protein 1,accession number AB038317,Smith-Waterman Score=558.
atggggaggaagctgccctttcactgtgcatgcattcaactgatgatgccaccaggctgggcgccagggatacggagcctttgtggcatgtgcctgcccaggccggctctcagccatagccggaagcagcgggaacaagcacccgtccaggcagatgcagcaggcaaagattcccccaacaggcattccaaaaggttccaagccctctgctgggtccctgcgtctttccagcagggagggggaggacaggacggcatggacaggaccacgcggagccgtggagcaggaagtgacaggtcccgatctgtgttgaggacgcgggcagcagggtttgctagtgggctggacatagtgagagcaaaagcggggtcaagggaaacctcaatactcaagtcattccagcagcaacaccctctccagcaacgctccagcagccacagcgacgaccgctggttcgaccccctggaccccctgggccagagcaagaccccctctccaaggctgcatgtccctggccaaggcccacggcccgccaagccacacaagccccctggaagtatgggcctttgtgcgggggtcgcgaggccgctgggaggtcccaccacgcagacaggcggcggaggtctcccctgcccccgcagttgccggccaaagcaagggctaccgaccaagctgtactcctccggctccagcacccccacgggactggcggggggcaccgagacccaccgaggcagcccagcactctgtggcatagaacttggtatttattcacacagcgagcgctgctgtgcaccggggcctctgcagggagctggaacaggcagaccagatcccaccgtcctggtacggacggaggcccatgggaaacagctagtgaatatgccaaaagtcatgaatgaattgtgccaggggacagcctgcagagacggtgcgcagcatccttcccttatggagctgtcattctcctggagacaggacaaacagacagacagccgaaccaccgtggagtgtgccaggaggccacaggggcaatgtggctgcttacgctcctacactggagcacaattccagccgcatgcagggatgaattggttcccagcccatgacacacgtcagggagagaaagcaagattggtccaggtgacacagctggcatctagtgcagcaggctggctccaagtctatgcccctcacccctcagacgctgctcaccaagccggagtggctgtgggagcgagttagaacacgggacgcccctggcagcagcgccctgcgttgttaaagcgccgcggaggaagctgtattgtcgcgggcccaggcgcccttggccttaggacccaacttctcttaccgccatggagttcgacctgggagcagccctggagcccacctcccagaagcccggtgtgggggcgggccacgggggagatcccaagctcagtccccacaaagttcagggccggtcggaggcaggggcaggtccgggtccaaagcaaggacaccacagctcttccgactccagcagcagctccagcgattcggacacggatgtgaagtcccacgctgctggctccaagcagcacgagagcatcccgggcaaggccaagaagcccaaagtgaagaagaaggagaagggcaagaaggagaagggcaagaagaaggaggctccccactgaagggccctggacagggctcattaaaccttcctctctgccttctgtaaaaaaaaaaaaaaaaaaaaaaaaaaaaaaagtcgtatcgatgtcga

SEQ ID NO: 4137 - DNA, 426 bp, Homo sapiens
  SIMILAR (255)..(371): 471254mologous to Homo sapiens Human secreted protein,accession number W75162,Smith-Waterman Score=85.
  misc_feature (1)...(426): n = a,t,c or g
cccacgcgtccgcggacgcgtgggctgtgagtcaaccaaacttccttttaaannnnnnnnnnnnnnnnnnnnnnnnnnnnnnnnnnnnnnnnnnnnnnnnnacgtagagggtgtgagagccagaagactttaaggagagggacgagctggggcctggatgcccggggaggtggacctggaccaggacaggtgtcagcgggcagagatggggcagaggtgtggctgtctacctgcgaccggggccatgccctctcgggctcggttgaggagctgctcttcctccagaatgcgctcggacggaacgttaggaaggccctggtgagtggccccgacctcctcccccaggactggcttctccggccctctgccctttcgggcagaacagctcgtggctctttcaggaccttgggctccatcttgcagaan

SEQ ID NO: 4138 - DNA, 565 bp, Homo sapiens
  SIMILAR (479)..(132): 361254mologous to Streptomyces coelicolor A3(2) putative oxidoreductase,accession number AL078610,Smith-Waterman Score=104.
  misc_feature (1)...(565): n = a,t,c or g
cccacgcgtccgcggacgcgtgggctgtgagtcaaccaaacttccttttaaannnnnnnnnnnnnnnnnnnnnnnnnnnnnnnnnnnnnnnnnnnnnnnnnacgtagagggtgtgagagccacaagactttaaggagagggacgagctggggcctggatgcccggggaggtggacctggaccaggacaggtgtcagcgggcagagatggggcagaggtgtggctgtctacctgcgaccggggccatgccctctcgggctcggttgaggagctgctcttcctccagaatgcgctcggacggaacgttaggaaggccctggtgagtggccccgacctcctcccccaggactggcttctccggccctctggcgcttttgggcagaacaggtgggtggctctttccaggaactggagtctccatcttgcagaacagctcgtggctcttccaggacctggggctccatcttgcagaacagctcgtggctcttccaggacctggggctccatcttgctgaggggtgctttcttgagactccttaaggacgattctgattttccctggagct

SEQ ID NO: 4139 - DNA, 896 bp, Homo sapiens
  SIMILAR (281)..(871): 291254mologous to Caenorhabditis elegans weak similarity to collagens; glycine- and proline-rich,accession number AF000298,Smith-Waterman Score=101.
ctgcctcggagcacaggcacaggggcctttgaaagataacccgccattgtacagctccagggaaaatcagaatcgtccctaaggagtctcaagaaagcacccctcagcaagatggagccccaggtcctggaagagccacgagctgttctgcaagatggagccccaggtcctggaagagccacgagctgttctgcaagatggagccccaggtcctggaagagccacgagctgttctgcaagatggagccccaggtcctggaagagccacgagctgttctgcccgaaagggcagagggccggagaagccagtccagggccttcctaacgttccgtccgagcgcattctggaggaagagcagctcctcaaccgagcccgagagggcatggccccggtcgcgggtagacagccgcacctctgccccatctctgcccgctgacacctgtcctgctccaagggtagggcccagactgatggcctctggggtgggccacgatgagacccctgcccctgagggcccagcctgcacctcctccacctcactggatgctgttaaccccctctgctcctcctccaggtacagggaagccacagggaggcagagggcaaacatcggggagctgtgttcccgccacagatccacactgtcggttgagtgcaccctcaccaggaaagctgggcccaccatgtgatttcctggagcctccgtgacaaaggaccacaaactgggggagttcggaggccggaagtccaaaatcaaggtgtccccggggccacgttccctctggaggctccaagggagggatcttcctgtctctgcattttccaggggccccacaatccctggaattccctggttcacagccgcatggcctgattggagcttctgtgtctgcat

SEQ ID NO: 4140 - DNA, 636 bp, Homo sapiens
  SIMILAR (123)..(602): 341254mologous to Mus musculus splicing factor 3a, subunit 2,accession number X83733,Smith-Waterman Score=156.
atgggggttctgacaccagggtcccagctgggggacttctccctgcagcaggctatgccacttaccttcctcccgtgccttggagaagctgctggcagctgtaagagagaggtgcccttccttcaggcctcatctctcctgtgctcccagtacccccacctgagcccaagacctcaaggccccagcagcagccccaccatcacgtccctggtggactcacccagcacggccaagcagaacagcccagggagccccatgcctcgccttgtcctgacggtgtgcgtctcccagacccaggccaatgccagggccatccacaggctccggaagcagctggtgtggcaggttcaggagaagtggcacctggtggaggacctgtcgcgactgctgccggagccaggcccgagcgactctccgggccccaagtaccctgcctccacaagcttcgcgcccgcagtccttctgccccggatgcccatagccctggctccccggtccaccaggccccgcgtccgggcccctccgtcgtggatgccgcgggactgcgttccccttgccctggacagcacgcacctggcggcccccaagggcactgcgtacctggagcccggctttgcatccacaggtctgccctag

SEQ ID NO: 4141 - DNA, 1152 bp, Homo sapiens
  SIMILAR (310)..(1149): 981254mologous to Homo sapiens bK126B4.3 (novel protein),accession number AL022316,Smith-Waterman Score=1414.
acaccatcctcttagttgctcagactgaaaagctagcagccatcctggatttctctcacactgcctattcaacgtgtgaatgcatgagtggaaagctgagttcgcactcgtgactggccggggtcgactctgacattcactcccactttggcgcgctgatttgcctctgagcggatgaaggttgagccatggcgggcggggccggggaggcgggcttggagcgagggggcggggcaggcgccacaaaaacgcgctcgcgccggcgccgaaccgcaactcccggcgacccccgcgctcccgggtggcaagatggtggcgcgcaggacgaagctcgcggcgcgggacccggaggacggtatcccgagcccaccgtgctacgcagctattccaatcaagttctctgaaaagcaacaggcttctcactacctctatgtgagagcacacggcgttcgacaaggcaccaagtccacctggcctcagaagaggactctttttgtcctcaatgtgcccccatactgcacagaggagagcctgtcccgcctcctgtccacctgtggcctcgtccagtctgtagagttgcaggagaagccggacctggctgagagcccaaaggagtcaaggtcgaagttttttcatcccaagccagttccgggtttccaggtagcctatgtggtgttccagaagccaagtggggtgtcagcggccttggccctgaagggccccctgctggtgtccacagagagccaccctgtgaagagtggcattcacaaatggatcagtgactacgcagactctgtgcccgaccctgaggccctgagggtggaagtggacacgttcatggaggcatatgaccagaagatcgctgaggaagaagctaaggccaaggaggaggagggggtccctgacgaggagggctgggtgaaggtgacccgccggggccggcggcctgtgctcccccggactgaggcagccagcttgcgggtgctggagagggagagacggaagcgcagccgaaaagagctgctcaacttctacgcctggcagcatcgagagagcaagatggagcatctagcgcagctgcgcaagaagttcgaggaggacaagcagaggatcgagctgctgcgggcccagcgcaaattccgaccgtactga

SEQ ID NO: 4142 - DNA, 622 bp, Homo sapiens
  SIMILAR (28)..(345): 661254mologous to Homo sapiens CGI-96 protein,accession number AF151854,Smith-Waterman Score=337.
cggcacgatggtggcgcgcaggacgaagctcgcggcgcgggacccggaggaccggtatcccgagcccaccgtgctaggcagactattccaatcatgtgctctgaaaagcaacaggcttctcactacctctatgggagagcacacggcattcagcaaggcaccaagtccacctggcctcataagaggactatttttgctttcaatgggcccccatactgctcagagcaggagagcctgtcctgcctccagtccacctgtggccttgtccagtctgtcaagttgaaggagaagctggagctgggctgggagtcaaggtcgaagttttttcatccaaagccagttccggttactgaagagcaatagccacttgagtgaggagtgcggggagcttctcctgcaaagaggaaccacgaaggtggccacaggtgacaaacaaggtcttgggttttttgcgctcattggaccaggtctggttctgaacagagaccagaggctcgcctggcggttccagtttgtggaagtcccaggcaatcactgtgtccacatgagcgaaccccagcacgtggccagtatcatcagctccttcttacagtgcacacacacgctcccagcccagctgtag

SEQ ID NO: 4143 - DNA, 1128 bp, Homo sapiens
  SIMILAR (1071)..(787): 871254mologous to Homo sapiens Human Hydrolase protein-15 (HYDRL-15),accession number Y71117,Smith-Waterman Score=480.
tttttttttttttgagaatacaagaaccttttattttccatccagttgggcagcagggaaaggctaggtgggcccagcctgcccttccttcctccagctggctggatatttattattagccaggagacagcagccctggaacccagactctgtctcccccttgaggtcacagatgttgaagttggaatctcgctccttcccctgactaccatcctaggctgggcctcaagactagtgaggcctgtccccaccatccctggccttgttgtggggctcaggaactcaagagtccccagtgttgaagtctgggaagcaactaggtcttcatagttcccaggcccagagctacaagctgggctgggagcatgtgtgtgcgctgtaaagaaggagctgatgatactggccacggtgcttggggttcgctcatgtggacacagtggattgcctgggacttccacaaacttggaaccgctctttgagggtggatttcattgtgtctatcatgaacgacagggactccttgtcagagtaattctctcttggatcaaaatatccgtggactgctttgatcaacaggacatgggcctgcagcttcctgatggaatgcgcacacagctccctgctgacgaagtcaatgctgttctctgccagctccccgtccacaccgggcacccacctctgcagcagctgcttcaggctgaacacgtgcgagggctcctgggaggcctctacctgcagcacgtgctctatggctctccgcttgtaggtcagcaagttctccatttccattccgcccacgacgccacctgccacaactcttcggatctcactcacaaaagtctggaggtaatatgggacacctgggctgtaatgggacgagagcccatgacctccgaaatccatggcaacgtaataaaagtcttgcgggagaagagggatgagtctgtcgaaggagctggcattgtccagccagccgtgcaggcagagaactggagggccctgcagggagccccaggctttggctgcgatgtggccccagggcacagccagcttcagctctgagatcagaccccaggcaagccccgcaactccagcagtccccgcaactccagccgtccccgcccccat

SEQ ID NO: 4144 - DNA, 663 bp, Homo sapiens
  SIMILAR (1)..(219): 801254mologous to Homo sapiens folate receptor 3 (gamma),accession number U08471,Smith-Waterman Score=294.
atggcctggcagatgatgcagctgctccttctggctttggtgactgctgcggggagtgcccagcccaggagtgcgcgggccaggacagacctgctcaatgtctgcatgaacgccaagtaccacaagacacagcccagccccgaggacgagctgtatggccagtctctggagaaagaatgcctgagctttaccagcaccacccaggaagcccataagaatattcccatctatatggattcaactggaaccactgtggagagatggtacctgcctgcaaacggcactttatccaggacacctgcctttacgagtgaccccccaacttggggccctggatccagcaggtacgcatggcttcctggcatccaagagctagcagaggagctgaattttccaggcgtctctgcaggcagcaaccccagctccagttctattcagggctgggttcctgggattcttgagcctgagcccttcttttctaccaaaatctcccaggtggatcagagctggcgcaaagagtgggtgctgaatgtgcccctgtgcaaagaggactgtgagcaatggtgggaagattgtcgcacctcctacacctgcaagagcaatgggcacaagggctggaactggacctcagggtctaacaagtgccaggtggcagctgcctga

SEQ ID NO: 4145 - DNA, 782 bp, Homo sapiens
  SIMILAR (615)..(749): 1001254mologous to Homo sapiens folate receptor 3 (gamma),accession number U08471,Smith-Waterman Score=282.
aaggaaaagcagcaaaccagatggagaaggaaggccaaaaagataagtagaaagctggaccatgagctccttgagggcagggactgaatggttactatgtccccagggcccagcatgaccttctcctggattcctcatcttccttctgtgacctgtgtctccatcagtttctcctccggcatctttttcttacaggattcttacctcaggaatagatggacatggcctggcagatgatgcagctgctgcttctggctttggtgactgctgcggggagtgcccagcccaggacgtgcgcgggccaaggacggacctgctcaatgtctgcatgaacgccaagcaccacaagacacagcccagccccgaggacgaagctgtatggccagacccatgatgtgcaaggggtcttgcaggaagaccaagagttggaacatccaaggaaaagcaagtgtgaagtcgggctggcagggaagcatgttctgtgtcagccggcactgggcgtgggccagggtgtgggaggtgggtgggagctcctcaagggccctccccaggaagtgttcctctggatgacctacctggggcagaggagccagaatatggaggagatggctgtggtcaaccagagctggcgcaaagagcgcattctgaacgtgcccctgtgcaaagaggactgtgagcgctggtgggaggactgtcgcacctcctacacctgcaaaagcaactggcacaaaggctggaattggacctcagctccatctgcagtatgcgaccctctcctgtga

SEQ ID NO: 4146 - DNA, 754 bp, Homo sapiens
  SIMILAR (3)..(350): 601254mologous to Mus musculus folate-binding protein 2,accession number M64817,Smith-Waterman Score=392.
agcagtgtcgaccctggaggaagaatgcctgctgttctaccaacaccagccaggaagcccataaggatgtttcctacctatatagattcaactggaaccactgtggaagagatggcacctgactgcaaacggcattttcatccaggaacacctgccctctacgaggtgctccccacaacttgggggcctgggatccagcagggtggatccagagctggcgcaaagagcgggtactgaacgtgcccctgtgcaaagaggactgtgagcaatggtgggaagattgtcgcacctcctacacctgcaagagcaactggcacaagggctggaactggacttcagggtttaacaaagtgcgcagtgggagctgcctgcccaacctttccatttctacttccccacacccactgttctgtgcaatgaaatctggactcactcctacaaggtcagcaactacagccgagggagtggccgctgcatccagatgtggttcgacgccagcccaggggcaaccccaattgaggaggttggcgaggttctattgttgcagccatgagtggggctgggccctgggcagcctggcctttcctgcttagcctggccctaatgctgctgtggctgctcagctgacctccttttaccttctgatacctggaaatccctgccctgttcagccccacagctcccaactatttggttcctgctccatggtcgggcctctgacagccactttgaataaaccagacaccgcaaaaaa

SEQ ID NO: 4147 - DNA, 448 bp, Homo sapiens
  SIMILAR (378)..(443): 541254mologous to Arabidopsis thaliana long-chain-fatty-acid- CoA ligase-like protein,accession number AB012247,Smith-Waterman Score=60.
gaacaagggcgccatgatcatctacaccagtgggaccacggggaggcccaagggcgtgctgagcacgcaccaaaacatcagggctgtggtgaccgggctggtccacaagtgggcatggaccaaagacgacgtgatcctccacgtgctcccgctgcaccacgtccatggtgtggtcaacgcgctgctctgtcctctctgggtgggagccacctgtgtgatgatgcctgagttcagccctcagcaggtttgggaaaagttcttaagttctgaaacgccgcggatcaatgtctttatggcagtgcctacaatatacaccaagctgatggagtactacgacaggcattttacccagccgcacgcccaggatttcttgcggtgcagtttgtgaagaaaaaattaggctgatggtctcaggctcagctgccctgcccctcccatgcttgagaaa

SEQ ID NO: 4148 - DNA, 1635 bp, Homo sapiens
  SIMILAR (751)..(921): 591254mologous to Arabidopsis thaliana long-chain-fatty-acid- CoA ligase-like protein,accession number AB012247,Smith-Waterman Score=163.
atggaagcgctgcccgggtctaccgcgagcggcggcgactttcccttctggaagcggtgccgggggcgcaaggcgcgaggcaggcgggcgggcgcccactcccggaccagcttccccgcggacagcccgaggacacgcgcggaactctccggcgccagcacgcaccgccggaagaaccggatcagctggtgcatggcaaacgccatgtccagcccctttgtttcccatgagcgcagggctgccagctgcctgtcactggaacccagtttagctgagggctctcaagacagggtggagggagtccttggaggctctgctgatactcagcataacagagtgacagatggcagcctggccccaaactgcagcttgtgtgtatacaccaaagataaatggaaacaggcacccaaatacttgtacgaaaatgttcatcgtgtcactggacgcaaaaggcaaaaagtggaaacaacccactgtccatcaacagaggaagagagaaacgtgtgggctccatccacggaagtgcctacaatatacaccaagctgatggagtactacgacaggcattttacccagccgcacgcccaggatttcttgcgtgcagtttgtgaagaaaaaattaggacaagctggtcttttgggccacccaggggcgtgtttgctctgcactctcccatgaacctgcaggcgtgggaacgtttcttttccctcgtggctgttgaggtgtggttcactaactggaaacgcacacgtgtggctcagctgatggtctcaggctcagctgccctgcccctcccagtgctggagaagtggaagaacatcacgggccacaccctgctggagcggtatggcatgaccgagatcggcatggctctgtccgggcccctgaccactgccatgcgcctgccaggatgtgctggttttgtccagtgccaccggccacagtcaccacgtaatatggacggaatgagcaaagcccggctcgctgaggctgcaggctgcaggcaagtgaggactgaaagggtaacgggctctgggctttgtcctctctttgttccggacatcccctgcgatggggtcatattttgcactcacatacaagaacccatgagcctgcccacggtcacgcggctggtgagtgatgcacttcccaggagcacggtggcctcttcgatggccctcactagagaagatggacagtgcccccctagccttttttactggaccagatccaaggctgagaagctgaaatcaggagcagcccatgggcccactgtctacaccgagggagtcatgagcagcccatggaccactgtctacacccagggagtcaggatcagcccggggactgctgtctacaccgagggtgtcaggagcagcccagggaccactgtctacactgagagcgtcaggagcagcccagggaccgccgtccacaccaagagcgccaaggagcagcccagggaccgccgtccacaccgagggcgccaaggagcagatagtagcccagagacccaggggaggctcaccttccccacgctggaatcagaactcctaggcgaacaggaaggagccccagacagatggcacagggagaggagtccccggctgaggagggggatccagagaccctga

SEQ ID NO: 4149 - DNA, 395 bp, Homo sapiens
  SIMILAR (2)..(196): 371254mologous to Human endogenous retrovirus K pol protein,accession number Y17833,Smith-Waterman Score=101.
  misc_feature (1)...(395): n = a,t,c or g
aaacaagcagccaatttggataccatcaagacacctgaaaccttatcatgagccagatgccaaagaagagattccgggaggatcctgaggacccaccagttgcagtcatgtcgagactgatgctgaggaggaccccaactgtcatgagcaacacctgtcaaacacagccacccacctggggacagatcaagaagctgtcatagatggcagaagaaaacctgaggaaagcaggacaaccagtcacatctgcagatgcagatcctgactcctgcaagaagtagctcactgtgacaaagccgcctttgcttttattgcactgaaaaaaaagaaaaagaagggggacannnnnnnnnnnnnnnnnnnnnnnnnnnnnnnnnnnnnnnnnnnnnnnnacc

SEQ ID NO: 4150 - DNA, 442 bp, Homo sapiens
  SIMILAR (424)..(161): 791254mologous to Homo sapiens hematopoietic cell derived zinc finger protein,accession number AF054180,Smith-Waterman Score= 373.
ctgagccagatgctgaggaagagattctgggaggatcccgaggaccccctcgttgcagccatgtcaagattgatgctgaggacaaccccaagcgtcacaagcaacacacgtcgaacacagccacccaccttgggacagatcaagaagctgtcacagatggcggaagaaaacctgggggtttgactaccgtactgtgtcccttcatattccagggatcttttccttgctccagacaggtgaccagatctggcttagagacagcaatacccaagaagaccaggtttctgtagttctctaacatcactttcctatacaaatcctgctgagcagtgtccaggcattgccactcctccagagagaattctatggccacatccctaaatgtcaacggccccatgtctaggctttcaggggatcctggcatcttagctatggatgtccc

SEQ ID NO: 4151 - DNA, 286 bp, Homo sapiens
  SIMILAR (92)..(133): 531254mologous to Homo sapiens Granulin C,accession number R41881,Smith-Waterman Score=45.
cttggcctgcgctgtcctctctcagagtactcttgccaccactctctgcccgcagactccccttcctcctgctcagaggtttgttgctgtctggggctgccccacctctgagcttggttgctgtggttaacatctctcccatggggctcactttacgctttagctttactggcaaataaacctgctctgtaatctcttctgttacttcgttatactctccttcctcctcatcatcagtgtgaaaaagttccaaggtggaacgaaccacagcccacacttttcccat

SEQ ID NO: 4152 - DNA, 936 bp, Homo sapiens
  SIMILAR (328)..(540): 401254mologous to Homo sapiens Gag-Pro-Pol-Env protein,accession number AF164611,Smith-Waterman Score=152.
atgggacaagtgtgggctctggttcgttccaccttggaactttttcacactgatgatgaggaggaaggagagtataacgaagtaacagaagaggttacagagcaggtttatttgccagctaaagctaaagcggcaaaggagggagaggttcatccctactcttctgcaccccctccttattattttgaagaaaaagagtggccagaccctccagatctttcttttctggaggacactgggcgaaaagtagttgccccagtgactgagcagcacctcgagcgactgctgtcagttctattcaggcaggagttcagcaggctagacgagaggggaccaaaagaactgtatgcagattttatagcttggaatctcttaagacaggagtctcttaaaaaggtgatttcagattcagctgctcaggatatagtgttgcagttattagcttttggcaatgttaatctcgattgccaggctgctttgcgacctattagagggaaagcacatttagttgattatatcaaggcctgtgacggtatcggagctaagcaagacagtgaacggtttgcatttacaattcctgtggtaaacaatctgcagcctgctaagcattttcattatttcacagatgggtctagcaatggtaaagcttcttattctggatcaaaaggccaaaaccagcagccaatttggatactatcaagacacctaaaaccttatcatgagccagatgccaaggaagagattccaggaggatcccgaggaccccctggttgcagccatgtcaagactgatgctgaggaggaccctaactgtcacgagcaacacccgttgaacacagccacccacctggggacagatcaagaagctgtcacagatggtggaagaaaacctgaggaaagcgggacaactggtcacaatgactgtttactggaatga

SEQ ID NO: 4153 - DNA, 999 bp, Homo sapiens
  SIMILAR (706)..(996): 721254mologous to Homo sapiens Gag-Pro-Pol protein,accession number AF164615,Smith-Waterman Score=388.
atgggactagtgtgggctctggttcgttccaccttggaaccttttcacactgatgatgaagaagaaggaaagtataaggaagtaacagaagaagtaacagagcagaacagcttagaggagtgtgcattagagcttgggaaaaaagtcacttcgggtgaagaacaatacccttcctttagcattgtaaaacagggaccaagagaaccatacacggattttatagcttggttacaggagtctcttaaaaaggtgattgcagattcagctgctcaggatatagtgttgtggttattagctttcgacaatgctaatcccgattgccaggctgctctgcgacctatcagagggaaagcacatttagttgattatatcaaggcctgtgatggtattggagataatctgcataaggctactctgctagcccagcatggttatactaaaaaagaatgtagaaacaatcagcgagtcaggccaccagataagggaaaaaagaaaactgctgagcctgaaatatgtccaaaatgtaaaaaaggaaaacattgggctagtcattgtcactctaagtttgataaagatgggaacctgatttcgggaaacgacatgaggggcccatcctgggccccattccaaacggggcatttccagctcaggccattccctcatccctgtacaatatctgtccccatcacagccagtagtgccacagtagatttatgctgcacaaaagctgtgagccttctgcctggggaacccccgcaaaaggtcccaacaggagtctgtggacccttgccagcggggacgataggattccttctaggaaggtctagtttaaatttaaaagggatacaagtacaaacaggagtcattgattcagattacaatggggaaattcaaattgttatatccacttctgttccctggaaagcagaaccaggagagcgtatagcacagcccctgattatgccatatgtggaaatggggaaaagtgaaattaaatga

SEQ ID NO: 4154 - DNA, 1160 bp, Homo sapiens
  SIMILAR (453)..(764): 441254mologous to Homo sapiens Gag-Pro-Pol-Env protein,accession number AF164611,Smith-Waterman Score=255.
tccaggttgaagggtcgccagagcaacagtttgaggattggggaactaagctggaggacacccaagtactcttaagcaatcctcgtagtgagtaagatggggagcttggaagcatcagggtaacaatgggataagtgtgggctctggttcgttccaccttggaactttttcacactgatgatgaggaggaaggagagtatgacgaagtaacagaagaggttacagagcaggtttatttgccagctaaagctaaagtggcacaggaggaagaggttcatccctacccttctgcaccccctcattattattttgaagaaaaagagtggccagaccctccagatctttcttttctggaggacactgggcgaaaagtagttgccccagtgactgagcagcacctcgagcgactgctgtcagttctattcaggcaggagttcagcaggctagacgagagggatgatgccgtagagcagcttagaggagtgtgcattagagcttgggaaaaaatcacttcaggtggagaacaatacccttcctttagtgctgtaaaacagggaccaaaagaactgtatgcagattttatagcttggaatctcttaagacaggagtctcttaaaaaggtgatttcagattcagctgctcaggatatagtgttgcagttattagcttttggcaatgttaatctcgattgccaggctgctttgcgacctattagagggaaagcacatttagttgattatatcaaggcctgtgacggtatcggagctaagcaagacagtgaacggtttgcatttacaattcctgtggtaaacaatctgcagcctgctaagcattttcattatttcacagatgggtctagcaatggtaaagcttcttattctggatcaaaaggccaaaaccagcagccaatttggatactatcaagacacctaaaaccttatcatgagccagatgccaaggaagagattccaggaggatcccgaggaccccctggttgcagccatgtcgagactgatgctgaggaggaccctaactgtcacgagcaacacccgttgaacacagccacccacctggggacagatcaagaagctgtcacagatggtggaagaaaacctgaggaaagcgggacaactggtcacaatgactgtttactggaatga

SEQ ID NO: 4155 - DNA, 578 bp, Homo sapiens
  SIMILAR (276)..(413): 351254mologous to Human endogenous retrovirus K pol/env,accession number X92887,Smith-Waterman Score=67.
gaacagcgccaacctctctccacaagccagggaccctacgacccaccgccgcaggtgagctccgcccgggcgccccctcccccaccacgcctggatccctgccgggctccccgagccgagactgtgccttctgcaacagggctgtgctccaggccagaaccagcagctgatttagataccatcaagacacctaaaaccttatcatgagccagatgctgtggaagagattctgggagaatcctgaggaccccccagttgcagccatgtcaagactgatgctgaggaggacccccaactgtcacgagcaacacccgtcgaacacagccacctacttggggaaagatcaagaagctgtcacaagcaacacccgttgaacacagccacccacctggggacagatcaagaagctgtcatagatggtggaagaaaacttgtttaggaagattgcattgcagaacgggcagaggtgctgcgcaacgaatcctatggaatcattattgattggtccccttaggggatgtttagcttgaattgcacctctcagtctgcgtgccatggccacactatgttcagctggt

SEQ ID NO: 4156 - DNA, 408 bp, Homo sapiens
  SIMILAR (2)..(406): 441254mologous to Mus musculus SPAF,accession number AF049099,Smith-Waterman Score=320.
ctgtagggaggctgccatgcatgccctccttcatagtgagaaggacaatcctgtgattgatgaaatagacttccttgaagcttttaaaaatattcagccctcatcgtttcgaagcgtcattggattaatggatatcaagcctgttgactgggaggagattggtggccttgaagatgtaaaactgaagttaaaacagagcattgagtggcctctgaaattcccttgggaatttgttagaatgggcctgacacaaccaaagggagttctcctctatgggccccctggatgtgctaaaaccactctggtgagggccctggccacaagctgtcactgctctttcgtttcagtgagtggagctgatctgttttcaccggttgttggagattcagaaaaagtgttgtctcagat

SEQ ID NO: 4157 - DNA, 853 bp, Homo sapiens
  SIMILAR (590)..(664): 521254mologous to Methanococcus jannaschii cell division control protein 48 (cdc48), AAA family,accession number U67557,Smith-Waterman Score=70.
  misc_feature (1)...(853): n = a,t,c or g
gcctgctgaaggtgataatgagcgccaaaattttcacaaagaaaaatgagaattccactgagagactttgcggagatggggagaagaggggaccagatttccgtactgagaggtcagtctggctgctgaggcttgaggaagctgtggcaatggttcagcggggcagtcgagcacccgagagccgcgtagtggcccaggtgttgacgctgttggacggcgccagtggggaccgcgaggtcgtggttgtgggagccactaaccggccggacgctctagacccagcgctgcgtagacccgggagatttgaccgagaggtggtcattgggactcccacacttaaacaaagaaaggaaattctgcaagtgattacctcgaagatgcccatctccagtcatgttgatttgggccttcttgcagaaatgacagttggctatgttggtgccgacctgacagcactctgtagggaggctgccatgcatgccctccttcatagtgagaagaaccaggacaatcctgtgattgatgaaatagacttccttgaagcttttaaaaatattcagccctcatcgttttcgaagcgtcattgggattaatgggtatcaagcctgttgactgggaggagattggtggccttgaagatgtaaaacntgaagttaaaacagcccattgtcacttcgtcagaagtcgggtcactgcccagttgcgcgagactcccaacgggccttcttgcgacgctcgggtctgggtccgggtccggacgtgcaacagaagccgtcagtggccccgctggctaaaaaagggcaagcatcggaggctcgagccagcggccgcggcgcttcccgacagttcctaa

SEQ ID NO: 4158 - DNA, 498 bp, Homo sapiens
  SIMILAR (239)..(298): 451254mologous to Medicago sativa subsp. x varia Ser/Thr specific protein phosphatase 2A catalytic subunit beta isoform,accession number AF196284,Smith-Waterman Score=40.
ggatatataagttatttgttgcagcataacaaatgatcccgcaaaattttgtggcttcaaacacgaaatgtttattctctaacaatttctacagatcaggaattcaagaacagcttatctctgtagttacactgcaggatctctcatgcctttacttacaatcaagatgtcagccaaagctatagtcatctaacatctttactgatgaacagtccacttccaagatgacttattcacacgcctggcctgggagggatttttttaagctgagagaattaacagcataaccgtattttcagaaacactgaagagatttcttcaggcttcaggaaaatgattccatagagacatacataattccaggaattaagatcaacaggaaacataagatgcaagtaaatataaatcagtactgactgtataaaacaaccctgtatagttttacaacttttatgtatatctaaactttccaaaataaaatgcttttaaaaacaaaaa

SEQ ID NO: 4159 - DNA, 1865 bp, Homo sapiens
  SIMILAR (693)..(911): 301254mologous to Homo sapiens zinc finger protein ZNF135,accession number U09413,Smith-Waterman Score=42.
atgggggatgtgaatcagtcggtggcctcagacttcattctggtgggcctcttcagtcactcaggatcacgccagctcctcttctccctggtggctgtcatgtttgtcataggccttctgggcaacaccgttcttctcttcttgatccgtgtggactcccggctccatacacccatgtacttcctgctcagccagctctccctgtttgacattggctgtcccatggtcaccatccccaagatggcatcagactttctgcggggagaaggtgccacctcctatggaggtggtgcagctcaaatattcttcctcacactgatgggtgtggctgagggcgtcctgttggtcctcatgtcttatgaccgttatgttgctgtgtgccagcccctgcagtatcctgtacttatgagacgccaggtatgtctgctgatgatgggctcctcctgggtggtaggtgtgctcaacgcctccatccagacctccatcaccctgcattttccctactgtgcctcccgtattgtggatcacttcttctgtgaggtgccagccctactgaagctctcctgtgcagatacctgtgcctacgagatggcgctgtccacctcaggggtgctgatcctaatgctccctctttccctcatcgccacctcctacggccacgtgttgcaggctgttctaagcatgcgctcagaggaggccagacacaaggctgtcaccacctgctcctcgcacatcacggtagtggggctcttttatggtgccgccgtgttcatgtacatggtgccttgcgcctaccacagtccacagcaggataacgtggtttccctcttctatagccttgtcacccctacactcaacccccttatctacagtctgaggaatccggaggaaagaagtcatcgtggagtgaaactcaatgaatgtaatcagtgttttaaagtcttcagcacgaaatctaacctaactcagcacaagagaattcatactggagaaaaaccctatgactgtagtcaatgtgggaagtccttcagtagcagatcttaccttactattcataagagaatccataatggggagaaaccctatgaatgcaatcactgtgggaaagcatttagtgatccctcatcccttagactgcatttgagaattcacactggagaaaaaccctatgaatgtaaccagtgttttcacgttttccgcaccagttgtaacctcaaaagccacaagaggattcacacgggggagaatcaccatgaatgtaatcagtgtggaaaagctttcagcacaaggtcctctctcactgggcacaatagcattcatacaggggagaaaccttatgaatgtcacgattgtgggaaaaccttcaggaagagctcctatctgacacagcacgtaagaactcatactggagaaaaaccctatgaatgtaacgagtgtgggaaatccttcagcagtagcttttctcttactgtgcacaagagaatacataccggagagaaaccctacgagtgcagtgactgtggaaaagcctttaataatctctcagctgtgaagaaacacttaagaactcacactggagaaaaaccctatgaatgtaatcattgtgggaaatccttcacaagtaactcctatctttctgtgcacaagagaatacataatagatggatatgaattactgcaggaacttctggaggaaagcactcattgatctttcatccctaagatagtttgagagagctcacactggatatataagttatttgttgcagcataacaaatgatccccgcaaattttgtggcttcaaacacgaaatgtttattctctaacaatttctacagatcaggaattcaagaacagcttatct

SEQ ID NO: 4160 - DNA, 264 bp, Homo sapiens
  SIMILAR (2)..(211): 351254mologous to Caenorhabditis elegans contains similarity to transacylases,accession number AF040642,Smith-Waterman Score= 117.
  misc_feature (1)...(264): n = a,t,c or g
ctggntcttgaaagaacatgggaggagtaaaagcagagcctcggttctcaccaggttccatttncacacgctggtctaccacatcctggcaactntggatggacactgggccaaccagctggcagccgtggctcaggnagctcgtntggctgggacacaggcctgcgccacagaaaccatagacaccagccgagtgtctctgagggcaccccaggattgtnttaaacccaaacaagccagtagtagaatggcacagagagggga

SEQ ID NO: 4161 - DNA, 533 bp, Homo sapiens
  SIMILAR (28)..(165): 391254mologous to Caenorhabditis elegans contains similarity to transacylases,accession number AF040642,Smith-Waterman Score= 114.
attagatccatttgcatctgccccctgcatggcctctccaacggggccatgaatatgctggaggtgtttgtgtctagcctggaggagtttcagccagacctggtggtcctttctggattgcacatgatggagggacaaagcaaggagctccagaggaagagactcttggaggtaatggcactgttacagaatttcacagatctcagctggtggttttcttcaggttccagcctctcttggcatctgctgccttgtttcctgtggaaacagcaagcagctctgcacggttcttctcatccttgccttgcagaagagcctgtttatttttgcctctgtcacttcctgaagaaatcaatgtattttcaatacagtgtggctcctttctcctaggttcagttaggtcgtgtttcctagcagtgtcactattcaagggttgagtccacatcttgctctctggagaatgtcaatgtaatgtatttttcccatcgtacagagtctttgttgatttgcaaaatgttggatttggggttcat

SEQ ID NO: 4162 - DNA, 2308 bp, Homo sapiens
  SIMILAR (427)..(1065): 301254mologous to Caenorhabditis elegans contains similarity to transacylases,accession number AF040642,Smith-Waterman Score= 145.
  misc_feature (1)...(2308): n = a,t,c or g
tgaattcctcaggggtgaagctcttgcaggcacttggccttagtcctgggaatgggaaagatcacagcattctgcattcaaggaatgatctggaggaagccttcattcacttcatggggaagggagcagctgctgagcgcttcttcagtgataaggaaacttttcacgacattgcccaggttgcgtcagagttcccaggagcccagcactatgtaggaggaaatgcagctttaattggacagaaatttgcagccaactcagatttaaaggttcttctttgcggtccagttggtccaaagctacatgagcttcttgatgacaatgtctttgttccacccagagtncatttgcaggaagtggatgagttccacctcattttagagtatcaagcaggggaggagtggggccagttaaaagctccccatgccaaccgattcatcttctctcacgacctctccaacggggccatgaatatgctggaggtgtttgtgtctagcctgggaggagtttcagccagacctgggtggtcctctctggattgcacatgatggagggacaaagcaaggagctccagaggaagagactcttggaggttgtaacctccatttcttgacatccccactggtattccagtttcacctagagctgggccagtatgactaacaggggagctcattgagcagcattgttccttcagcagggtctttcccgcggtgacttcccttgggctgaatgaacaggagctgttatttctcacccagtcagcctcttggaccttaattcttctctctcttcctgggaacggttgttcctgatgtgggcatggtcagtgacatcctcttctggatcttgaaagaacatgggaggagtaaaagcagagcctcggatctcaccaggatccatttccacacgctggtctaccacatcctggcaactgtggatggacactgggccaaccagctggcagccgtggctgcaggagctcgtgtggctggggacacaggcctgcgccacagaaaccataggacaccagccgagtgtctcttgagggcaccccaagagtttcatgacttcccattcggaggcaggctccagggattgtattaaacccaaacaagccagtagtagaatggcacagagagggattatccttccacttcacacccagtattggtgtgtaaaagaccccattcgaactgtaggccttgggagatgccatttcagccgaaggacttcttctatttcggaagtacaccctcactattaggaagattcttaggggtaattttttctgaggaaggagaactagccaactttaagaattacaggaagaaagtggtttggaagacagccaaagaaataaaaggcagatttaaattgtatcaggtacattccagcctgttggcaactccataaaaacatttcagattttaatccgaatttagctaatggatactgggatttttgttttttatgttgagtgtcacagagctaaaaactcagttcccaaatgcccagtttatgcagcgccatcaggtattttaagctaaacttcttcacccctgagagcatgtcagctggagaaaagcagttcttccttgcccacttgagaagtgcacgcccactcacccaacatcctggtctctaggaaagcctcatgtgaggttcctctttctttcagctcagtgcccatgggcaaggatcatgatttccatttccgtgttacaatgacaatatttaatgagcataaccttctcagtctcctgctctcaaattttaggacagagccgctaagggacaaaaacaatcccctccccggtgcttttatgattggcagcaaggggctgggggagtcctctgagggactctttttcacttgcagttgtcctggaaaaccccgggtggccgtccatgaagcctgaaggatcaatgcttcccctcgggccgtgccccaaaaggtttatagggctggcctggtgaaaggttccacgtggccccaggctgaaccttccattgccctagcttttggatgtgcttttctgcccataaagactgatttttgttccgttctgagcctccaaggaattttgttttttacaactgggaatatgctcctggtgtgtgttaacagatccatgggatgttttatgttttcactgactcatttaaagagtttgacctcagagctccaggatcatcagtaaatttgtcatgttatatatttatttttttataaatcaagacttctgtgtgctcttaaatatattacacaccaatttacatttcgggaaaaaaaaaaaaaaaaaaa

SEQ ID NO: 4163 - DNA, 738 bp, Homo sapiens
  SIMILAR (236)..(316): 851254mologous to Homo sapiens PI3-kinase,accession number AJ000008,Smith-Waterman Score=119.
atgataaagaagaatgctatgctagataaacagcatggttctatgacagttcgtggcaaaggcactgccagaggaagtgctaacctcatggcaaatggaaatcacaggaaacatattgtgactaagggcacaacaacagcacaactgagtgttaacccttcacaaaccagcgtgcacattgtctacaacctcataaaaatagctacacaaaataaggaaatagctatggcatctgcgggaccgagctcctttcatttttacttcagagatggaatactttattacagagggtgggaaaaaccacagcattttcaagattttgtggaactttgctgtcgtgcttataatattatcagaaagcacagccaactgctcttgaacctgctggaaatgaactcttacaatggatatgttggtctgcttcataatatcctacagctggagagggaagggcttgcaacaaaggaggagttgcaacaaaacttcccacctttgtctgtgtctctgccttttgatcagagcatcaatcagatatcagaacacagatccctgatatttaatggacagtatccttatggctcctgctggtttcggcaagctgtgtgcaagctgatccagaaatacgcaggagaatggggatggatagccactgctgagttaagagctgaaattgacctaaatgtactgaaatttactatccaggtcctctcctggaaggtgcaagcaagccttcagtag

SEQ ID NO: 4164 - DNA, 4498 bp, Homo sapiens
  SIMILAR (1717)..(3540): 791254mologous to Rattus norvegicus phosphoinositide 3- kinase,accession number AB009636,Smith-Waterman Score=2567.
ggctcgagcggccgcccgggcaggttgagatcgtgtttcatttcaggaagatatatgcgtcaggaaaatttctatcttcttttgtattatcaaggagatatttggagcagagtcaaccctctcagttacataaaataaaaaatggcatattcttggcaaacggatccaaatcctaatgaatcacacgaaaagcagtatgaacaccaagaatttctctttgtaaatcaaccccattcttctagccaagtcagtctgggttttgatcagatagtagatgagatcagtggcaaaattccacactacgagagtgaaattgatgaaaacaccttttttgtgcccactgcaccaaaatgggactcaacagggcattcattaaatgaagcacaccaaatatccttgaatgaattcacttctaaaagccgtgaactctcctggcatcaagttagcaaagcaccagcaattggttttagtccttctgtgttaccaaaacctcaaaatacgaataaagaatgctcctggggaagccccataggaaaacatcatggtgctgatgattccagattcagtattttagctccatcattcacaagtttggataaaattaatctagagaaagaattagaaaatgaaaatcataactaccatataggatttgaaagtagcattcctccaacaaattcatccttctcaagtgacttcatgccgaaagaagagaataaaaggagtggacatgtgaacattgtggaaccatctttgatgcttttgaaaggctctcttcaacccggaatgtgggaaagtacatggcagaagaatatagagtcaataggttgttccattcagctagtggaagtacctcaaagcagcaatacgagtctggcctctttttgcaacaaagtaaaaaaaatcagagaaagatatcatgcagctgatgttaatttcaattctgggaagatctggagcactactacagcatttccgtatcagctcttttctaagaccaagtttaatatacatatttttattgataactcaacacaacctcttcattttatgccatgtgctaattatcttgtcaaagatctaattgcagaaattctgcatttttgcacaaatgaccagctactccccaaagatcatattctaagtgtatgtggctctgaagaatttttacaaaacgaccactgtttggggagccacaaaatgtttcaaaaagataaatctgttattcagctccacctgcagaaaagtagggaagctccaggaaagctatctcgaaagcatgaagaggaccacagtcagttttatctgaatcaacttctagaatttatgcatatttggaaagtatccagacaatgtctcttaacactcatcagaaaatatgacttccacctgaaatacctattgaaaacccaggaaaacgtgtataatattattgaagaagttaaaaaaatatgcagtgttctagggtgtgtggaaaccaaacaaattacagatgcagtaaatgaactaagtctaattcttcagagaaaaggagagaatttttatcaaagttcagagacttcagcaaaaggcttgatagagaaggtaacaactgaactatccacatccatctaccagctaatcaatgtctactgtaacagcttttatgcagattttcagcctgtaaatgtacctagatgcacttcctatctaaatcccgggcttccttcccacctcagcttcacagtgtatgcagcacacaacattccagaaacctgggtgcacaggatcaattttccccttgaaataaagtcacttccaagggaatccatgctcactgtaaaactgtttgggattgcctgtgcaaccaacaatgcaaatttactggcgtggacttgtcttccactgtttccaaaagaaaaatccattctcgggtctatgctgttcagcatgacattacagagtgagcctcccgtagaaatgataactccaggagtgtgggatgtaagtcagccatccccggtgaccctgcagattgattttccagctactgggtgggagtatatgaaacctgattctgaagagaatagaagtaatcttgaagagccactaaaggagtgtataaaacatattgccagactttcacagaaacagactcccctactactctctgaagaaaagaaaagatatttatggttttatcgcttctactgcaataatgaaaactgctcccttcctttagtcctgggtagtgcccctggatgggatgaaaggactgtttcagaaatgcataccattttgagaagatggacattttctcaacctttagaggctcttgggcttttgacttccagttttccagatcaagaaattcgtaaagtggcagttcaacaattagacaacctcttgaatgatgaactactggaatatctcccacagctagttcaggctgtcaagtttgaatggaaccttgagagtcctttagtgcaacttctactccaccgctccttgcagagcatccaggttgcccatcgtctttactggctgctaaaaaatgcagaaaatgaagcttattttaaaagctggtatcagaagctactagctgctctccaattctgtgcaggtaaagccttgaatgatgagttttccaaggagcagaaacttatcaaaattctgggagatattggggaaagagtcaagtctgccagtgaccatcaaagacaggaggtactgaagaaagaaattggcagactagaagagttctttcaagatgtaaatacttgtcatcttcctctgaaccctgccctatgtataaaagggattgatcacgatgcatgttcatattttacatctaatgctttgccattgaagattactttcatcaatgctaatctgatgggcaaaaacatcagcattatttttaaggctggagatgatcttcgtcaggatatgcttgttctgcagcttattcaagtgatggacaatatttggctgcaggaaggcttggatatgcaaatgatcatttatagatgtctatccacaggaaaagaccaacgattggtgcagatggtacctgatgctgtgaccctagcaaagattcatcgccattctggactgataggaccattgaaagaaaataccattaaaaagtggttcagtcagcacaaccacttaaaggcagattatgaaaaggccttgaggaactttttctactcctgtgctggctggtgtgtggtaacattcatcctgggagtatgtgaccgtcacaatgataatatcatgctgacaaagtcgggccacatgtttcatattgactttggaaaattcttaggtcatgcacaaacatttggagggataaaaagggaccgagctcctttcatttttacttcagagatgggaatactttattacagagggtggggaaaaacccacagcattttcaagattttgtgggaactttgctgtcgtgcttataatattatcagaaagcacagccaactgctcttggaacctgctgggaaatgatgctgtatgcagggactgcctgagctaagtgggatttcaagacctgaaatatgtgtataataatcttcgtccacaagacacagacctggaagcaacaagtcattttaccaagaaaataaaggaaagtctggagtgtttccctgttaaattgaataacttgatccacacacttgcacaaatgtcagccataagccctgccaaatctacttcacagacttttcctcaggaatcctgtttgctgagtacaactaggtcgattgaaagagcaacaattttagggttcagcaagaaatccagtaatctgtatctgatccaggtgacacacagcaacaacgaaacaagcctgacagaaaaatcatttgagcagttttcaaaacttcacagccaacttcagaagcagtttgcatcactgactctcccagagtttcctcattggtggcacctaccttttacaaattcagatcacagaagattcagagatctaaatcattacatggaacagatattaaatgtatcacatgaagttacaaacagtgattgtgtacttagctttttcctctctgaggctgtgcaacaaacagttgaatcatcacctgtgtacctaggtgagaagaagtttccagacaagaagcctaaggtgcagttagtcatatcctacgaggatgtgaagctgaccatactagtgaaacacatgaaaaacattcatctcccagatggctctgcgcccagtgcacatgttgaattttatcttttaccatatcccagtgaagttctgaggaggaaaacaaaatctgttccaaaatgtacggaccccacttacaatgaaattgtagtatatgatgaagtcacagagctccaaggacatgtcttaatgcttattgtgaagagtaaaactgtatttgtgggagcaattaacatccgactctgtagtgtcccactcgataaagaaaaatggtatccattaggaaacagtataatttcaccattgctatga

SEQ ID NO: 4165 - DNA, 3153 bp, Homo sapiens
  SIMILAR (2158)..(3147): 891254mologous to Escherichia coli RhsC protein precursor,accession number D90709,Smith-Waterman Score=1570.
atggagaagccacggcctctggaggcaccatcagcatggccacaggacgatgtacagtgtggggtgactgtgggaatggacggggcagctgtgagggcaaaccgaactccctggcctcaagacctggaacaaaccaaatggattgaaatcaaaaagagtgcttttacctggagttcccaactgtctctaaatcgtggcttcctcacctgtaaagatgagaataataatgcagggctgctgagggtatcctcatacagctctcgtgaggatcaactcaaaaacatcgcctcggactccctcttcatgctccccggaggcctctgccagtctcctactggtacctcccattgctccaaccaaatggaaacccaagggcaagggagcccgggtggagcagtccgtggagataaggccctggggcctgagaaggctagacaaggatgtggaatgaatgggagtgggaagtactgcaagtttcgtgtcctggcaatccaaggcaaaccagaatgtttggccaccctaatgcagcctgatcttggagacagccctgggctgcgagagatgaacgtggtagagcacctccgggccagcttcccagtggagcaatggtattggagaggtggacaacgtggggaggctgagggagctagatcttcgaaggcagagaacaacacgtcgctcatctgcaacttccgtctggattacgcccctattgagaaacagtgggatttgcacttcgctgattactttgcggaagatctcaagctgctcgccccgttagcaaaagatgggctggtggatgtggatgagaagggaatacaggtgacggcgaaaggtcgcttgctgatctgcaacatttgcatgtgctttgatacctatctgcgccagaaagcgcggatgcagcagttctctcgggatttgctggggacaccccttgtctctacgattcctgtggactttactactgaaataaactctttttctggggctgataatactggaagtttccatgttgcatgtacagttagtacctgcactgagacgtcgattggcagcgcaggactgctgtggcgcaggctgacaaatcagcgcgtgcgtgccacttccactacgccggatatcatcatcatgagcattttgctgatccagtgtctgttggggctaagtaccataccgttttcagcacagtatcctgatggtagcgaaatgatgaagctggtgggttgggcgcaaagcattgtcactttccgtggtggatcgtcagagatgctcaacggcgtagcgttcgtcttccgcctgcatctggtgttgggaatgaccatcttcctgctcttcccgttcacccgactggtgcatgtgtggagcgcgccgtttgagtactttactcgtcgatatcaaattgtgtaccacgtcgatgcttttacctcacaaccgtttcgcggcaattctgccggtgttgttttccccgccgataatcttagcgaagcgcaaatgcagcttatcgcccgcgagttaggccattcggaaactgcttttctgctgcacagcgacgacagcgatgtgcgcatccgctactttacgccaacggttgaagtgccgatttgcgcggtcatggcggaagtcaaacgcaaatggggcgaccgctttgttgccgtcacgcaaaaaaataccggtaaaggtggtgcgctgatgaatggcctcaattacgccacctgcgaccaggtttttttaagtgatgccgacacctatgttccgcccgatcaagacggaatgggctatatgctggcagaaattgagcgcggtgccgatgccgtaggcggcattccctctactgcgttgaaaggcgcgggtctgttaccgcacatccgcgcgaccgtaaagttgccgatgattgttatgaagcgcacgctacagcagctcctgggtggcgcaccgtttattatcagcggtgcctgcgggatgttccgtactgatgtattgcgtaagttcggtttctcggatcgtactaaagtcgaagaccttgatctcacctggacattggtggcaaacggctaccgtattcggcaggcgaatcgctgcatcgtatacccacaggaatgcaacagcccgcgtgaggagtggcgtcgctggcggcgttggattgtgggatacgcgcccgggggacggagcgagactctgctagaggatcccccggacggcagcgtcacgcagagtcagtttgacgccgtgggcaggctcagggcacagacggatgccgcaggtatcaacagagtacagcccggatgtggtgacgggcctcatcacgcgcataaccacgccggatgcagggcatcggcgttttactataaccaccacaaccagttaacgtcagccaccgggcctgacgggctggaattgcgccgggaatatgatgaattgggccgtctgattcaggaaactgcccctgacggcgatatcacccgctaccgttatgataatccacacagtgacttaccctgcgcaacggaagatgccaccggcagccggaaaaccatgacgtggagccgttacggtcagttgctgagcttcaccgactgttccggttatgtaacccgttatgaccatgaccgcttcgggcagatgacggcggtgcaccgcgaggaagggctgagtcagtaccgcgcatacgacagccgtggacagttaattgccgtgaaagacacgcagggccatgaaacgcggtatgaatacaacgccgccggtgacctgaccaccgtcattgccccggacggcagcagaaacgggacacagtacgatgcgtggggaaaagccatctgtaccacgcagggcggtctgacgcgcagtatggaatacgatgctgccggacgggtcatccgcctgaccagtgaaaacggcagccacaccaccttccgttacgatgtactcgaccggctgatacaggaaaccggctttgacggccgcacacagcgttatcaccacgacctgaccggcaaacttatccgcagcgaggatgaggggctggtcacccactggcactatgacgaagcagaccgcctcacgcaccgcaccgtgaatggcgaaaccgcagagcggtggcagtatgacgaacgcggctggctgacagacatcagccatatcagcgaaggatcctga

SEQ ID NO: 4166 - DNA, 1206 bp, Homo sapiens
  SIMILAR (1)..(702): 1001254mologous to Escherichia coli rhsA,accession number U00039,Smith-Waterman Score=1259.
atgtggccggataaccgtatcgcccgtgacgcgcactatctttaccggtatgaccgtcacggcaggctgacagagaaaaccgacctcatcccggaaggggttatccgcacggatgatgagcggactcaccggtaccattacgacagtcagcaccggctggtgcactacacgcggacacaatatgaagagccgctggtcgaaagtcgctatctttacgacccgctgggccgcagggtggcaaaacgggtgtggcggcgtgaacgggacctgacgggctggatgtcgctgtcacggaaaccgcaagtgacctggtacggctgggacggcgaccggctgaccacaatacagaacgacagaacccgcatccagacgatttatcagccggggagcttcacgccactcatcagagttgaaaccgccaccggtgagctggcgaaaacgcagcgccgcagcctggcggatgcgcttcagcagtccggcggcgaagacggtggcagtgtggtgttcccgccggtgctggtgcagatgctcgaccggctggaaagtgaaatcctggctgaccgggtgagtgaggaaagccgccgctggctggcatcgtgcggcctgaccgtggagcagatgcaaaaccagatggacccggtgtacacgccggcgcgaaaaatccacctgtaccactgcgaccatcgcggcctgccgctggcttctcttgtagatcgccattttttttccgcgagggtatatgtttcgtggtgtctatgttttttcattgttgtatacgcgtttatcatctgggtcatgggctcgcggttccccaggggggaatataggcgtccagagggagcaaatcggcatgaggtcaataggacaggcgggaggaggctatgggtttccattgtcgtgtgtaatcccccagtgaaggtaacaaatggaggggcaacaaagtcggagaaaaattggatgggcgtggggtatggcctgggcttggctagatgtaagtatgttgaagtgctactggatgggactgtggtggatgcagctggctgctgcttagttatgctggcactggctatggtagtgctagtgcctggggggagcactgacgacctgctggaggatgcccacagatgcacaaatctgcaccaaggagacggcaatgtggctgggctggtgcactgcagcaatgcaatggaggggcaatgtggatag

SEQ ID NO: 4167 - DNA, 1473 bp, Homo sapiens
  SIMILAR (568)..(1452): 951254mologous to Escherichia coli RhsB core protein with unique extension,accession number U00039,Smith-Waterman Score=1490.
  misc_feature (1)...(1473): n = a,t,c or g
atgctgcattctcgcggtttcctcgcggaagttttcggcatcctcgcgcggcataatatttcggtagacttaatcaccacgtcagaagtgagcgtggcattaacccttgataccaccggttcaacctccactggcgatacgttgctgacgcaatctctgctgatggagctttccgcactgtgtcgggtggaggtggaagaaggtctggcgctggtcgcgttgattggcaatgacctgtcaaaagcctgcggcgttggcaaagaggtattcggcgtactggaaccgttcaacattcgcatgatttgttatggcgcatccagccataacctgtgcttcctggtgcccggcgaagatgccgagcaggatggcactggcaccagcgggataggtgcccagaagaaaaaaatgtacgccaataacggcgctatagaccgaaagctgctttttgaagcgacgttcgtcacgattgaaaaatgttgtgataccaatcagaaaggcgatgacacccacgccctgggccagccaatacgcggtcatgataaatccttagcagggtctttctgctatgcctgcaggtccgaggaagggctgagtcagtaccgcgcatacgacagccgtggacagttaattgccgtgaaagacacgcagggccatgaaacgcggtatgaatacaacatcgccggtgacctgaccgccgtcattgccccggacggcagcagaaacgggacacagtacgatgcgtggggaaaggccgtccgtaccacgcagggcggccctgacgcgcagtatnggaatacgactgctgccggacgggtcatccgcctgaccagtgaaaacggcagccacaccaccttccgttacgatgtacttgaccggctgatacaggaaaccggctttgacggccgcacacagcgttatcaccacgacctgaccggcaaacttatccgcagcgaggatgagggtctggtcacccactggcactatgacgaagcagaccgcctcacgcaccgcaccgtgaagggtgaaaccgcagagcggtggcagtatgacgaacgtggctggctgacagacatcagccatatcagcgaagggcaccgggtggcggtgcattacaggtatgatgagaaaggccggctgaccggtgagcgtcagacggtgcatcacccgcagacggaagcactgctctggcagcatgagaccagacatgcgtacaacgcgcaggggctggcgaaccgctgtataccggacagcctgcccgccgtggaatggctgacctacggcagcggttacctggcaggcatgaaactcggcgacacaccgctggtggagtacacccgcgaccgcctgcaccgggaaacgctgcgcagcttcggccgttatgaactcaccaccgcttatacccctgccgggcagttacagagccagcacctgaacagcctgctgacctacaggcatgcaaacttcgcactgtaa

SEQ ID NO: 4168 - DNA, 908 bp, Homo sapiens
  SIMILAR (426)..(905): 991254mologous to Escherichia coli activator protein,accession number M85227,Smith-Waterman Score=833.
cccagcatggggcggataaccgtatcgccgtggacgcgcactatccttaccggtaatgccggtcccggcagggtgacagagaaaaacgaccctcatcccgaaagggggttatccgcacggatgatgagcgcacccaccggtaccattacgacagtcagcaccggctggtgcactacacgcggacacaatatgcagagccgctggtcgaaagtcgctatctttacgacccgctgggccgcagggtggcaaaacgggtatggcggcgtgaacgggacctgacgggctggatgtcgctgtcacggaaaccgcaagtgacctggtacggctgggacggcgaccgcctgaccacgatacagaacgacagaacccgcatccagacgatttatcagccggggagcttcacgccactcatcagggttgaaaccgccaccgcagtcatggaccgcatcctcaaagatcatcaaatcgtggtcgacattccccacggagaagcgtggctgcgcgatgatgaagagcgtccgatgattttgattgcgggcggcaccgggttctcttatgcccgctcgattttgctgacagcgttggcgcgtaacccaaaccgtgatatcaccatttactggggcgggcgtgaagagcagcatctgtatgatctctgcgagcttgaggcgctttcgttgaagcatcctggtctgcaagtggtgccggtggttgaacaaccggaagcgggctggcgtgggcgtactggcaccgtgttaacggcggtattgcaggatcacggtacgctggcagagcatgatatctatattgccggacgttttgagatggcgaaaattgcccgcgatctgttttgcagtgagcgtaatgcgcgggaagatcgcctgtttggcgatgcgtttgcatttatctga

SEQ ID NO: 4169 - DNA, 3258 bp, Homo sapiens
  SIMILAR (314)..(376): 421254mologous to Escherichia coli rhsA,accession number U00039,Smith-Waterman Score=41.
atgacccaaagtaacgggcagacgttggttgttgataccgatgaacagccacgcactgacgccagcgcagaaggcttagcccgtttaaatccttcatttgatagtctcggttctgtgacagcgggtaatgcatcatccataaacgatggcgcagctgcggtaatgatgatgagcgaagccaaagcacgagcgttgaatttacccgtgctggcccgcattcgcgcatttgccagcgttggtgtagatccggcattgatgggaattgcgccggtgtatgcgacccgccgttgcctggagcgtgtaggctggcagttggctgaagtcactccgccagaagaagcgaaagagatcccacaggttgcaggctctctggaagaagcactgaacgaactggatctggaccgcgagttcctgaaagccggtggcgtgttcactgacgaagcaattgatgcgtacatcgctctgcgtcgcgaagaagatgaccgcgtgcgcctgggatcggtggcaagcacatcacgccgggatgcgacgcaaatgcgtcttatccggcctacacgggttgatgatgtggtaggccggagcagtgtggcactggaaaaccagggcaaatgggcgcaggcggcagcacttcagcggcaacgactggcgctggaccccggcagcgtatggattacttaccgactttcgcaggatctctggcaggccggacaacgcagccaggccgatacgttaatgcgcaatctggcgcagcagaagtcgaacgacccggagcaggtttacgcttacgggctgtacctctctggtcatgaccaggacagagcggcgctggcgcatatcaatagcctgccgcgtgcgcagtggaacagcaatattcaggagctggttaatcgactgcaaagcgatcaggtgctggaaaccgctaaccgcctgcgagaaagcggcaaagaggcagaagcggaagcgatgctgcgccagcaaccaccttccacgcgtattgacctcacgctggctgactgggcgcaacaacggggatcctctagagtcaccagcagcagcaagctgcatggttgcggcattggcggattaccatgtgccggaaagaccgtgcagctctattcaagaaggtggtccccacaaagacagcgggaagaaatgcggggcccaggaagagcactccagagcgagactcaccgaagagttatcggtcaccggtcaccggagtacagtacagcacacggcaggctgacggcgttcacaccacgcagcgaatctggatatccgcatccgtatgccacagacccggcaggtaaccgcctgcccgacccggagctgcacccggacagcaccctcagcatgtggccggataaccgtatcgcccgtgacgcgcactatctttaccggtatgaccgtcacggcaggctgacagagaaaaccgacctcatcccggaaggggttatccgcacggatgatgagcggactcaccggtaccattacgacagtcagcaccggctggtgcactacacgcggacacaatatgaagagccgctggtcgaaagtcgctatctttacgacccgctgggccgcagggtggcaaaacgggtgtggcggcgtgaacgggacctgacgggctggatgtcgctgtcacggaaaccgcaagtgacctggtacggctgggacggcgaccggctgaccacaatacagaacgacagaacccgcatccagacgatttatcagccggggagcttcacgccactcatcagagttgaaaccgccaccggtgagctggcgaaaacgcagcgccgcagcctggcggatgcgcttcagcagtccggcggcgaagacggtggcagtgtggtgttcccgccggtgctggtgcagatgctcgaccggctggaaagtgaaatcctggctgaccgggtgagtgaggaaagccgccgctggctggcatcgtgcggcctgaccgtggagcagatgcaaaaccagatggacccggtgtacacgccggcgcgaaaaatccacctgtaccactgcgaccatcgcggcctgccgctggcccttatcagcaaggaagggacaacagaatggtgcgcagaatacgatgaatggggcaacctgctgaatgaagagaacccgcatcagctgcagcagcttatccgcctgccggggcagcagtatgatgaggagtccggcctgtattacaaccgccaccgctattatgacccgctgcaggggcggtatatcactcaggatccgattgggctgaaggggggatggaatttttatcagtatccgttgaatccggtcataaatgtagatccgcaaggtttggttgatataaatttataccccgaaagtgatcttatccattctgtagctgatgagattaatatcccaggcgttttcacaatcggggggcatggtacccccacatctattgaatccgcaacgcgcagtatcatgacagagcgttatggcgttgatgaagtagaacggcttctggactcgtgccacgcgctgatgaactacggcgtggaccggtacaaacgcccgcaaaaaatctcgctgcaagaagagaaagcccggcagaaaagtcgcgaagagtatctgcaaagtcaggtcaatatgctctggcgtaccctgccgaagcgcgaggaagagaaaacggttgctgaagcgcgccgctatccgtccgaaccacaagaaaacctgctctattttatggagaaaaatgcgccactgctggaatcatggcagcgtgaaatcctgcgtattgtgcgtaaggtgagccagtatttttatccgcaaaaacagactcaggtgatgaacgaaggctgggcgaccttctggcactacaccatccttaaccatctgtatgatgaagggaaagtaacggaacgttttatgctggagtttttgcacagccacaccaatgtggtcttccagcccccctataacagcccgtggtacagcggcatcaacccgtatgccctcgggttcgccatgttccaggatattaaacggatttgtcagtcgccaacggaagaagacaaatactggttcccggatatcgccggttccgactggctggaaacgctgcatttcgcgatgcgtgatttcaaagatgagagttttatcagccagttcctgtcaccgaaagtgatgcgtgatttccgcttcttcaccgtgctggatgacgatcggcctaatatctggggatttccgatattcctaatgaagaaggtgtcgggagatcggtaa

SEQ ID NO: 4170 - DNA, 1838 bp, Homo sapiens
  SIMILAR (671)..(1006): 461254mologous to Escherichia coli RhsC protein precursor,accession number D90709,Smith-Waterman Score=176.
atggagaagctgctggtggccagctctgtaccgtccgtcatgcctggcatcgcgcacgcgttcccgtccgcggggagattcaagggcgcgatattcatgccgtcgccttcaaagacgtgtctcgtaacagttacgcgttcatacaggtttgagtttaagactttagatctctgccgaatgaccatgcagaacatcatgccgttgtcagccgccatgttccaaagcgagcgcaagaacccggccccgcagtgcccaccgcggctggagatgcagatgctgatgccagtgtcctggagccgcatgcccaaccacttcctgcagagtgatcccccactgggctctatgacgaagcagaccgcctcacgcacgcaccgtgaatgtgcgaaaccgcagagcggtggcagtatgacgaacgtgctggctgacagacatcagccatatcagcgaagggcaccgggtggcggtcattacaggtatgatgagaaaggccggctgaccggtgagcgtcagacgggcatcacccgcagacggaagcactgctctggcagcatgagaccagacatcgtacaacgcgcaggggctggcgaaccgctgtataccggacagcctgccgccgtggaatggctgacctacggcagcggttacctggcaggcatgaaaccggcgacacaccgctgcgaatctggatatccgcatcccgtatgccacagacccggcagtaaccgcctgcccgacccggagctgcacccggacagcaccctcagcatggggcggataaccgtatcgcccgtgacgcgcactatctttaccggtatgacgtcacggcaggctgacggagaaaaccgacctcatcccggaaggggttaccgcacggatgatgagcgcacccaccggtaccattacgacagtcagcacggctggtgcactacacgcggacacaatatgcagagccgctggtcgaaagcgctatctttacgacccgctgggccgcagggtggccaaacggaaagaagaacccgcatccagacgatgtatcagccggggagcttcacgccactcacagggttgaaaccgccaccggtgagcaggcgaaaacacagcgccacagctggcggatacccttcagcagtccgacggcgaagacggaggcagtgctcgtgttcccacacggtgctaggtgcagatgctcagaccggactggaaagtgaatcatcggctgaccgggtgcgctcttttatcagcttagcaaatcaaagtaagtgtgttgagcatgcttactgaaggtggcagtgtcatctgggagtttgctggtggtcgtctcaccagatccctgctgtgcctcttactggcagtgtcacccgctggcactgtcacctggcttcctcatctgaagctggcagtgtcgcctggcttcctcatctgtcagagggccacagtaacaggacctcctccccagagttgttgaggagcaggatgtgtgcctggcacaccctgagtgcccagtcagtgcacctggtgtcactgtatattttggagattttagccctgatgaattcaatcaattctttgtgactcctcgacttcagttgagcctaaacatcatttcggtcacaaatttatctggttcccaacgggtggacgcttgggaacgttctcttggacgtctcctccgctgcccctgccggtatgctgccctgcctttatgtgtcgaccatctacgaacggactccccctcctctgatttgaacggtgccaacacaacgacaccacgacgactgacacacgtcacctgtgtgcctgtcaccctgaccactggcagcttgtgtgaacccaactga

SEQ ID NO: 4171 - DNA, 1711 bp, Homo sapiens
  SIMILAR (393)..(34): 741254mologous to Homo sapiens putative p150,accession number U93572,Smith-Waterman Score=432.
ttaatcgtgcttgttttccccttgcattttctgatgctttgacatcttactgtccttgctgacattggaggaattgcccttccctggaatagctaattccttgtagattctggatattagacctttgtcagatggatagattacaaaaatgctctcccgttctgtaggttgcctgtacactctgatgatagtttcttttgctgtgcagaagctctttagtttaattagatcccatttgtcaattttggcttttgttgccattgcttttggtgttttagtcatgaagtctttgtccatgactatgtcctgaatggtattacctaggttttcttctagggtttttatggttttaggttttacatttaaatctttaatccatcttgagttaatttctagtttattgagtgtttttagcatgaagcgatgttcagttttattgaaggccttttctgcatctattgagataatcatgtggtttttgtcgttggttctttggtctttgctgttgatgagtttttccttcagatggagtttttgcatggtcatcctttttcttgatgttgatgctattgctttctgtttgttagttttccttagaacagtcaggcacttctgcaggtctcctgaagtttgctgggggtccattccagaccctgtttgcctgggtatcaccagcagaggcttgggcagtatggccattttcacgatattgattcttcctacccatgagcatggaatgttcttccatttgtttgtatcctcttttatttcattgcgcagtggtttgtagttctccttgaagaggtccttcacatcccttgtaagttggattcctaggtattttattctctgcaagtcacaggggatgcgatggcttggcttgggctcagaggcctgatattcctgccttcttatattacataagaaaaataacacaaaatagtgttgaagtgttggggcggcgaaaatttttgggcggtggtatggagagagaatgggtgatgtttctcagggctgcttcaagcgggattaggggcagcgtgggaaccaatttcaaatccgagtcacggcaccaaatttcatgtgcgtctgtgtgaagagaccaccaaacaggctttgtgtgagcaataaagctgtttatttcacctgggtgcaggtaggctttcagatttttgaaaagcctgaacccattgaagagatatgcaaggtatgttggaggccgatggcttagagaggattgggcctttgagaggctaaggtaagcttttatttgaattgatattctaatacaaagagttagatgctcagttattaaatcaaattctggattagcctgatgagaatggagtttttttaataagcaatcttccagttgatcgcatcggctcctgaggcttctgcattcttcacatagttctcgagccttggttttcagctccatcagctcctttaagcacttctctgtattggttattctagttatacattcttctaaatttctttcaaagttttcaacttctttgcctttggtttgaatgtcctcccgtagctcagagtaatttgatcgtctgaagccttcttctctcagctcgtcaaagtcattctccatccagcttttttccgttgctggtgaggaactgcgttcctttggaggaggagaggtgctctgctttttagagtttccagtttttctgttctgttttttccccat

SEQ ID NO: 4172 - DNA, 402 bp, Homo sapiens
  SIMILAR (54)..(176): 621254mologous to Cloning vector pZC320 SopA,accession number U26464,Smith-Waterman Score=119.
tcactgcgattgtgacgcgtcttgataacggattttccactcggtgatcgtgcgttgctgcccataaaggcggcgtttacaaaacctcagtttctgttcatctatgctcaggatgtggctgagatcaccccttagaaggtaacgacccccagggaacagtctcatagtatcagggaccgggacgcaccctaatcccactcgaagcagccctgagaaacatcgcccattctctctccataccacccccgaaaattttcgccgccccaacacttcgacactattttgccttatttttctgtgggcactctctctttgcccctcacattgaactcctggaagcggggactgtgctccaattgccacaagggccctggagcagtcccaccagcttctgacaaccat

SEQ ID NO: 4173 - DNA, 1033 bp, Homo sapiens
  SIMILAR (466)..(1002): 761254mologous to Homo sapiens nucleotide binding protein,accession number L04510,Smith-Waterman Score=642.
atgaagatgccggaagcaattgctacaaaagaaaaaattgacaaatgggatctaattaaaataaagagtttcttttccacaccaaaagaaacaatcaacagagtaaacagacatcatacagaatgggaggacatatccgcaatccatctatctgacaaaggtcccatatcctacatctataagaacttaaccagatttacaagaaaaaaacaaccccattataaagtgggcaaaggaaatgaacagacgcggatcctggagagtcatccgcatctgctgaaagggctggcgtcgacgccattcgacagcgaaggtgtgcgcaccgagcgtcgcgatattattaaagatggcatcctgactcagtggctgctgaccagctactcggcgcggaaactggggctgaaaagcaccggacatgcgggcggtattcacaactggcggattgccggacaaggtctaagcttcgagcagatgctcaaagagatgggcaccgggctggtggtaccagggactgcagagaatgcccggtcatgtattcgagcttatttttatgatatacatgaaactctgtgtcgtcaagaagaaatggctctaagtgttgttgatgatcatgttcgtgaaaaattgatttggctcaggcagcaccaagaagatatgactattttgttgtcagaggtttctgcagcctgcctccactgtgaaaagactttgcagcaggatgattgtagagttgtcttggcaaaacaggaaattacaaggttactggaaacattgcagaaacagcagcagcagtttacagaagttgcagatcacattcagttggatgccagcatccctgtcacttttacaaaggataatcgagttcacattgggaccaaaaatgggaaattcgggtcgttacgttagggattgggatgggtgctgggaaaaacttactatctttgttttaagtttaaaacagggtggaatttcatggcagccccttcccaaccatttggtttttaacgtgggaaactgttggatttttaaaatt

SEQ ID NO: 4174 - DNA, 1022 bp, Homo sapiens
  SIMILAR (401)..(970): 291254mologous to Xenopus laevis type I collagen alpha 1,accession number AB034701,Smith-Waterman Score=108.
tccgcagccgcggcctcctgccacccgggtgcccagccccctctctcttgcacgccccttggctctccgcctcctactgggagccaggagtactctcccggaggtggctggtatggatttagttggtttttgtttttcttttttctatttaagcaccagcccagggtgaggtggaggcgcccgaaaccctaaagggacttctcaatggggttcaaggtttcagtgagggacgcagggagggggaaactgcctcagatctgcaatctgactttgggaaggccacccccaggcctgtctgtgatgttgaaggccggagacccccaacaaatgccgctggtttgctctgaattccccaaaggcccagaacgtggcagttggggattgccgggtcctccactccccgcccggacacaatggccgccggcgccctgcacaaagactgggtgagggtgaggcgctgggcctctcctcaggtcaggaagaggggtcgaggcctgctcgacggccccacagctgagaccacgttttcctggggacaggcccaaagtggctttctggcgcccccgggagggctccgcggccgggggctgcacctctccggagcccaggcgcagccaatcagcgagcccagccggcacggaagcgggacggcgaaggctcctattgggcgcaacggctgtcacgcacaggggaggcggcgctctcacctgcgagccccgcgagccgtggggggccacatcccccttcatcggcccggtagcttccagacgcaagagctcttcgcggccgagttccgcgccgcggacccgggccggcctacctggctgccggcctacctggctgactgctcgcgccgtctctcccgaacaagccggcctcagtttcccctgaagagacaggggaacttgcaagctcagtcacttccggtgccgcggcaacgcgcgcgagcccgagacgcaaagggagtgcgcgccttgagtgactggcatcaggaccggggagagatcgccccctcgcggtag

SEQ ID NO: 4175 - DNA, 1629 bp, Homo sapiens
  SIMILAR (1)..(897): 991254mologous to Escherichia coli recC protein (aa 1- 1122),accession number X03966,Smith-Waterman Score=1557.
atggagagcgcgcagggcgagtggcaatcggttctaccttatgatgaatcgagcggcttaattgcagaactggtggggcatctggcttcactgctaatgcagctaaacatctggcgtcgcgggctggcacaggagcgtccgctggaagagtggttgccggtttgtcgcgatatgctcaacgccttcttcctgccggatgcggaaaccgaagcggcgatgacgctgatcgaacaacaatggcaggcgattatcgccgaaggtttaggtgcgcagtatggcgacgcggtgccgctgtcactattgcgtgatgaactggcacagcgtctggatcaagaacgtatcagccagcgttttctcgccggaccggttaacatttgtactctgatgccaatgcgttcaattccgttcaaagtggtttgcctgctgggaatgaacgacggcgtttatccacgtcagcttgcgccattgggctttgacctgatgagccagaaaccgaagcgtggcgaccgtagccgtcgcgatgacgaccgctatctgttcctggaagcgttaatttccgcgcagcaaaaactctatatcagctatatcggtcgttccattcaggataacagtgagcgtttcccgtcggtactggtgcaggaactgatcgactacatcgggcaaagtcattatctaccgggcgatgaagcgctcaactgtgatgaaagcgaggcaagggtaaaagcgcatcttacttgcctccatacccggatgccgtttgatccacaaaactaccagccaggcgaacgacaaagctatgctcgtgaatggctacctgcggccagccaggctggtaaagcacattctgaatttgttcagccgctgccgtttaccttaccggaaaccgtgccgctgaaacgctacaacgattcggtacgagcaccaacgtgtgctgaaagccgcgcaatatttacatcaacaaggaataacacgttgcaactcttcttcaacgctaacttccgccgcccctgggcgcgtggactcgccaccaacgtcaatgatcgtcgcgccagcgttgatcatcagattcgcatgtttcaccgcatctatcagcgagttatgcgtgccaccatccgaaaaggaatcaggcgtgacgttgaggatccccattactcatctgatgcgggaacttacttgtcgcctaattcgcgacaaatcagcaacggtaactggcagtcacacattggtcgtagcccgtcactgttgttatgccgcacctgggggctgctgtttactggcaaactggttgaaaccaggtttatttggcccaataggggtgttatcccgacggggaacgagcgttatattgcccataggcggtttttaccaatggaacccgatgatatgccccaatggcgttgtccccatgcaacatggttagcggaggccaagatgtttgattcactggcaaaagccggaaaatatttaggtcaggcggcgaagctgatgattggtatgcctgattacgacaactatgtcgaacatatgcgggttaaccatcccgatcaaacgccgatgacctacgaagagtttttccgtgagcggcaggacgcgcgctacggtggaaaaggcggcgcgcgctgctgctaa

SEQ ID NO: 4176 - DNA, 1575 bp, Homo sapiens
  SIMILAR (872)..(1570): 251254mologous to Lycopersicon esculentum BAC19.13,accession number AF273333,Smith-Waterman Score=240.
  misc_feature (1)...(1575): n = a,t,c or g
atgaatgcccagggcgggggaccgcagttaacggtgccccaattaacgtcagcggaaaatgtcccggcatttatacgacggcccgtgttacgacatcgagccggagggcgccgcacccttgacgtccacataccctcggccattgtggctcgccggggcatttggtttaagcggccccacatgcacaaccagttcgcagggggagactaccggcacctgagtgcctccgccaatgtacatttgtccctgcttcctcgacctcgaattcgcaccagtgttatcctcttctccacgcgttataggccatcctctatggttcaagggtatgtactgcaatttggtcttgagcgccatgtcaagcatatacagtgcaagcaggttacccgtagctttgccagctacgggggcggagagaataaatgctcggtgtcggggatttcgctgtcttcagtacggaagttcacctgcaaagcatctggaaaaatgcccgcaccggatgtgcccagaatcgttgtagcgttccagcggcacggtttccgttttgtggatcaaacggcatccggtatggaggcaagtaagatgcgcttttacccttgcctcgctttcatcacgttgagcgcttcatcgcccggaacagatagcggtcgtcatcgcgacggctacggtcgccacgctcggtttctggctcatcaggtcaaagcccaatggcgcaagctgacgtggcgaaacactttgtacgggagttacgccttggggtctgagtaccaatgtgtagcggtgcggggagaaaagccgctgatacgtcttggtccagaggcgggtcagttatccgccnattgtttttttctttccccctcccctccgtcatccccgccgtcgcccaaccggagccaaacaacagaagaggaaacgaagagacaggaaggagggaaaggaaaagggaggaggaggaagagaagaaaggaaggagaaaagaaacaaaaaaacgacgaaacagacaagaaggaaagcaacacaggaaagaagaaaaagaaggagaaaaacaaacgaaacaacgaacagaaacagaaagagaaacaaagaggaggagggagaacgagcaagcaaaagcacacaaaggaacaaggaagaggaaagaagaacaaaagaaggcgaaagcagcgagacggcgaacacacaagcgacagaacccgagcagaggcagggaaggaacacacccaaagcaaaggcaaggaaaagaagagggaacagacagaacaaggaagaagccaagcagaagcgagaagaagcaggaagaacgagacgggggacaggggacggaaagacgacaagaaagagcgacgacaacagcagacagagaagaaggcaaaacccaaagccgaacacggacaggagagaacggacaccacaacgaaaaaagcaagacaaagagaaggacgaccaagcgaacggagacgaagggagagagaggaaagagcaaacacgacccacaaaacagagcagaaaaaacgaacgaggagaaagaagagggaagacagcacgaaagataaacacagaagagcagcacaggaataa

SEQ ID NO: 4177 - DNA, 692 bp, Homo sapiens
  SIMILAR (40)..(603): 411254mologous to Pseudomonas phage D3 Orf53,accession number AF165214,Smith-Waterman Score=288.
atgaacgcgctgcacgccgaagcgctggaaatgacatcacagttcgatcaggagttggcggccaagttcgaagcagaccacgaaatggctctgctgatgaacaaggatttcgaccgtgaccgcgaagagcagcgccgcctggcggaacaggctcggcgtgagcacgaagagcgcattaagcgcgaagcagcagaacaagcccgccgagatgccgaagcgaagcacaaagcggagattgaagccgcagcgcgccgtgaagctgaagagaaagcacgtgcagagctggctgaacgccagcgcattgaagcggaacagcgtgcggaacgcgagaagaaggaaaccgaagagcgtgcgcgccgcgaaaaagaagaagccgttgccgccgagcgccgccgccaggaagaggcagaagccgcccgtttggtcgaagagcagcgcaaagctgaagaagaagcgcgccgagccgcagacaaagagcaccgccgcaccgtcaatcgtcgtgtctacgcagatctgattgctcagggcatcccagaagaatacgcacagaaagcagtgctggcgatcgctggcggcaaagtgcaggacgcgcacatcaaatattgaggcaaacatgaacgcatacctcacttacgaccgcatcgaagaacggcgctgggttgagcagcaactcaccgacgagaaagagaagt

SEQ ID NO: 4178 - DNA, 1166 bp, Homo sapiens
  SIMILAR (402)..(1100): 951254mologous to Escherichia coli preprotease III (AA -23 to 939),accession number X06227,Smith-Waterman Score=1139.
  misc_feature (1)...(1166): n = a,t,c or g
ttccaaccccaggaaaacgtgcttctcctggaggcaaccctatttttccaccctcgccctgttgttcccggaaggcaggcctggaatgtgaagcttccagtctcctgatccctttggccaacacaatcacaggagggctttggagtaatacgcctgcatcccggaggagcgcattttccaagggctgcggcagggcaggcaaaaacacccggtgtcataggacagccctcggcaccttcccaacgcgggctcaaggctggagtgcaccagcagtgatggaccccaacactctctccatggaacaggggaagcagttcttaaagcagtgcgggatcccacaaagagatatctctaaacctttatttattttgattttgacaactggatacgactttgagctcggtaccctagcgatctctgcgtctttaaccgataaaagcctggctaatcgcgatcaggttgtggcggcaatttttagctatctcaatctgttacgtgaaaaaggcattgataaacaatacttcgatgaactggcgaatgtgctggatatcgacttccgttatccgtcgatcacccgtgatatggattacgtcgaatggctggcagataccatgattcgcgttcctgttgagcatacgctggatgcagtcaatattgccgatcggtacgatgctaaagcagtaaaggaacgtctggcgatgatgacgccgcacaatgcgcgtatctggtatatcagcccgaaagagccgcacaacaaaacggcttactttgtcgatgcgccgtatcaggtcgataaaatcagcgcacatactttcgccgactggcagaaaaaagccgccgacattgcgctctctttgccagagcttaacccttatattcctgatgatttctcgctgattaagtcagagaagaaatacgaccatgccaagctgattggtgatgagtcgaatctgcgcgtggggtatgcgccaagccgttattttgccagcgagcccaaagctgatgtcagcctgattttgcgtaatccgaaagccatggccagcgcccgcaatcaggtgatgtttgcgatcaatgattatctcgcagggctggcgcttgatccccgggtgccgagctcgnntangaantcagnggntgctncggtactttgggnnnnnangactctc

SEQ ID NO: 4179 - DNA, 834 bp, Homo sapiens
  SIMILAR (16)..(339): 671254mologous to Escherichia coli O157:H7 protease III,accession number AE005510,Smith-Waterman Score=349.
atggtgaaggccaggaagatcatggagaccccacagcccgcctgggagatgcgtgtgaggatatgcaccgtggactggtccaagcttaacccttatattcctgatgatttctcgctgattaagtcagagaagaaatacgaccatccagagctgattgttgatgagtcgaatctgcgcgtggtgtatgcgccaagccgttattttgccagcgagcccaaagctgatgtcagcctgattttgcgtaatccgaaagccatggacagcgcccgcaatcaggcattgctcgaggggtactttagctttaccgctacggaagatcagctggagcaggcgaagtcctggtataaccagatgatggatttccagaaaagggtaaagcgtttgaacacgggaatatgcccgccccaaatgctcttgcaagtgccctactttttgcgagaaggaacgggagcattgaattattattactcccattctacatatgagaaaacaggaacagagtggttaagtaatttgcccaaggcggcacagctgagcatgatgcaagatttgcagactttactgatggctgcatcctattgttcagaacttggtcatgtggccacccagttccaaggaatgttagcctgcacaagaaatcctaattcctgggacaggaattcagagacaagtggaaaagcagagggctttatccccatgcaactgggggatgtggctgacccttctgtgcgatgcagctcggtttcctccctgtggggccacagcagccccaaattgctgagatcagtctgcatggcaaatagaatctgtgtcaagctgcagaggtggacctga

SEQ ID NO: 4180 - DNA, 1506 bp, Homo sapiens
  SIMILAR (703)..(1503): 951254mologous to Escherichia coli hns-dependent flhDC regulator HdfR,accession number AF251030,Smith-Waterman Score=1302.
atgctcaacacttgcaacagcaagattagatcacgcatacggatacgcatacatttaggcaaaggcatcgtaatgcaccaaaccggttcctgggctaggcacttcgcaattcgcatccggaaggcacacaccggtatcgtcacgtcatcgcaccggtcagcccgtcaaactagccctagcgcacccatccatatcgtagcgacgacccgtggcaactcaccacccaccagcagtcgagcatccgtcgccaccgtgtatactttggcacacaacaggttcatactttcgcaacataccagtagcatcaacaacagcctcgccagcatcggcacactagcgtattcgaaaacgctgttcaccaaacaatcctggattccccggccatatatctctgaaaccttacgtgtcgacccaactaacgaccgtctgagcgcactggtagaaatctaccgcatgatgcgccctggcgagccgccgactcgtgaagcagctgaaagcctgttcgagaacctgttcttctccgaagaccgttatgacttgtctgcggttggtcgtatgaagttcaaccgttctctgctgcgcgaagaaatcgaaggttccggtatcctgagcaaagacgacatcattgatgttatgaaaaagctcatcgatatccgtaacggtaaaggcgaagtcgatgatatcgaccacctcggcaaccgtcgtatccgttccgttggcgaaatggcggaaaaccagttccgcgttggcctgtcagcagtgagctttcgaatcagacaactggaaaatcaactgggtgtgaaccttttcacccgccacagaaacaatatccgtttaaccgctgccggtgaaaaactactgccttatgcagaaacgctcatgagcacctggcaggccgcccgtaaggaggtggcgcatacctcacgacataacgagttttctatcggtgccagcgcctcgttgtgggaatgtatgcttaatcagtggctgggacgcttgtatcaaaatcaggatgcccatacaggcttacagttcgaagcgcgaattgcccaacggcagtctctggtaaaacagctgcatgaacgccagcttgatcttcttattaccactgaagcgcccaaaatggacgaatttagtagtcagttgctgggatatttcactttagcgctttataccagtgccccttcaaaactaaagggagatcttaattatctgcgacttgagtgggggccagattttcaacagcatgaggcaggtttgatcggtgctgacgaagtgcccattctgacaaccagttctgctgaactggcacagcaacagattgcgatgcttaatggttgcacctggctacccgtcagctgggcgcgtaaaaaaggcggcctgcataccgttgtcgatagcacaacactttcacggccgctttatgccatatggctgcaaaatagcgataaaaatgcgttgattcgcgatcttttgaaaattaacgtgctggatgaagtgtattaa

SEQ ID NO: 4181 - DNA, 1116 bp, Homo sapiens
  SIMILAR (433)..(1113): 991254mologous to Escherichia coli Transposase,accession number AB024946,Smith-Waterman Score=1203.
atgctcgaccggctggaaagtgaaatcctggctgaccgggtgagtgaggaaagccgccgctggctggcatcgtgcggcctgaccgtggagcagatgaaaaaccagatggacccggtgtacacgccggcgcgaaaaatccacctgtaccactgcgaccatcgcggcctgccgctggcgctcatcagcacggaaggggcaacagcacctcgagggtcccgcgacgtgccggtacccgacagtcgcgagtcgagagcgagctgcgaacaacggttcccccgcccgactcgcggtagacacacttacagtgccgtgacactaaccgcaacgtttcggacggaactgagagtctaccgagatgcacgtctcaaacgccagctgcaagaacggaaggaagagctggctatcctccaaaagcccgcgaaatacttcgcgaagcgcgtctttattgaaaaacatcaggctgagttcagcatcaaagcaatgtgccgcgtgctccgggtggcccgcagcggctggtatacgtggtgtcagcggcggacaaggataagcacgcgtcagcagttccgccaacactgcgacagcgttgtcctcgcggcttttacccggtcaaaacagcgttacggtgccccacgcctgacggatgaactgcgtgctcagggttacccctttaacgtaaaaaccgtggcggcaagcctgcgccgtcagggactgagggcaaaggcctcccggaagttcagcccggtcagctaccgcgcacacggcctgcctgtgtcagaaaatctgttggagcaggatttttacgccagtggcccgaaccagaagtgggcaggagacatcacgtacttacgtacagatgaaggctggctgtatctggcagtggtcattgacctgtggtcacgtgccgttattggctggtcaatgtcgccacgcatgacggcgcaactggcctgcgatgccctgcagatggcgctgtggcggcgtaagaggccccggaacgttatcgttcacacggaccgtggaggccagtactgttcagcagattatcaggcgcaactgaagcggcataatctgcgtggaagtatgagcgcaaaaggttgctgctacgataatgcctga

SEQ ID NO: 4182 - DNA, 966 bp, Homo sapiens
  SIMILAR (869)..(913): 601254mologous to Escherichia coli RNA polymerase beta subunit (EC 2.7.7.6),accession number M38287,Smith-Waterman Score= 41.
atggaactggtgccggaacgcctgcgtggtgaaaccgcatcttttgacatcgaagctaacggtaaagtgtacgtagaaaaaggccgccgtatcactgcgcgccacattcgccagctggaaaaagacgacgtcaaactgatcgaagtcccggttgagtacatcgcaggtaaagtggttgctaaagactatatggatgagtctaccggcgagctgatctgcgcagcgaacatggagctgagcctggatctgctggctaagctgagccagtctggtcacaagcgtatcgaaacgctgttcaccaacgatctggatcacggaccatatatctctgaaaccttacgtgtcgacccaactaacgaccgtctgagcgcactggtagaaatctaccgcatgatgcgccctggcgagccggcgactcgtgaagcagctgaaagcctgttcgagaacctgttcttctccgaagaccggtatgacttgtctgcggttggtcgtatgaagttcaagcggtctctggtcataggtatccgggacggggacggcgaagtcgatgagatcgaccacctcgggaaccgcggatacagaccgcaggcgacccgcgggaaccacggcccgttgggcgcacatgtcacgtgccggcaaacggcgcgccgggaacgcaaaccaggcccggatataccgccagcgttccagcaaaaacacggagcacggtgttatctgacaaaagcggtgatacgaagaggtccgaagcgcgacaagcgcggtgaacaatacaggagtgttgcgcgacagtgtttcttgaaggacatagagagatgttacattctagctgctcaatctttatttgctgtggcggcgggccgccgcgggaatggacatctccgtgaacaaggtggttaccgtgtatgcttcgcttacaggtttgcccgtggtctggaaaagatgctgaaggactgcgcgctttcgcgg

SEQ ID NO: 4183 - DNA, 1755 bp, Homo sapiens
  SIMILAR (1)..(843): 941254mologous to Escherichia coli Rhs core protein with extension,accession number U16247,Smith-Waterman Score=1437.
atgctcgaccggctggaaagtgaaatcctggctgaccgggtgagtgaggaaagccgccgctggctggcatcgtgcggcctgaccgtggagcagatgcaaaaccagatggacccggtgtacacgccggcgcgaaaaatccacctgtaccactgcgaccatcgcggcctgccgctggcccttatcagcaaggaagggacaacagaatggtgcgcagaatacgatgaatggggcaacctgctgaatgaagagaacccgcatcagctgcagcagcttatccgcctgccggggcagcagtatgatgaggagtccggcctgtattacaaccgccaccgctattatgacccgctgcaggggcgatatatcactcaggatccgattggactgaaggggggatggaacctgtatggatatcaattgaatccgatatcagacatcgaccccctgggtttatctatgtgggaggatgcaaaatcgggggcatgtactaatggtctttgcggcacactatccgctatgataggtccagataaatttgattctatagatagcaccgcatatgacgccttaaataaaataaatagccaatctatttgcgaagataaagagttcgctggtttaatatgtaaggataatagtggcagatatttctcaacagcacctaaccgaggagaaagaaaaggatcatatccattcaatagcccttgccctaatggtactgagaaagtatcagcttatcatactcatggtgcagatagtcatggagaatattgggacgaaatattttcagtgaaaggtgaacaatttgaccgcctgagcctgctgaacgacattctgccggtttatcagcaagtgctggcagaactggcgaaacgcggcatcgagtgggtacagattgatgaacccgcgctgggtctgcatgttgacctcgtacatggtaaagatgacgttgctgaactgcacaagcgcctgccttctgactggttgctgtctgcgggtctgatcaatggtcgtaacgtctggcgcgccgatcttaccgagaaatatgcgcaaattaaggacattgtcggcaaacgtgatttgtgggtggcatcttcctgctcgttgctgcacagccccatcgacctgagcgtggaaacgcgtcttgatgcagaagtgaaaagctggtttgccttcgccctacaaaaatgccatgaactggcactgctgcgcgatgcgctgaacagtggtgacacggcagctctggcagagtggagcgccccgattcaggcacgtcgtcactctacccgcgtacataatccggcggtagaaaagcgtctggcggcgatcaccgcccaggacagccagcgtgcgaatgtctatgaagtgcgtgctgaagcccagcgtgcgcgttttaaactgccagcgtggccgaccaccacgattggttccttcccgcaaaccacggaaattcgtaccctgcgtctggatttcaaaaagggcaatctcgacgccaacaactaccgcacgggcattgcggaacatatcaagcaggccattgttgagcaggaacgtttgggactggatgtgctggtacatggcgaggccgagcgtatgacctggtggatactttggcgagcactcgacggattgttttacgcaaagcgtgggtccgactacggtcccgtgggtaacccgttgcctgtgcatacgacgacgatacgcatgggattccctcctaccaacagaggggcaaactgggacgcgcgatatggctga

SEQ ID NO: 4184 - DNA, 4215 bp, Homo sapiens
  SIMILAR (886)..(1419): 991254mologous to Escherichia coli RhsB core protein with unique extension,accession number U00039,Smith-Waterman Score=933.
  misc_feature (1)...(4215): n = a,t,c or g
atgcgctcggacccggatacttcagttaatgaaattgagacgaaactttctgccctactgggtagtgagaccactggtgaaatcctttttgacctcttgtgcgctaacggtccagagtggaaccgcttcgttacgctggaaatgaaatatggccggatcatgctggatacggccaaaattattgatgagcaggacgttccgacacatatcctgagcaaactgacttttactttacgtaatcatcctgaaggagtggtgatgaaaaattttgaagttctgcagccactacagaactccctttccggtctaccgctatgggtatctgaacgtatattgcagcagataaatcagttaacccactacgagccagtgatcggcatcatgggtaaaactggggcgggaaagagtagcctttgcaatgccctgtttgccggtgaagtatcgccggtcagcgatgtagcggcctgtacacgtgatcctttacgctttcgcctgcagattggagaacactttatgaccatcgtggatctgcccggcgtgggcgaaagtggcgttcgcgataccgagtatgctgcgctgtaccgcgaacaacttccccggctcgacctgattctgtggctgattaaggctgatgatcgggcactggcgactgatgagcatttttaccgtcaggtgattggcgaagcataccggcataagatgctgtttgttatcagccagtcagacaaagctgaacccaccagcggtggaaatatcctttccacagagcagaaacaaaatatcagccgcaaaatctgcctgctgcatgagctattccagcccgtgcatccggtgtgtgccgtgtcggttcgcctgcacccggtagtagcgctactgcaacaattccgcacggatgatgagcggactcaccggtaccattacgacagtcagcaccggctggtcgactacacgcggacacaatatgaagagccgctggtcgaaagtcgctatctttacgacccgctgggccgcagggtggcaaaacgggtgtggcggcgtgaacgggacctgacgggctggatgtcgctgtcacggaaaccgcaagtgacctggtacggctgggacggcgaccggctgaccacgatacagaacgacaggagccgcatccagacgatttatcagccggggagcttcacgccactcatcagggtcgaaactgccaccggtgagctggcgaaaacgcagcgccgcagcctggcggatgcccttcagcagtccggcggcgaagacggtggcagtgtggtgttcccgccggtgctggtgcagatgctcgaccggctggaaagtgaaatcctggctgaccgggtgagtgaggaaagccgccgctggctggcatcgtgcggcctgaccgtggagcagatgcaaaaccagatggacccgcacggaagggacaacagcgtggtaccagaatacgatgaatggggtaacctgctgaatgaagagaacccgcatcagctgcagcagcttatccgcctgccggggcagcagtatgatgaggagtccggcctgtattacaaccgccaccgctattatgacccgctgcaggggcgatatatcactcaggatccgattgggctgaaagggggatggaatttttatcagtatccgttgaatccgatctcagacatcgaccccctgggtttatctatgtgggaggttgccagacagatgaacgctatcgcgagtaaattgccggaaggttttcatattggaattaattttagcgcttcgcatattatttcgccgacgtttgtcgacgagtgtttaaatttccgtgacagttttacccgccgcgatttaaaccttgttctggaagtcaccgagcgtgacctattgaatgttgatgaaagtctggttcagcggttgaacatactgcatgaaaatggttttgtcatcgcactggatgatttcggtactggctactcagggctttcttatcttcatgacctgcatattgattatatcaaaattgatcacagtttcgttggccgcgtaaacgcagacccagaatcaacccgaattctggattgtgtattggatctggcgcgtaaactttcgatcagtatcgtcgctgaaggtgtcgaaacgaaagaacaacttgactatctgaaccaaaattatatcacatttcagcagggttattatttctataaacctgttacatacatcgacctggtcaaaattatcctttctaaaccgaagaaaggcattattgcgcaaatagttgtcaaccctggtgttatcacggttgtttttatatatcaccgaaataatcctcattttggcgcttctgaggggggcaacaaggggattgatatcgcaggcagcaaaggacaggcaattatcgcgaccgcagatggccgcgttgtttatgctggtaacgcgctgcgcggctacggtaatctgattatcatcaaacataatgatgattacctgagtgcctacgcccataacgacacaatgctggtccgggaacaacaagaagttaaggcggggcaaaaaatagcgaccatggggatcacgggtaggagccaccttatgagtcagaatacgctgaaagttcatgatttaaatgaagatgcggaatttgatgagaacggagttgaggtttttgacgaaaaggccttagtagaacaggaacccagtgataacgatttggccgaagaggaactgttatcgcagggagccacacagcgtgtgttggacgcgactcagctttaccttggtgagattggttattcaccactgttaacggccgaagaagaagtttattttgcgcgtcgcgcactgcgtggagatgtcgcctctcgccgccggatgatcgagagtaacttgcgtctggtggtaaaaattgcccgccgttatggcaatcgtggtctggcgttgctggaccttatcgaagagggcaacctggggctgatcccgcgcgtagagaagtttgaccccggacgtggtttccgcttctacacatacgcaacctnntttattgacccggatgtacgcttgataagctacagtacgcggcatccgaaacatgatatgcagcatctgcttaaagaagtggacaaaatgttgcaactgaacgttgacgagcgtccgctaatttgcggcgttggcttgggcggatactgggcggaacggattggttttctttgcgacatccgccaggtgatcttcaaccctaatttgttcccttatgagaacatggaaggcaagattgatcgcccggaagagtatgccgatattgccactaagtgtgtgaccaacttccgtgagaagaatcgcgatcgttgcctggtgattttgtcgcgtaatgatgaagcgcttaacagccagcggacatctgaagagttgcatcattattacgagattgtctgggacgaagagcagacgcacaaattccaagatatctccccgcatttacagcgcattaaagcgttcaaaaccctcggccagccggatgactcatgcgactggtatcgcctgcgtcatgaagaagcgatgacgccggatgcggtgcgcgtgattacgctcgatcctaacggtgcctggtcgctgaacgaagcgattaaaatcggtaaatacctgaagagttcgctggcttatgcagaagatccgtgtggtgcggacaatggtttctccggacgtgaagtgatggcggaatttcgacgggcgaccggcttgcccgtcgcgactaacatgatcgccaccaactggcgcgaaatgggtcatgcggtgatagcccaatgcggtagatattccacttgccgatccgcacttctggacgctttccggtgcatccgtgtggcgcaaatgtgcgacgactgggggctgacctggggctgccattctaataaccatttcgatatctctctggcgatgtttacccatgtgggcgcggcggcaccgggtaatcctaccgctatcgatacgcactggatttggcaggagggcgattgtcgcctgacccaaaatccgctggagattaaaaagggaaaaattgccgttcctgatgcgcccggtctgggcgtggaactggactgggaacaggtacaaaaggcacatgaggcctataaacgtctgcctggcggtgcgcgtaacgacgcaggtccgatgcagtacctgatccccggctggacctttgaccgtaaacgtcccgttttcggccgtcattga

SEQ ID NO: 4185 - DNA, 3243 bp, Homo sapiens
  SIMILAR (1)..(741): 991254mologous to Escherichia coli RNA polymerase beta subunit (EC 2.7.7.6),accession number M38287,Smith-Waterman Score= 1238.
gacctgttctttgaaaaagttatctttgaaatccgtgataacaagctgcagatggaactggtgccggaacgcctgcgtggtgaaaccgcatcttttgacatcgaagctaacggtaaagtgtacgtagaaaaaggccgccgtatcactgcgcgccacattcgccagctggaaaaagacgacgtcaaactgatcgaagtcccggttgagtacatcgcaggtaaagtggttgctaaagactatattgatgagtctaccggcgagctgatctgcgcagcgaacatggagctgagcctggatctgctggctaagctgagccagtctggtcacaagcgtatcgaaacgctgttcaccaacgatctggatcacggcccatatatctctgaaaccttacgtgtcgacccaactaacgaccgtctgagcgcactggtagaaatctaccgcatgatgcgccctggcgagccgccgactcgtgaagcagctgaaagcctgttcgagaacctgttcttctccgaagaccgttatgacttgtctgcggttggtcgtatgaagttcaaccgttctctgctgcgcgaagaaatcgaaggttccggtatcctgagcaaagacgacatcattgatgttatgaaaaagcctatcgatatccgtaacggtaaaggcgaagtcgatgatatcgaccacctcggcaaccgtcgtatccgttccgttggcgaaatggcggaaaaccagttccgcgttggcctgggctttaaccgcaacctgcgggtgtcggaaattatcggccaggtgtggcgtgcggcgaaaatcgtcggcgcagcaaaagtcaccggtcagcgtccgatcactaacgtagtgatgatgggcatgggcgagccgctgctcaacctgaacaacgtcgttccggcgatggaaatcatgcttgatgatttcggttttggcctgtctaaacgtcgcgtcacgctttccacttccggtgtagttccggcgctggataaactgggcgatatgatcgacgtgcactggcaatttccctgcacgcgccgaacgacgaaattcgtgacgaaattgtgccgatcaacaaaaagtacaatatcgaaacgttccttgctcgaatccaacgcaatccaggcccgagtcactattgaatacgtgatgcttgaccacgtttacgacggcactgaacacgcgcaccaactggcggaactgctgaaagatacgccgtatcaccctgatcccgtggaacccgttcccgggtgcgccgtatggacgcagctcgaacagccgtatcgaccgtttctcaaaagtgctgatgagctacggttcaccactattgtgcgtaaaactcgtggtgatgatatcgatgctgcctgtggtcagttggcgggcgatgttatcgaccgtacgaaacgtaccctgcgtaaacggatgcagggtgaagccatcgacattaaagcgcgaatgaatactgaagccacgcacgaccaaaatgaagcacttactaccggcgctcgcctgcgtaatgctcgcgaacaactaggacttagtcagcaggccgttgccgagcgactttgcctgaaggtttccacggtacgcgacattgaagaagataaggcacccgccgatcttgcttcaacattcctgccggatatatccgctcttatgcgcgtctggtacatattcttccggcgtatgataccgggccgcgttgcgtccatgaccccgcgcgtatcgtcacgtgctgagcgttacacatttgatacttcgcttcaacgccgtgtgattggcgcatcgaatatcgttgccgccccgatgagcatggaactgctgctggcagtgactcaccgcttcactaaaaatctgcgtcatcacgtagaaaatgccgatctattgatcgttgccgttggcaagccaggctttattcccggtgactggatcaaagaaggcgcaattgtgattgatgtcggcatcaaccgtctggaaaatggcaaagttgtgggcgacgtcgtgtttgaagacgcgctaaacgcgcctcatacattacgcctgttcccggcggcgatgagtaacatggcgacattttctttaggtaaacatccgcacgttgagctgtgcgacttgctgaaactggaaggctggagcgaaagcggcgcgcaggcgaaaatcgcgattgccgaaggccaggtgaaagtcgacggtgcggttgaaacgcgcaaacgctgcaaaatcgtcgccggtcagacacatcgacattttgccgaagcgaccatcatgccaaccgttattacgcacgccgccgttcccctatgcattggtttagggttgggttcgaaagtcatccctccgcgtctgttatttgccggaatcatcctggcgatgctgcccgacgccgacgtattgtcgtttaaatttggcgttgcttacggcaatgtttttggtcatcgcgggtttacccattcgctggtgtttgcgtttgttgtcccgctgttatgtgtgtttattggacgccgatggttcagggctgggctgattcgctgctggctgtttttaaccgtctcgttgctatcgcacagcttgctggattcggtaaccactggcggtaaaggcgttggctggctgtggccgtggtcagatgaacgctttttcgctccctggcaggtgataaaagtcgcgccgtttgcattgtctcgttacaccacgccgtacgggcatcagggtaaaatccttttcgttggtactaaacgcgctgcaagcgaagcggtgaaagacgctgctctgagctgcgaccagttcttcgtgaaccatcgctggctgggcggtatgctgactaactggaaaaccgttcgtcagtccatcaaacgtctgaaagacctggaaactcagtctcaggacggtactttcgacaagctgaccaagaaagaagcgctgatgcgcactcgtgagctggagaaactggaaaacagcctgggcggtatcaaagacatgggcggtctgccggacgctctgtttgtaatcgatgctgaccacgaacacattgctatcaaagaagcaaacaacctgggtattccggtatttgctatcgttgataccaactctgatccggacggtgttgacttcgttatcccgggtaacgacgacgcaatccgtgctgtgaccctgtacctgggcgctgttgctgcaaccgtacgtgaaggccgttctcaggatctggcttcccaggcggaagaaagcttcgtagaagctgagtaa

SEQ ID NO: 4186 - DNA, 2712 bp, Homo sapiens
  SIMILAR (655)..(614): 1001254mologous to Escherichia coli porin,accession number U49400,Smith-Waterman Score=75.
atggccgacagagtgtccacgctggatgttgatgcaatggtggtacgcgaaaccactcacctttcagccgcttatcctttcaccgggcaatggtcgggcgacgtttgccgttctgaaaaccgcctcgggcctgacctggctagcctttgcccggaacaaagcgtgataaagggcgaatcaacaggtgtggcgctgattttagttaatggcgaagctggaatcaccactcgacagtgtgcatggccgcggcgcaaaatcccccatcacataagcatatcgttgcgcttcaacccggctccggctcgcgacttcctgacgaactgctggcgctggtggcacattcattacgccaaacgaaacggaagccagcaaaagctcaccggtattcgtgttgaaactgatgaacatgcagcgcaaggcggcgcaggcacagtcgaggtagtcatgggctcagcgtcgctggtgaaggtcagcgcgtacctgaattccgggtgcaggctgtcgatacctagctgccggagatacctttaccgacagtataccaatcgatctcggtacccatttatcgtgcggcagcaggaaaaatattgctattccgcagcagttagcggtgcgaaacggaaagtccgttctggaaatcataaccgtaaaataaactacacggttaaaatcatggccttcacgttcaatatcatcctgccagtccagttactccagcgatccagcccaatgcgcgtatacggcgtcaccgagtgttgccgagcgtcagcggcaaataggcgcgaatttcttgcgtggaaaactaccgttattgcggctgtcgtccatattgaagccgcgctcgagataatagtcactcgcaaggcaagcgtattcgttgaaggcctgctgctggtgatcagccacgcctttgccgccacggttcggacgaacacggcacgtttacactcgaaaaaacgccacaacggattgtgtgctggaactctcgttcgccgatgcgctggccgccgtggacgtcatcccatcggtattgccgacgataacgatgcaaaacgcatcctgcccgaatgctgcgcacctgaaaccgtggcagtccgtcggaacgcgcgcgcagccgagctggaagccattgccgctctgaaaccagacctgatcattgccgacagcagcgccatgcgggggtttacatcgccttgcagcaaatcgcgccgacggcgttatgcacacgacgacacgctggtggatggcctggaggcggctatcgccatgacacggtcggtaaatctggtacgtcgcgacctgaatatggacagcggttgtcgcacagacgatttctgcgacgtgtttgccgccagtaaagtgctggggccgctgggagcaaagtctccattttgcgctatcacatttcgggtccgctggacgaccgcaaatcaacgaagtgtagcgccaaccgcgataatcgttgccaaggccaacgagccagaacataaccgtaggtcggatagggcgttcacgcgcatccggcagccgatgcctgatgcgacgctgtgcgtcttatcaggcctcaaaaggaacataaccgaagcacttcacggcgtccaggctgtcggtgatggtgatgcggtctttctcatactgatacgtgtgcttaagcctgccgggtttagctgttctgtcacccgcccgtcgctgtcgaacggtaacggatttccggccggcccgtgtgacggtgcgccaccatccgccccggtatttatcatcgtaaattctccgggtattccgggtcgtgcgtcagccaacggcagacagacggatgccgttgtcccggccatattcggtgtaacccgcagggtatcaggaaaagcggacggttccgtcccgccggaaatggcctgcgccgggcttcttctgcccgctgcgcctgcgtggtcagtaccagccggaatgacgccaggcaccatccgtcacgccggtgatttcgccgctgaattcacggcggcttcgcggtggaacgtctgtgtgcgcccgaagcggtccaccagccggtcagtacccgcggagttcttccggcagcgcctgccagagtgcggccagccgggaccttcatccagtttcgccacgccgccgcgcaccagccacagtgactcctgcggctgtaaccgtcctcaccgggaaacaggtgctcaaaatacaggctctgccgccgttatcactgagtatcagtgtgttatcgcgcagctgcgaatgagctgctgcgatgatgcgggttctcatcactcagcaggttgccccattcatcatattcgcgcaccacgctgttgccccttccgtgctgatgagcgccagcggcaggcgcgatggtcgcagtggtacaggtggatttttcgcgccggcgtgtacaccggtccatctggtttatcatctgctccacggtcaggccgcacgatgccagcagcggcggctttcctcactcacccgtttggtatccgcgcggcaaactacccctttattgccacgatatggataatctggtgctacccgcgtcgctcaaaccgcttcagcaaaattgttcggcctgactatcgacccggaacgtctggcggcgattcgcgggaacgtcgggagaacagtcgctatgcctcgcttcgtcagtgcaggatgaagtcgcggaagtggaagccttgtaccgtaaaaatcagatcccgtggataa

SEQ ID NO: 4187 - DNA, 1206 bp, Homo sapiens; identical to SEQ ID NO: 4166
  SIMILAR (1)..(702): 1001254mologous to Escherichia coli rhsA,accession number U00039,Smith-Waterman Score=1259.

SEQ ID NO: 4188 - DNA, 4770 bp, Homo sapiens
  SIMILAR (1525)..(2382): 981254mologous to Escherichia coli K12 putative general secretion pathway for protein export (GSP) (TYPE II TRAFFIC WARDEN ATPASE),accession number AE000409,Smith-Waterman Score=1388.
atgctgaaaggcgtttcgacctggcacctgaacagtccggaagagttcaccaaagttcagaacaagatcaaagatctggttgccagcggtcagttgggtattttcgctaatggctactggggtcatccggcgatgaaactgccgccggaagtgaacctgattgcggtagcgcactacctgcaagcgttggagtgccagcgtgacgctaaccgcgtcgtggcgctgctgggcggtaaaacgccgcacattcagaacctggcggtaggtggtgtcgcgaacccgatcaacctcgacggtttgggcgtgctgaaccttgagcgcctgatgtacatcaagtctttcatcgacaaactgagcgactttgttgagcaggtttataaggggagtgttatgggtcaggttttaccgctggttacccgccagggcgatcgtatcgccattgttagcggtttacgtattgtggctcgatgtagcggtataggccataaatcgagcctgctcccagcagaatgcaacagactgcaaggatcaaaaaatactttacgaacttcactggaaatttcccatttagtttcatttgggcagtttataaacaaacgcgcgtataaaggcaagctggcgttagtcggcggtagcggcagcgggaaatcattaacctgcgccgcaacgctgggcattttgcccgctggcgttcgccagacggcgggggaaattttagccgatggcaaaccggtttcgccttgcgccctgcgcggcatcaaaattgccaccatcatgcagaacccgcgcagcgcctttaatccactgcacaccatgcacacccacgcgcgggaaacctgcctggcgttagggaaacccgccgatgacgctacgcttaccgctgccatagaagcggtggggctggaaaacgccgcgcgcgtgctgaagctgtacccgttcgagatgagcggcggcatgttgcagcgcatgatgattgcgatggcggtgctgtgtgaatcaccgtttatcatcgccgatgaaccgaccaccgaccttgacgtggtagcacaggcgcgcatcctcgatctgctggaaagcattatgcaaaaacaagcgccgggaatgctgctggtgacccatgatatgggcgttgtggcgcgtctggcggatgacgtggcggtgatgtctgacggtaagattgtcgaacagggcgatgtagaaacgctgtttaacgcccccaaacatacagtgacgcgcagcctgacgacagcggaactgtcctcttcgagttttttgaagcacggcaagtctcttgcgggaatacccctaagggacactctccgtatatcctccccgggcgcgctaacgcaacctgatggttttatccgtccgccgatattcccttacgatgatgtttatcgctcactgtcaaaagagaaatacacccgttaccttcaggagcaactacagcggatcgacgggaaatcaaaagcgctggttggctcggaagatttgccgttgctggatgaaaacacgttcaacagtcacgcccctgcgccatcgtcacgttgggcgctggcacaacgaattggttatctctattcagagggcgagattatttatctcgccgatacgccattcgagcggttactcgatattcaacgtcaggttggccagtgccagaccatgaccagcttgtcacaggctgattttgaagctcggctggaagcggtattccatcagaataccggtgagtcgcaacagattgcgcaggatatcgatcaatccgtcgatcttctctcgctttcggaagagatgcccgcaaatgaagatctcctgaatgaagattcagcggcaccggttatccgcttgatcaatgcgattttgagtgaggccatcaaagaaaccgcctctgatatccacattgaaacctatgaaaaaacaatgtcgatccgttttcgcatcgacggcgttttgcggacaattttacagccaaacaaaaaactggcggcactgcttatctcccgaattaaggtcatggctcgtcttgatatcgccgaaaaacgtattccacaggatggaagaattagtttgcgtatcgggcgacgtaacatagatgtccgcgtatccacactgccgtccatctatggtgaacgcgccgtactccgcctgctggataaaaacagcctccagctttcattgaacaacctggggatgacggcagcggataagcaggatttagaaaatctcattcagcttccgcacggtattatcctggtgacagggccgacaggctccggtaaaagcaccacgctctacgccatcctttcggcgctgaatactcccggacgaaatattctgacggtagaagatcccgtggaatatgagctggaaggcatagggccaaacgcagaacacaaaaaaccaagacacaaaggaagaaaaaagaaaaagaaaagaaacgacacaagaaagaaaacaaaccgcgaagcaaaagaaaacacaaacaggcaaaacaacgaaagacaaaaacacaaaaaaaacacaaacaaacaagaaaagaagacagaaaacaacgaaaaaaagaaaaacacgaaacacgaaacagaaaacaaagaaacgcacgggtgcgacgtacaggaccgcatccagacgatttatcagccggggagcttcacgccactcatcagggtcgaaactgccaccggtgagctggcgaaaacgcagcgccgcagcctggcggatgcccttcagcagtccggcggcgaagacggtggcagtgtggtgttcccgccggtgctggtgcagatgctcgaccggctggaaagtgaaatcctggctgaccgggtgagtgaggaaagccgccgctggctggcatcgtgcggcctgaccgtggagcagatgcaaaaccagatggacccggtgtacacgccggcgcgaaaaatccacctgtaccactgcgaccatcgcggcctgccgctggcgctcatcagcacggaaggggcaacagcgtggtgcgcagaatatgatgaatggggcaacctgctgaatgaagagaacccgcatcagctgcagcagcttatccggctgccggggcagcagtatgatgaggagtccggcctgtattacaaccgccaccgctattatgacccgctgcaggggcgatatatcactcaggatccgattggactgaaggggggatggaacctgtatggatatcaattgaatccgatatcagacatcgaccccctgggttatctatggttcataccatccgcagtatgtgcagacccttttctaaactgtaatcgtttggaagcaccccggagcttatttaacccgaagcgtttaccaaagggaatcccctctttgggaccagattttcctgccgtgatcccggtcatcttgatggctatcgccgccgtttgtgaaattacgttaccgaaaactaacaccgtgcgcctcttctttgaatttgtcggtaaccctgccgttgcgctgtttattgccattgttattgcgattttcacactgggccgacgtaatggacgcaccatcgagcaaatcatggatatcattggggattctataggcgctatcgcgatgattgtgtttattatcgctggcggcggcgcgtttaagcaggtattagtagatagcggtgtcgggcactatatttcacacttaatgaccggaactacactttcgccgttattgatgtgctggactgttgcggcgctgttgcgtatcgctctgggctctgccaccgtcgcggccattaccaccgcgggtgtggtgttgccgattatcaacgttacccatgccgatcccgctttaatggtactggcaaccggtgcgggcagcgtgatcgcgtcacacgtaaacgacgctggcttctggctatttaaagggtattttaatctgacggttggtgaaacgttgcgtacctggacggatatcgctacgctggctggcgtaacaaaaatgaccgtgagtcgttatatccgctcgccgaaaaaggtggccaaggaaacaggcgagcgcatcgccaaaattatggaagagatcaattatatccctaatcgcgctcccggcatgttgtgtagtttgccccaatgttcctggcttcttcacccgatgggcggcaactggcggttgggtaaatgcgctggaacaagaatggctacaccgttacggtacgcattaatctttttgctgtgggcgatggtggcggtgatttatgcaccgctgatcccggcagctctcacgctgatatcgcctgctttgtcgttgacacactggcaggcgttatttgccgatccacagttaccgcaggcattactggcaacgctggtgtcgacaaccatcgcggcggtcggggcattgttgattgccctgctggtgattgtggcgctgtggcctgggccgaaatggcagcgtatgtgcgcccgtctgccgtggctgctcgccattccccatgtggcttttgccaccagcgcccttctgctctttgctgacggagggctgctttatgactatttcccgtatttcactccgccaatggaccgatttggcatcggtctgggcctcacccttgcagtgaaagaaagcgcatttctgctgtggatcttagcagcagtattgagcgaaaaatggctgttgcagcaggtcattgtgctggattcgctgggctacagccgctggcaatgcctgaactggctgctgttgcccaccgtcgcgcctattctacacacaagccaccttggctgcctgacatatccctctctttaa

SEQ ID NO: 4189 - DNA, 2054 bp, Homo sapiens
  SIMILAR (1896)..(931): 951254mologous to Escherichia coli RhsC protein precursor,accession number D90709,Smith-Waterman Score=1673.
ttaccgatctcccgacaccttcttcattaggaatatcggaaatccccagatattaggccgatcgtcatccagcacggtgaagaagcggaaatcacgcatcactttcggtgacaggaactggctgataaaactctcatctttgaaatcacgcatcgcgaaatgcagcgtttccagccagtcggaaccggcgatatccgggaaccagtatttgtcttcttccgttggcgactgacaaatccgtttaatatcctggaacatggcgaacccgagggcatacgggttgatgccgctgtaccacgggctgttataggggggctggaagaccacattggtgtggctgtgcaaaaactccagcataaaacgttccgttactttcccttcatcatacagatggttaaggatggtgtagtgccagaaggtcgcccagccttcgttcatcacctgagtctgtttttgcggataaaaatactggctcaccttacgcacaatacgcaggatttcacgctgccatgattccagcagtggcgcatttttctccataaaatagagcaggttttcttgtggttcggacggatagcggcgcgcttcagcaaccgttttctcttcctcgcgcttcggcagggtacgccagagcatattgacctgactttgcagatactcttcgcgacttttctgccgggctttctcttcttgcagcgagattttttgcgggcgtttgtaccggtccacgccgtagttcatcagcgcgtggcacgagtccagaagccgttctacttcatcaacgccataacgctctgtcatgatactgcgcgttgcggattcaatagatgtgggggtaccatgccccccgattgtgaaaacgcctgggatattaatctcatcagctacagaatggataagatcactttcggggtataaatttatatcaaccaaaccttgcggatctacatttatgaccggattcaacggatactgataaaaattccatccccccttcagtccaatcggatcctgagtgatataccgacccagcagcgggtcataatagcggtggcggttgtaatacaggccggactcctcatcatactgctgacccggcaggcgaatgagctgctgcagatgatgcgggttctcatcactcagcaggttgccccattcatcatattctgcgcaccacgctgttgccccttccgtgctgatgagcgccagcggcaggccgcgatggtcgcagtggtacaggtggatttttcgcgccggcgtgtacaccgggtccatctggttttgcatctgctccacggtcaggccgcacgatgccagccagcggcggctttcctcactcacccggtcagccaggatttcactttccagccggtcgagcatctgcaccagcaccggcgggaacaccacactgccaccgtcttcgccgccggactgctgaagcgcatccgccaggctgcggcgctgcgttttcgccagctcaccggtggcggtttcaactctgatgagtggcgtgaagctccccggctgataaatcgtctggatgcgggttctgtcgttctgtattgtggtcagccggtcgccgtcccagccgtaccaggtcacttgcggtttccgtgacagcgacatccagcccgtcaggtcccgttcacgccgccacacccgttttgccaccctgcggcccagcgggtcgtaaagatagcgactttcgaccagcggctcttcatattgtgtccgcgtgtagtgcaccagccggtgctgactgtcgtaatggtaccggtgagtccgctcatcatccgtgcggataaccccttccgggatgaggtcggttttctctgtccgcctgccgtgacggtcataccggtaaagatagtgcgcgtcacgggcgatacggttatccgccacatgctgaggggttttcttgactgtctttaaatctgacttggaagcgtcgttcactctcttctgctctgctactctgatctcgctcgagtgtggtaagaataggaggttggggtaccacatgtgacgtccagttgctagctgcagccagccac

SEQ ID NO: 4190 - DNA, 979 bp, Homo sapiens
  SIMILAR (322)..(435): 731254mologous to Escherichia coli rpoB,accession number V00339,Smith-Waterman Score=140.
ctatgcacagtgggggattcccgccggcacggtgcagatgccgaccggctggaaagtgaaatcctggctgaccgggtgagtgaggaaagcgccgctggctggcatcgtgcggcctgaccgtggagcagatgaaaaaccaatggacccggtgtacacgccggcgcgaaaaatccacctgtaccactgcgccatcgcggcctgccgctggcgctcatcagcacggaaggggcaacagcgggtgcgcagaatatgatgaatggggcaacctgtaagctccagatgaccatttttgttattctccacacgagttagttcttcttttcggatccggcacttgtcagctaccgccttggcgaaccggtgtttgacgtccaggaatgtcaaatccgtggcgtgacctattccgcaccggtgtcgacccaactaacgaccgtctgagcgcactggtagaaatcaccgcatgatgcgccctggcgagccgccgactcgtgaagcagctgaaagctgttcgagaacctgttcttctccgaagaccgttatgacttgtctgcggtggtcgtatgaagttcaaccgttctctgctgcgcgaagaaatcgaaggtccggtatcctgagcaaagacgacatcattgatgttatgaaaaagctcatgatatccgtaacggtaaggcgaagtcgatgatatcgaccacctcggcaacgtcgtatccgttccgttggcgaaatggcggaaaaccagttccgcgttgcctggtacgctgtacgggcacagtaccaccttttttgcaccagcaaaagtgcgaataccacttgcccaaaggcccgtcgcgagtactttgtcgcgatatttttgacattttcgactcaggaatttttcgatgccaagagcgaacgaaattaaaaaaggtatggtatgaattacaacggcaaactgctggccctcaattttcactcgttgttgatcgccctcacacttcat

SEQ ID NO: 4191 - DNA, 1161 bp, Homo sapiens
  SIMILAR (285)..(338): 501254mologous to Escherichia coli Sensor protein torS (EC 2.7.3.-),accession number D90736,Smith-Waterman Score=48.
cgtcggttgtactcaaaatcgtcgagcgggtggatgggtattttccctctcccccgcttttcctgggtgccgcgtttggatctcacgtgcggtcgcgtgctttgcccgacccgtgtgttttattccgcgtgaccatttacttgtgcgtgcttgcgtctgtggctcggactttttcaccgctattacccgtttcacggaaaaaacacattaccccgctcggtggctttcagctacacgaaactcacctttgtcttcaggactgtcgcacaattatccttcgcccccgtttgggcgagtttggtaataaattcagtcagctggtggacaccattgacttgcattaatcagcacggactggcgcatctgtaaaaagagagtgcacgcgggcaatacagcctgttattgctggggatggtttccctttgcgcactgattctgatcctctggcgcgtggtttatcgttcagtcacgtgtccacttgccgatcaaacgcaggcgctgcatcggctgctggacggtgatattgtctcccctttcccggaaaccgctggcgtacgggagctggataccatcgggcggctgatggatgcgtttcgcagcaatgttcatgctctgaatcgccaccgcgaacagctggcggcgcaggtcaaagcgcgtacagctgaattgcaggaactggtgatagaacaccgacaggcacgggcggaagcagaaaaagccagccaggcaaaatcggcgtttctggcggcgatgagccatgagatccgcacaccgctgtacgggattctcggcactgctcaactgctggcagataaccccgcacttaacgcccagcgtgatgatttgcgggcaattactgactctggtgaatcgttgctgaccatcctcaacgatattctcgattattccgctatcgaagcaggtggcaatgaatgtttcggttcagtcgtatgtagcccgtttagaaccggtcgccgcgtctgggtggcacaagtacccatggctgaattaatgagcggtcacgtggtgcaacaggtcgcccctggattccgtccctgggccaatcggcgatatatgcctgcattgcattatttggccccgggttgcccgacggattttaaagtcgtggggcggaaatttcctaacaggggcccgttttaa

SEQ ID NO: 4192 - DNA, 502 bp, Homo sapiens
  SIMILAR (313)..(501): 1001254mologous to Klebsiella pneumoniae mannitol transport protein,accession number AF166095,Smith-Waterman Score=324.
atgaggaggaggcaaacgaggaaacaagaatacccaaaagccctggtatcaacatgcaggaaagtgttcacactacaattttcaattctggcaatcgatttaggttgcattccctgggccgtcatgcggataatttccatttcccgcctgcattttcatttcgtcagcaatgttcatgcactgaatcgccaccgcgaacagctggcggcgcaggtcaaagcgcgtacagctgaattgcaggaactggtgatagaacaccgacaggcacgggcggaagcagaaaaagccaatagtaacatgaacatgacaaaagggtggttaccgaacgagacgctggcgaagctggtcgggccgatgatcacttatctcctgccgctgctgatcggttataccggtggtaagctggtaggcggcgaacgtggcggcgtagtcggtgccatcaccaccatgggcgttatcgtcggcgcagacatgccgatgttcctcggttctatgattgcag

SEQ ID NO: 4193 - DNA, 653 bp, Homo sapiens
  SIMILAR (1)..(645): 921254mologous to Escherichia coli K12 putative amidase,accession number AE000194,Smith-Waterman Score=1034.
ggtgttaacgggatggcacgcgacgtggtgctctctgatgcgatgatgggctatctccatttcattgcaaatattccggtcaaaggcactcgctggctatatagcagtaaaccttatgcacttgcaacgccgccgctctcggtgattaaccaatggcagctggcgctggataaaggtcaattgcctacgtttgttgcaggactggcaccgcagcatccgcaatatgcggcgatgcatgaatcgttactggccttactctgtgacaccaaaccgtggccccaactgaccggcaaagcaacgttgcgcccagggcagtggagtaacgacgtaccggcgttgcgcgaaatattgcaacgcacaggcatgttggacggggggccgaaaattactctacctggcgatgacacgccaactggagcggtaatcagcccatccgctgttactgttgaaacagcagaaactaagccgatggataagcaaacgacgtctcgtagtaaacctgcgcctgccgttcgcgccgcctacgataatgaactggtggaagccgttaaacgttttcaggcatggcaaggattgggggcagaggggactatagcgccgggcagaccggacaggggaaacgagagcgaccgagcagaggggggagagcggga

SEQ ID NO: 4194 - DNA, 774 bp, Homo sapiens
  SIMILAR (155)..(202): 1001254mologous to Escherichia coli K12 putative amidase,accession number AE000194,Smith-Waterman Score=81.
  misc_feature (1)...(774): n = a,t,c or g
ttatgcacttgcaacgccgccgctctcggtgttaaccaatggcagctggcgctggataaaggtcaattgcctacgtttgtgcaggactggcaccgcagcatccgcaatatgcggcgatgcatgaatcgtactggccttactcggcgttgcgcgaatattgcaacgcacaggcatgttggacggggggccgaaaattactctactggcgatgacacgccaactgacgcggtagtcagcccatccgctgttangaactcgcatgggcggtaggtaccgactttgggaggggtctggggactctagaatattctgagactgtactggagatggagttgtgtccaaatctggggttgtgtcagattctgggacctgctcgaggtagtgggaaaggctggtcacctccgacggtgtagaagggtcagagtcagctctttgggcaaggtgggtaagggcgtgggtgagggctccggggtaacgcgggaaccacattggtgctttcgtttttctcctgctctttgtgtgtggttttccgtgctcctttgttggtcgtccggggtgtccgttgcgggcgctctttgtccgtctcttcttccctgtctcgttttgtcttcccgtttccggttttcctctctttttgtcggtgttgtctctgcttgttcctctttgttcctctctgggcgtttgtcgtttttttggcggtccgtgtgtattgtcctctttgggttctctgtctctctggcgtcttgtttttatggtgtttttgttgttgtccat

SEQ ID NO: 4195 - DNA, 194 bp, Homo sapiens
  SIMILAR (3)..(194): 1001254mologous to Escherichia coli gidA protein,accession number X01631,Smith-Waterman Score=324.
tgcgtttgactgaaatcggtcgtgaactgggcctggtggatgacgaacgttgggcgcgctttaacgagaaacttgagaatatcgagcgtgagcgtcagcgtctgaaatcgacctgggtaaccccgtcggcggaagctgcagccgaagtgaatgctcacctgactgcgccgctttcccgtgaagccagtggtgaa

SEQ ID NO: 4196 - DNA, 580 bp, Homo sapiens
  SIMILAR (32)..(370): 991254mologous to Escherichia coli Cytochrome bd-ii oxidase subunit ii (EC 1.10.3.-),accession number D90735,Smith-Waterman Score=580.
cacctattacaattcagctcggcacccggggatcttcccgctgctgggattcttctgcccattgcttacggtgatggcgatttatcgtggggggccgggttggggatttttgatggcatcattgatgcaatttggcgtgattttcacggcaggcatcacgctgttcccctttgtcatgccgtcaagcgtgagtccgatctccagcctgacgttgtgggacagtacttccagtcagctgacgctgagcattatgttggtaatcgtgctgatatttttgcccattgtgttgctctacactctctggagctactacaaaatgtgggggcgcatgacaacagaaactctccgccgtaacgaaaacgagttgtactaaggagcagaaacaatgtggtatttactttgggtcgtcggcattttgttgatgtgttcgctctccacccttgtgttggtatggctggacccgcgtctgaaaagttaacgaacgtaggcctgatgcggcgcattaacatcgcatcaggcaatcaataatggccgaaatgaaaagcggaaacctattcgtgaaagcgatcctcttaaagcc

SEQ ID NO: 4197 - DNA, 949 bp, Homo sapiens
  SIMILAR (568)..(654): 651254mologous to Escherichia coli K12 putative ATP-binding component of a transport system,accession number AE000184,Smith- Waterman Score=88.
ggttgctgccgcggcgcaacgccccgctggccgccgttctctgtccgccccctcctcttccgcgcgggtctctcggcgccgtcgcgggccaccctctctcgccgggggtccgtagcgaccgggcacgggtcgttgttcagctgtgcagctccccgttcttctgctgcgcggcccccactcctctcacacggtcggtacccaccatggtggatctggattccggccagctgtgcgtttacccgggtaactccgatgagtccatgccggcggcgacccaggcgcgtgaacgtctgctggccgataccgccaagaagaaagcgcagattgctgagttgcaatctttcgttagccgctttagcgccaacgcctagaaatctcgccaggcaacttcgcgcgcgcgccagattgataaaatcaaactggaagaggtgaaagcctccagccgtcagaacccgttcatccgttttgaacaggataagaaactgttccgtaacgcgctggaagtggaaggtctgaccaaagggtttgataacggtccgctgtttaaaactctcaacctggtgctgcgaagtgggtgaaaacctgccggtcctgggtaccaacggcgtcggtaaatcaacgctggctgaaaacgttggtgggcgatctgcacccggacagcggcaccgtaaaatggtctgagaacgcgcgcattggttactatgctcaggaccacgaatatgagtttgaaaatgatctgcccgtgttcgaatggatgagccagtggaagcaggaaggcgatgacgagcaggcggtacgcagtattctcggtcgtttgctgttcagccagggcgacatcaaaaagccagctaaagtgctttccggtggggaaaaaggccggatgctgtttggtaagttaatgatgcagaagccgaacattctgatcatggacgaaccgcccacccacccg

SEQ ID NO: 4198 - DNA, 1203 bp, Homo sapiens
atggtgaagaaaatggctcgtgcgccaatgatcgctggacgctggcgaacccggaaccggaaattctggcctgccggcatgggcgcaaagaagtgcgtccggatgccatcatttgcaaccccgggtcgttctgactatccgaaccagagtgaaacaaacgtcctggtgcttcccggccaacgtccatcggataccgcaggctgcatcacacctgagggcacaccagagccgtatacctatatccctgatgagcatcagcgcgaaaatcctaacatatctgcttgcaaaccaaatccaatttctcgtcaaacagcactagtcattggagaacagatgattgatgtcttagggccggagaaacgcagacggcgtaccacacaggaaaagatcgcaattgttcagcagagctttgaaccggggatgacggtctccctcgttgcccggcaacatggtgtagcagccagccagttatttctctggcgtaagcaataccaggaaggaagtcttactgctgtcgccgccggagaacaggttgttcctgcctctgaacttgctgccgccatgaagcagattaaagaactccagcgcctgctcggcaagaaaacgatggaaaatgaactcctcaaagaagccgttgaatatggacgggcaaaaaagtggatagcgcacgcgcccttattgcccggggatggggaacgaaccgatgactggatggatggccgccgcagtcgtcacactgatgatacggatgtgcttctccgtatacaccatgttatcggagagctgccaacgtatggttatcgtcgggtatgggcgctgcttcgcagacaggcagaacttgatggtatgcctgcgatcaatgccaaacgtgtttaccggatcatgcgccagaatgcgctgttgcttgagcgaaaacctgctgtaccgccatcgaaacgggcacatacaggcagagtggccgtgaaagaaagcaatcagcgatggtgctctgacgggttcgagttctgctgtgataacggagagagactgcgtgtcacgttcgcgctggactgctgtgatcgtgaggcactgcactgggcggtcactaccggcggcttcaacagtgaaacagtacaggacgtcatgctgggagcggtggaacgccgcttcggcaacgatcttccgtcgtctccagtggagtggctgacggataatggttcataa

SEQ ID NO: 4199 - DNA, 1450 bp, Homo sapiens
  SIMILAR (355)..(747): 931254mologous to Escherichia coli K12 putative multimodular enzyme,accession number AE000333,Smith-Waterman Score=609.
gaacatgaagacctcgtcaagaccgtggtcgtgactgaacacggcttgtagccgaatttggacacctccacgtctaccccgtagctccacacttcctctaggtgcctggccgcagcgcgagtcgcggggggcgggcactcaagcgcgcgtcacgaccgaacaacaagatccgaggggtcgagtcgggagacccaaggcgtcgaagtcaacgaatccaagtgcacggtttggagtggcaccgcccgcgcagaacgcacccgacatggggggggaatcatcttacgaggcgcgtaacgagacagacatgttccatattggacagcacgtgcgccagaggatgaatagaccgcgtacttccggtcggatcagaagggcacggcaattataagcactgtcgccatcctcaacggcttgcgcgtggtggagaaaaacatctccgacgtgcggatggtggtttccggcgcgggtgccgcagcaatcgcctgtatgaacctgctggtagcgctgggtctgcaaaaacataacatcgtggtttgcgattcaaaaggcgttatctatcaggaccgtgagccaaacatggcggaaaccaaagccgcatatgcggtggtggatgacggcaaacgtaccctcgatgatgtgattgaaggcgcggatattttcgtgggctgttccggcccgaaagtgttgacccaggaaatgaaaaagaaaatggatcgtgcgccaatgatcctggcgctggcgaacccgttattcggaaattctgccgccgctggcgaaagaagtgcgtccggatgccatcatttgcaccggtcgttctgactatccgaaccaggtgaacaacgtcctgtgcttcccgttcatcttccgtggcgcgctggacgttggcgcaaccgccatcaacgaagagatgaaactggcggcggtacgtgcgattgcagaactcgcccatgcggaacaaagcgaagcggtggcttcagcgtatggcgatcaggatctgagctttggtccggaatacatcattccaaaaccgtttgatccgcgcttgatcgttaagatcgctcctgcggtcgctaaagccgcgatggagtcgggcgtggcgactcgtccgattgctgatttcgacgtctacatcgacaagctgactgagttcgtttacaaaaccaacctgtttatgaagccgattttatcccaggctcgcaaagcgccgaagcgcgttggtctgccggaaggggaagaagcgcgcgttctggctgccactcaggaactggtaacgcttggactggccaaacccaaccttatcggtcggccgaacgtgatcgaaaaggcgcaattcgaaactggggcttggcagatcaaaagcgggcggttgatttttgagaatccctcttgagagccgacctgccagggcatgccagcctttggccctgggcccggcggtttttacccaacc

SEQ ID NO: 4200 - DNA, 323 bp, Homo sapiens
  SIMILAR (139)..(321): 1001254mologous to Homo sapiens dJ93K22.1 (novel protein (contains DKFZP564B116)),accession number AL050333,Smith-Waterman Score=318.
atggtggtgctttgtaaatttcactccgtgtttctgtctcagaaagggcaggtttatacctgtggtcatggtcctggagggcgattaggacatggagatgaacagacatgcttggtaattgaaatgtcattacactatttaggttgtttgctagatcccaatggagaaaagtgtgtaactgctcctcgtcaggtctctgcccttcaccataaagacattgctctgtctttggttgctgcaagtgatggagctacagtctgtgttaccacaaggggagatatttacttacttgcagactatcagtgcaagaagatggcttctaa

SEQ ID NO: 4201 - DNA, 1856 bp, Homo sapiens
  SIMILAR (636)..(1853): 1001254mologous to Homo sapiens dJ93K22.1 (novel protein (contains DKFZP564B116)),accession number AL050333,Smith-Waterman Score=2050.
tattggaagttatgtccagggcaatcaggaaagagaaagaaataaagggtattcaattaggaaaagaggaagtcaaattgtccctgtttgcagatgacatgattgtatatttagaaaaccccatcgtctcagcccaaaatctccttaagctgataagcaacttcagcaaagtctcaggatacaaaatcaatgtgcaaaaatcacaagcattcttatacaccaataacagacaaacagagagccaaatcatgagtgaactcctattcacaattgcttcgaagagaataaaatacctaggaatccaacttacaagggatgtgaaggacctcttcaaggagaactataaaccactgctcaaggaaataaaagatgacacaaacaaatggaagaacattccatgctcatgggtaggaagaatcaatatcgtgaaaatggccatactgcccaagtgctgggattacagacgtgagccactgcgcctggcctactggtttattaaaaaggatattgcaaaggatacagatgaagagacgcgtagggcttccagttgtgcagctctggaaatgccaattcattctgatatattaaaagttattttggactacctctatactgatgaagctgtggtgataaaagaatctcaaaatgtagattttatttgtagtgttcttgtggtggctgatcaacttctcataacccggttgaaagagatttgtgaagtagcattaactgaaaaacttaccctgaagaatgctgctatgctactggaatttgcagcaatgtatagtgcaaaacagttgaaactgtcttgtttacagtttataggattgaatatggcagctttacttgaagcaaggtctcttgatgttttaagcgatggtgttttgaaggatctttctgagttttaccggaaaatgattccagcaatggatagaagagtcattacaccatatcaagatggaccagatattagctatttggaagtagaagatggagatatcttcttgaaagaagaaataaatatggaacaaaatcattcggaaactatgttcaagaaagcaaaaacaaaagctaaaaagaagccacgtaaacgttcagatagttctggaggttataacctttcagatattattcagagtccatcatctacaggattattaaagtctggtaagaccaattctgtggaatctcttccagaactgttgacatcagactctgaaggaagctatgcaggagtgggtagtcctagagatttacagtcccctgatttcacaacaggatttcattcagataagattgaggcgaaagtcaaaccgtatgttaatggtacatctcctgtgtattctagggaagatttaaaaccatgggaaaagtcaccaatacttaaaatatctgctccacagcctattcccagtaacagaattgatactaccagctctgccagttgggttgctggttctttcagtcctgtcagccctcctgttgtggatctcagaactatcatggaaatagaagaaagtagacaaaaatgtggagctacaccaaagtcacatttaggcaaaacagtttctcatggagttaaactttctcagaagcaacgaaaaatgattgcattgactaccaaggaaaacaattcaggaatgaatagcatggaaacagttttattcactccttcaaaagcccccaaaccagtgaatgcatgggcatcttctctgcattcagtttcatccaagtcattccgggatttcttactagaagaaaaaaagtctgttactagccatagttcaggcgatcatgtcaaaaaagtttcttttaaaggaattgaaaattctcaggcaccaaaaattgtcaggtaa

SEQ ID NO: 4202 - DNA, 965 bp, Homo sapiens
  SIMILAR (2)..(388): 901254mologous to Homo sapiens dJ93K22.1 (novel protein (contains DKFZP564B116)),accession number AL050333,Smith-Waterman Score=619.
tctattgaagcatggtgttagtctgtatattcaagataaagaaggcttgtcagctttggatcttgtaatgaaggatagaccaactcatgtagtattcaagaatactgatcctacagatgtttatacttggggcgataatacaaattttaccctgggtcatggaagccagaatagcaaacatcatccagagttggtggatctgttctccaggagtgggatttatatcaagcaggtggtgctttgtaaatttcactccgtgtttctgtctcagaaagggcaggtttatacctgtggtcatggtcctgggagggcgattagggacatgggagatgaacagacatgcttgggtccctcggcttgtgggaagggactgaatggtcataattgtttccccaagttggccagctgctaaggatcatactgttgtattaactgaagatggatgtgtttatacatttggtctaaacatttttcatcaattaggaattattccaccgccttccagttgtaatgtacccagacagggccttcacaatcggcagaacaggcgataccctcccgtgcctggctcagctggtcccacatccatggagcccagcaagataagacccactggcttgaaattctcgctgacaacacagcagcagtctgagatagacctgggatgctccagcttgtgctgggattacagacgtgagccactgcgcctggcctactggtttattaaaaaggatattgcaaaggatacagatgaagagacgcgtaggcatggtgttagtctgtatattcaagataaagaaggcttgtcagctttggatcttgtaatgaaggatagaccaactcatgtagtattcaagaatactggttctcttcagttccaaagtattcccagctgccgagagtcacaaattctgtctgaaaagcagggtgaccttttcagagaggagccaatgtttggaagctga

SEQ ID NO: 4203 - DNA, 727 bp, Homo sapiens
  SIMILAR (674)..(715): 1001254mologous to Homo sapiens Protein of clone CT748_2,accession number W57901,Smith-Waterman Score=76.
ttccgggtcgacccacgcgtccgcaaacactttggtctcttctacgctatgggcattgtattgatgatggaaggggtgctcagtgcttgctagcatgtctgccctaattattccaacttccaattcgacacctccttcatgtacatgatcgctggcctgtgcatgctgaagctctatcagacccgccacccagacatcaatgccagcgcctactctgcctatgcctcctttgctgtggtcatcatggtcaccgtccttggagtggtgtttggaaaaaatgacgtatggttctgggtcatcttctctgcaatccacgttctggcctcgctagccctcagcacccagatatattatatgggtcgtttcaagatagatttgggaattttccggcgggctgccatggtgttctacacagactgtatccagcagtgtagccgacctctatatatggatagaatggtgttgctggttgtggggaatctggttaactggtccttcgccctctttggattgatataccgccccagggactttgcttcctacatgctgggcatcttcatctgtaaccttttgctgtacctggccttttacatcatcatgaagctccgcagctcttgaaaggtcctcccagtcccgctcttctgcatcgtggccaccgctgggatgtgggcttgccgccctatattttttcttccagaatctcagcagctgggagtgtctaaaatga

SEQ ID NO: 4204 - DNA, 870 bp, Homo sapiens
  SIMILAR (82)..(804): 481254mologous to Homo sapiens LPH prepro-polypeptide (AA -19 to 1908),accession number X07994,Smith-Waterman Score=607.
atgaagccagtgtgggtcgccacccttctgtggatgctactgctggtgcccaggctgggggccgcccggaaggggtccccagaagaggcctccttctactatggaaccttccctcttggcttctcctggggcgtgggcagttctgcctaccagacggagggcgcctgggaccaggacgggaaagggcctagcatctgggacgtcttcacacacagtgggaaggggaaagtgcttgggaatgagacggcagatgtagcctgtgacggctactacaaggtccaggaggacatcattctgctgagggaactgcacgtcaaccactaccgattctccctgtcttggccccggctcctgcccacaggcatccgagccgagcaggtgaacaagaagggaatcgaattctacagtgatcttatcgatgcccttctgagcagcaacatcactcccatcgtgaccttgcaccactgggatctgccacagctgctccaggtcaaatacggtgggtggcagaatgtgagcatggccaactacttcagagactacgccaacctgtgctttgaggcctttggggaccgtgtgaagcactggatcacgttcagtgatcctcgggcaatggcagaaaaaggctatgagacgggccaccatgcgccgggcctgaagctccgcggcaccggcctgtacaaggcagcacaccacatcattaagctcacactctatgagtctgttttcatgctgctgataaaggcatacccgagactgagaagaaaaggaggcttaattggacttacagttccacatggctggggaggtttcataatcatggcagagggtgaaacgcacttcttacatggcggcagcaagacagaatga

SEQ ID NO: 4205 - DNA, 672 bp, Homo sapiens
ggtactcagaatgcggttaatggggcattattttcctgagctggggggatgcggtgaagagcttttggatataccggggcggtcgtaaaagagaagggcctttattccatgcgtgacaagtttttaatctacaccataattatcagagctgtgggtagcattattaattatgttatagcaaactataaactcaaatttatcaccccaggcgttatcgattttatctgtacgtccctgattgcgggtattctgacgattaagctatttctgctgattaatcagtttgaaaaacagcagattaaaaaaggtcgcgatatcaccagtgcgcggattatgtcgcgtatcatcaaaatcaccattattgtggggcttgttctgctttatggcgaacatttcggcatgagcctttctggcttgctgacctttggtggtattggaggtctggctgtcgggatggccggtaaagatattctgagtaacttcttttccgggattatgctctatttcgaccgtcctttcagtattggcgactggatccgttcaccggacagaaatatcgaaggtacagtagcggaaattggctggcgaattaccaaaattacgacctttgataatcgtccattgtacgtaccgaactcgctgttttcgtcgatcagcgtagaaaacccaggc

SEQ ID NO: 4206 - DNA, 347 bp, Homo sapiens
  SIMILAR (2)..(214): 1001254mologous to Homo sapiens HSPC295,accession number AF161413,Smith-Waterman Score=383.
ccgctcaggccagcgacagcctggcccaggcggagcaggtactcagctctgcgggccccacctcttccttcgtcttctgaactgtgctatggcccaggacagcctggcaggtggcctcgctgcccccagttcccctctctgcccccacactcgtcttagttgcttcacactggtcactggccctgcacactgggctattgctttatccctatcctgagagcagcccctcccctgccttgcaaatgtgcctctccagtactgctcctgcacttaccccctccctgcagcaccttctctgcccgttcttgtccacacatctattaaatgcttctgttttcatttgcaaa

SEQ ID NO: 4207 - DNA, 446 bp, Homo sapiens
  SIMILAR (205)..(318): 761254mologous to Homo sapiens HSPC295,accession number AF161413,Smith-Waterman Score=144.
gaaagtcatcgacggtgagcgtgtgattgggcgtggtagtgagttctaccagctgtgccgagacctggacagctccttgcgtcccagctccagtccaggccccagagccaccgaggcccagccctgggtggagccaggctactgggagtcctggcccagccggagcagctccatcctggaggaggcctgccggcagttccaggacacactgcaggagtgctgggacctggaccgccaggccagcgacagcctggcccaggcggagcaggtactcagctctgcgggccccacctcttccttcgtcttctgaacgtggcctatggcccaggacagcctgccttgcaaatgtgcctctccagactgctcctgcacttaccccctccccgcagcaccttctctgcccgttcttgtccacacatctattaaatgcttctgttttcatttgc

SEQ ID NO: 4208 - DNA, 1521 bp, Homo sapiens
  SIMILAR (1126)..(1398): 341254mologous to Sus scrofa type X collagen,accession number AF222861,Smith-Waterman Score=77.
cgcatcccggaatccagattgcccactacggcctttgttcaggccccctgggcgcgttccgggagctcaggcctgcggcgctgggagaagcacgctggccaacaagttgggtggtgggcacgcggcccaggggtcaggggccgccaggcggcgggcggcggggctgcggctcttacctgccgaggaggcgccggctctgcggtgcggagttgcgccggacttcccagcttggccagtggctccgcaggctgccggctccacccctcatattcatttggattcaaggttggctctcaacagtgccagctgcactgtcatcctaaagtacttctgtggaagagaacatggtggtgtcactgttgtaccagtgatgacacaaaatcccagatctacctgacgggcctgcgagggttgaagattgtgaagcaatagcctaagggactggctggcttcgagcagggcatcggaaccaggcctcctggcactggcctgggtagagccagggcgagcaccagctgtcccccagtggaaccctgtgacagtcctgccagggcccaggccatcccaaccgacttccatctcatggaccctccagcggagaagccgggagaggctgggcggactgcagatcacaccccagctgctgaagtcacgcacaggcgagttctccctggagaccatcctgctactgaagctgcgtggctttgggactggctgacctgggctgcctgggagagtgcctgggcctggagtgggtgggacctatcaagcaaaggcgcttacccccctgggccccgtgggcctccttgcgccagctagctgtgctcaatgtctccaacaatcggctgacgggcctggagccactggccacctgtgagaacttgcagagtctcaatgccgcaggcaacctactggccaccccgggccagcttgcagtgtctggctgggctaccgtgcctggagtacctgcggctccgagaccctttggcccggctcagcaacccgctttgtgccaaccccttcctactgggctgcagtccgggagctgctgcctggcctgaaagtcatcgacggtgagcgtgtgattgggcgtggtagtgagttctaccagctgtgccgagacctggacagctccttgcgtcccagctccagtccaggccccagagccaccgaggcccagcccatgatggagccaggctatactgaggtctgcctcaggcggagcagctccatcctggaggaggcctgccggcagttccaggacacactgcaggagtgctgggacctggaccgccaggccaacgacagcctggcccaggcggagcaggtactcagctttgcgggccccacctcttcctttgttttttgaacgtggcctatggcccaggacagcctggcaggtggcctcgctgcccccagttcccctttttgccccctattttgtcctggaatatttttggggttggaactcaaaaaaaaaaaaaaaaaaatcaatcttttctcaaaaaaaaaaaaaaaaaa

SEQ ID NO: 4209 - DNA, 582 bp, Homo sapiens
  SIMILAR (194)..(334): 1001254mologous to Homo sapiens Human secreted protein, SEQ ID NO: 4410,accession number G00329,Smith-Waterman Score=246.
gcggccgcgcacgcgcggcggggggcgtggggctgggcccagccggacgcgacctcagcctgcggcggctaactgccggtaggcgtctgtgtgcgccgccaagtcggtggggcggggacgcgaggtgtggatggggggtcgccttgacctctgcctcagccagtagcgcagtctcggcctcgccgttacggagatggtgccctgggtgcggacgatggggcagaagctgaagcagcggctgcgactggacgtgggacgcgagatctgccgccagtacccgctgttctgcttcctgctgctctgtctcagcgccgcctccctgcttcttaacaggtaacgccgcagcgcggagcctgggcggcggcttttctccgaaggtgcagacgcccggcccgtgctgcttaaccgtgcggaggccgcgtagctgcgggactggggaccagtggggagagcgagctccgcagaggagcggcctcggggagcacggcggagcgtcgaggccggaagcacaggccggtggggtggggttgattgcctcctttcccgaggcttcgtctcctgagctacctttttctcatccat

SEQ ID NO: 4210 - DNA, 1465 bp, Homo sapiens
  SIMILAR (420)..(509): 901254mologous to Homo sapiens Human secreted protein, SEQ ID NO: 4410,accession number G00329,Smith-Waterman Score=152.
accggactggaattcccaacgtcgacgatttcgtggcccagccggacgcgacctcagcctgttgcgtttaactgccggtaggcgtctgtgtgcgccgccaagtcggtggggcggggacgcgaggtgtggatggggggtcgccttgacctctgcctcagccagtagcgcagtctcggcctcgccgttacggagatggtgccctgggtgcggacgatggggcagaagctgaagcagcggctgcgactggacgtgggacgcgagatctgccgccagtacccgctgttctgcttcctgctgctctgtctcagcgccgcctccctggcttcttaacaggtatattcatattttaatgatcttctggtcatttgttgctggagttgtcacattctactgctcactaggacctgattctctctcaccccacagcctggttcacaataaaatacaaacccaagcagttaggacttcaggaattatttcctcaaggtcatagctgtgctgtttgtggtaaagtgaaatgtaaacgacataggccttctttgctacttgaaaactaccagccatggctagacctgaaaatttcttccaaggttgaggcaatctctctcaaaggatcttgaattagtgttggaaaactttgtttatccgtggtacagggatgtgacagatgatgaatcctttgttgatgaactgagaataacattacgtttttttgcatctgtcttaataagaaggattcacaaggtggatattccatctatttataaccaagaaactattaaaagcagcaatgaaagcatatagaagtggatagttaaagccagacagaaagtaaaaaatacagagtttttacagcaagctgctttagaagaatatggtccagagcttcatgttgctttgagaagtcgaagagatgaattgcactatttaaggaaacttactgaactgctttttccttatattttgcctcctaaagcaacagactgcagatctctgaccttacttataagagagattctgtctggctctgtgttccttccttctttggatttcctagctgatccagatactgtgaatcatttgcttatcatcttcatagatgactcgccagctgaaaaagcaactgaaccggcttctactttggttccattcttgcagaaatttgcagaacctagaaataaaaagccatctgtgctgaagttagaattgaagcaaatcagagagcaacaagatcttttatttcgttttatgaactttctgaaacaagaaggcgcagtgcacgtgttgcacgttttgtttgactgtggaggaatttaatgatagaattttacgaccagaattatcaaatggatgaaatgctgtctcttcatgaagaattgcagaagatttataaaacatactgtttggatgaaagtattgaccaaattagatttgatcccttcattggtagaagagattccaagaa

SEQ ID NO: 4211 - DNA, 1234 bp, Homo sapiens
  SIMILAR (389)..(709): 791254mologous to Homo sapiens Human HCMV inducible gene protein, SEQ ID NO 20,accession number Y05376,Smith-Waterman Score= 434.
ttcccgggtcgacgatttcgtcttgtggtgaggctgcgcggggccgaggccgcctccgagcgccaggtttattcagtcaccatgaagctgctgctgctgcacccggccttccagagctgcctcctgctgaccctgcttggcttatggagaaccacccctgaggctcacgcttcatccccgggtgcaccagctatcagcgctgcctccttcctgtaggatctaatacatcggtatggcgagggtgacagcctcactctgcagcagctgaaggccctgctcaaccacctggatgtgggagtgggccggggtaatgtctcccagcacgtgcaaggtcacaggaaccccaccacgtgctttagttctggagacctcttcactgcccacaattttcagcgagcagttgcggattgggagcagcgagctccatgagttctgccccaccatcctccagcagctggattcccgggcctgcacctcggagaaccaggaaaacgaggagaatgagcagacggaggaggggcggccaagcgctgttgaagtgtggggctttggttttctcagtgtctcactgattaacctggcctctctcctgggagtcctcgtcctgccctgcacagagaaagcgtttttcagccgtgtgctcacttacttcatcgccctgtccattggaacgctgctgtctaacgcgctattccagctcatcccagagaggagctataaaaataaggcccaagttgacagtctgcccacttttttagctcaagcagggatgctgctgtggagggtgaggatacgcagacgtgtggttgaccccattagggagtcatggatgctgcccttcacaaagatcccattgtggggatacggtctcctctgtgtgaccgtcatctccctctgctccctcctgggggccagcgtggtgcccttcatgaagaagaccttttacaagaggctgctgctctacttcatagctctggcgattggaaccctctactccaacgccctcttccagctcatcccggagaacaggagaaaatggtggcaaccagtacataacacatttggtggttccacagcttggcacactgataaatccattgagcaatcaatagatactctttttgatgaagttaaaaaagaaagtgagaaagaaacaccttcattacaaataggagatctagggccacaagagtccttgaagacgtttaacaacacaaacagtccacaccattga

SEQ ID NO: 4212 - DNA, 924 bp, Homo sapiens
  SIMILAR (138)..(908): 261254mologous to Mus musculus splicing factor 3a, subunit 2,accession number X83733,Smith-Waterman Score=124.
atgtgggagcctgcactgccgccgcgcggccacttccgattccacaactacaaccgattctgcaccatcggggcgagaaaagccagctctgggcccattcaggatcgtcctggggtttcctggctgtggcagctgtacctccctctcacctgtgcccaccactccagagccgtgggtggaagcggccaccacattggcatctgctggggtgctgcctgggtgctgctgctgcgcatgcctggtgtcaccgtccctggctcagcctgctggccctgggccctaagcctgcagctcctctgggtcctgggccatgggtgtctgtggccccctgcagcagacctgggccctgtcccggaactcggagcccagcacataggggcacccagcgatgggccgagagcgttcatgagccccgagtggggccagccccgcctgaaaaggccatcatcacggagacaggagcagggctggcagagagacgaggacaagggcttggaggtgggagcagcttcaggagtgccgagccacaaggctgcaggagcctgggtccccagtcgcctggaggagaccctgcccacaccatactcagaccaccctcccagaatggtgactgtgcagagatgcacgcatgtcggctgcaccccgccatcttggggacccatgggacaggtggcctggctgcccagagccacgctccccgggcccttctcccctcctgcccttcttcccagcaacctgcagatggttggtgttcccttcacctgtgcctgcctggccttctcctggccccacgcattcatggccctagtaccagggaaggaggcccaggccatgggacccctggaccaaccaacccagccagttctggagctacccggggcacccgaagagtacgtccctctgttcccaggagccccactttag

SEQ ID NO: 4213 - DNA, 328 bp, Homo sapiens
  SIMILAR (41)..(175): 971254mologous to Homo sapiens Human secreted protein clone yl4_1 protein sequence SEQ ID NO:150,accession number Y73464,Smith- Waterman Score=242.
gtcgcagaccctgttggggccgctcgagctggtgggcagcctcttgctggacgagtgtggcctagagctgggggaggacactccccacgtgtgctgggagccgcaggcccagggccgcatgtgtgcactctacgcctccctggcactgctatcaggactgagccaggagccccactagcctgtgcccgggcatggcctggcagctctccagcagggcagagtgtttgcccaccagctgctagccctaggaaggccaggagcccagtagccatgtggccagtctaccatggggcccaggagttggggaaacacaataaaggtggcatac

SEQ ID NO: 4214 - DNA, 735 bp, Homo sapiens
  SIMILAR (733)..(185): 441254mologous to Homo sapiens Human secreted protein clone yl4_1 protein sequence SEQ ID NO:150,accession number Y73464,Smith- Waterman Score=292.
tttttttttttttttttttccttcttatgccacctttattgggtttccccaactcctgggccccatggtaaactggccaacatggctaactgggctccctggccttcctaagggctaagcaagctggtgggcaaacactcttgccctgctggatagctgccaggccatgcccgggcacaggctagtggggctcctggctcagtcctgatagcagtgccagggaggcgtaagagtgcacacatgcggccctgggcctgcggctcccagcacacgtggggagtgtcctcccccaagctctaggccacactcgtccagcaagacccaggccggtgctccttcgccccagctgttccccaggacgccggggggcagggacattggtgctgcgctcctgccacggggcactctgctccaagaggctgcccaccagctcgagcggccccaacagggtctgcgactccagcgcctccgccagcagcttgtgctgcgtcatcactcagcatggtcagtgcccccagcaggtagacaacagggatagcgagttccggcaccagcattccggagaccaaacaccagggcactccagggacagcacctgctgggaccgtccagggggttccaccgggcccaaggctctggccctgctccagcacatcccacaaggctggcaggaacatctggtcacacagccccaccaacatgtcctccagcagtatgaggcagacctctggctct

SEQ ID NO: 4215 - DNA, 1137 bp, Homo sapiens
  SIMILAR (477)..(4): 971254mologous to Cloning vector pBACe3.6 levansucrase,accession number U80929,Smith-Waterman Score=801.
  misc_feature (1)...(1137): n = a,t,c or g
ttagttgactgtcagctgtccttgctccaggatgctgttttngacaacggatgttttattgcctttgatgttcattaagaagcttggcgcaaatgttgcctttgtatcctcgaagaagcctctgtttgtcatgtagcttgtgataaccacattgttgcctttggcttgcggcactgcgaagtgagagtaagtgaatgtcacatcgtttggatcaagacccatttgcagcacaagccctgttttgttcagcggcttgtaagggccggttaaagagtttgatacataaccaagcatgtaaatatcgtttgagttaataccatcgatcgtcatttttgaaccgcgtgaatcagtgaacaagtaccatttgccgttcattttgaaaacattcgcgcgctcgatttcatcagttaccgtgtttgaagtgatcagcggcttcattacttttttcaatgtgtaatcattatttaactcaagcatgtaaatttcgtttgagttaaaaccatcgatggtcatttctgaaccgcgtgaatcagtgaacaagtaccatttgccgttcattttgaaaacattcgcgcgctcgatttcatcagtaaccgtgtttgaagtgatcagcggcttcattacgtttttcaatgtgtaatcattatttaactctatgataccgagggcgccgttcgctaactcagcatcgcgttttttagcgctctggtcgaactcagcgagcagctggagtctcgggttcagctctgcaccaagtccagtcgtggccacgacctcaagatctctgctgaccagcgtgcagggctgttgttctgagaacatcctttccccccgtctgctagctcgggctgccttgacgtcagtatatccagttaccctgttgggagtgactagtttataaatggcatggccagagccaacgggagatggaagacattcactggacttcattcgggcaaacctttgggcttcagcgacgcgttctgtcagcatcataacctcatcatcctgtgttggaaaacctggtagtttcttcccaattaagtgttctatgcgctggaagagttccacatcatacaacgggttatttgtgatattagagatatagggcgtctcgtacggcgcgtatttacccat

SEQ ID NO: 4216 - DNA, 1310 bp, Homo sapiens
  SIMILAR (221)..(637): 391254mologous to Pseudorabies virus immediate-early protein,accession number M34651,Smith-Waterman Score=160.
gatgaagcccatcgttaacgtcccctgggagagaagcagaagatagcattattcctatttccatatgcagagataaggtcctgagaacttgtgtggctccccccggattccagaacaggtctttgagaactcgtctcatgatccactggaaacagacccgttcccctagcgtggcagtggctgctccgctgaactcgtgccaagttcccgctggcgtccgggcagcagggcgggagcggcggctggcacggagactccaggctgaccgcgtgtctatgtccccgcagggaatggagaggccggcggcccgggagccgcatgggcccgacgcgctgcggcgcttccagggactgctgctggaccgccgaggccggctgcacggccaggtgctgcgcctgcgcgaggtggcccggcgcctggagcgcctgcgcaggcgctccctcgtagccaacgtggccggcagctcgctgagcgcaacgggcgccctcgccgccatcgtggggctctcgctcagcccggtcaccctggggacctcgctgctggtgtcggccgtggggctgggggtggccacagccggaggggccgtcaccatcacgtccgatctctcgctgatcttctgcaactcccgggagctgcggagggtgcaggagatcgcggccacctgccaggaccagatgcgagagatcctgagctgcctcgagtttttctgccgctggcagggctgcggggaccgccagctgctgcagtgcgggaggaacgcctccatcgccctgtacaattctgtctacttcatcgtcttctttggctcacgtggcttcctcatccccaggcgggcggagggggacaccaaggttagccaggccgtgctgaaggccaagattcagaaactggccgagagcctggagtcctgcaccggggctctggacgaactcagcgagcagctggagtctcgggttcagctctgcaccaagtccagtcgtggccacgacctcaagatctctgctgaccagcgtgcagggctgtttttctgagaacatcctttccccctaatgaccgaggccagcaaatcatcctcatgggatgctccagaatttgtagctcccttaggaaaacaccaagctgggttaggagccgaaggcaaaggatgagaaaaactgtttttgaagtgggcaggtccccaaagcccttcttttcccatcactgtgacatctgcctgggcttgagtgctacggacttttcagtcttcctagtggaaaaatgtgacccaaaaactctttttcctttatcaaaaactttctgtctaaacacag

SEQ ID NO: 4217 - DNA, 556 bp, Homo sapiens
  SIMILAR (20)..(460): 431254mologous to Homo sapiens dJ616B8.3 (novel gene),accession number AL023803,Smith-Waterman Score=311.
ctgcatcacccggactagccaggtcctggtcatcctgatggatgtgttcacggatgtggagatcttctgtgacattctagaggcagccaacaagcgtggggtgttcgtttgtgtgctcctggaccagggaggtgtgaagctcttccaggagatgtgtgacaaagtccagatctctgacagtcacctcaagaacatttccatccggagtgtggaaggagagatatactgtgccaagtcaggcaggaaattcgctggccaaatccgggagaagttcatcatctcggactggagatttgtcctgtctggatcttacagcttcacctggctctgcggacacgtgcaccggaacatcctctccaagttcacaggccaggcggtggagctgtttgacgaggagttccgccacctctacgcctcctccaagcctgtgatgggcctgaagtccccgcggctggtcgcccccgtcccgcccggagcagccccggccaatggccgccttagcagcagcagtggctccgccagtgaccgaacgtcctccaaccccttcagcggccgc

SEQ ID NO: 4218 - DNA, 1044 bp, Homo sapiens
  SIMILAR (195)..(1043): 301254mologous to Zea mays extensin-like protein,accession number Z34465,Smith-Waterman Score=231.
ctaaactgggagaattctggatggctggcattgggcaaaagaactcagacttgactgcccactgggcgactctagacgaccccccttctctcgggtcagcacagaaggcagccccgccttccttgcgctccgccttcctaatgtcactgctggatcgtgagaggtaagcatgctggcttctactgaaacgccccttgtcatcacacgcccatcccctggggcgacacgacccaggccccgcccctcggggggctgctgcgagtccggccgggagcccagcgccctgacagaagtcgccgcgccccttgtcagcggcagctccacctctcctcgcttcggaccccgctcctccgcgggccgcagctccacccgctgacaccgaaagttcagttcagcctccagctgctccacacgccgggccttggacgctcgagcgctcctgggccccttgacgttcactccccacccccatcccagtcgcggaccctttgtgcagagctccgctgagccacataatcgcccatcccctggggcgacacgacccaggccccgcccctcggggggctgctgcgagtccggccgggagcccagcgccctgacagaagtcgccgcgccccttgtcagcggcagctccacctctcctcgcttcggaccccgctcctccgcgggccgcagctccacccgctgacaccgaaagttcagttcagcctccagctgctccacacgccgggccttggacgctcgagcgctcctgggccccttgacgttcactccccacccccatcccagtcgcggaccctttgtgcagagctccgctgagccacaggtatccttgaggtgactgtcagagatctggactttgtcacacatctcctggaagagcttcacacctccctggtccaggagcacacaaacgaacaccccacgcttgttggctgcctctagaatgtcacagaagatctccacatccgtgaacacatccatcaggatgaccaggaccttctcctcagtctttctttcctgaatttcttgggagtggaccat

SEQ ID NO: 4219 - DNA, 579 bp, Homo sapiens
  SIMILAR (163)..(528): 631254mologous to Homo sapiens dJ947L8.1.6 (novel CUB and Sushi (SCR repeat) domain protein),accession number AL355178,Smith- Waterman Score=475.
atgcctggtaaacagtacaaccagaaggtcattccagctgcgtctggttccagtacccaagtttcagccaccacacatgactgtcagatagcttttcaatttcggaaggcagctaactgcaaccactttctccccaggaaatcttatgctgtgagagaggcctatgaattacagaactgtccagatccacccccatttcagaatgggtacatgatcaactcggattacagcgtggggcaatcagtatctttcgagtgttatcctgggtacattctaataggccatcctgtcctcacttgtcagcatgggatcaacagaaactggaactacccttttccaagatgtgatgccccttgtgggtacaacgtaacttctcagaacggcaccatctactcccctggctttcctgatgagtatccgatcctgaaggactgcatttggctcatcacggtgcctccagggcacggagtttacatcaacttcaccctgttacacacggaagctgtcaacgatcacattgctgtttggtatgagaacctctcaagtcaaaatatctgtgattgtgatcaacaattctga

SEQ ID NO: 4220 - DNA, 837 bp, Homo sapiens
  SIMILAR (771)..(836): 901254mologous to Homo sapiens dJ466N1.2 (glycine C- acetyltransferase (2-amino-3-ketobutyrate coenzyme A ligase)),accession number Z97630,Smith-Waterman Score=105.
atgtgggctggaaacgcctggcgcgccgcgctttccggggtgccgtgcggccgcagcgcgcagtcagtactggcccagctgcgcggcattctggagggggagctggaagggatccgcggagctggcacctggaagagtgagcgggtcatcacgtcccgtcaggggccgcacatccacgtggacggcgtctccggaggaatcctcaacttaacctcggtccgcttcatccgtggaacccaaagcatccacaagaatctagaagcaaaaatagcccgcttccaccagcgggaggatgccatcctctatcccagctgttgtgacgccaacgccggcctctttgaggtcctgctgagacccgaggacgcagtcctgtcggacgagctgaactgtgcctccatcatccacggcatctgcctgtgcaaggcccacaagtaccactattgccacctggacgtggcctacctagaaaccaagcttcaggaggcccagaagcatcggctgttcctggtggccaccgatggggccttttccatggatggcgacatcgtgcccctgcagaagatctgccgcctcgcctctagatatggcgccctggtctttgtggatgaatgccatgccactggtttcctgggactcacaggacagggcacagatgagctgctgggtgtgatgggccaggtcaccatcatcaactccaccctggggaaggccctgggtggtgcatcagggggctacacgacagggcctgggcccctggtgtcactgctgctgcccagccctatctcttctccaacagtctgccacctgctgttgttggctgcacctctaaggccctag

SEQ ID NO: 4221 - DNA, 2142 bp, Homo sapiens
  SIMILAR (799)..(1992): 901254mologous to Homo sapiens putative p150,accession number U93563,Smith-Waterman Score=1908.
atgattatcttaatagatgcagaaaaggcctttgacaaaattcaacagcccttcatgctaaaaactctcaacaaattaggtattgatggaacatatctcaaaataacaagagctatttatgacaaacccacagccaatatcatactgaatgggcaaaaactggaagcattccctttgaaaactggcacaagacagggatgccctctctcaccactcctattcaacatagtgttggaagttctggcccaggcaatcaggcaggagaaagaaataaagggtattcaattaggaaaagaggaagtcaaattgtccctgtttgcagatgacatgattttgtatctagaaaaccccatcgtctcagcccaaaaactccttaagctgataagcaacgtcagcaaagtctcagggtacaaaatcaatgtacaaaaatcacaagcattcctatacaccaataacagacaaacagagagccaaatcatgagtgaattcccattcacaattgctacaaagagaataaaatacctaggaatccaacttacaagggacgtgaaggacctcttcaagaagtacaaaccactgctcaacaaaataaaagaggatacaaacaaatggaagaacattgcatgctcatggataggaagaatcaatatcatgaaaatggccttcccaaggtgggaactgaacaatgagaacacttggacacaggaaggggaacatcacacactggggcctgttgtggggtgggggaagcggggagggatagcattagtagatatacctaatgtaaatgacaagttaatggtgttggaagttctggccagagcaatcaggcaaaagaaagaaataaagggcattcaattaggaaaagaggaagtcaaattgtccctgtttgcagatgacatgattgtgtatctagaaaactccatcgtctcagcccaaaatcttaagctgataagcaacttcagcaaagtctcaggatacaaaatcaatgtgcaaaaatcacaagcattcctatacaccaataacagacaaacagagagccaaatcatgagtgaattcccattcacaattgctacaaagagaataaaatacctaggaatccaacttacaagggatgtgaaggacctcttcaaggagaactacaaaccactgctcaaggaaataagagaggacacaaacaaatggaagaacattccatgctcaaggataggaagaatcaatatcatgaaaatggccatactgcccaaggtaatttatagattcaatgacatccccatcaagctaccaatgactttcttcacagaattggaaaaaactactttaaagttcatatggaaccaaaaaagagcctgcattgccaaaacaatcttaagcaaaaagaacatagctggaggcatcacgctacctgacttcaaactatactacaaggctacagtaaccaaaacagcatggtactggtaccaaaacagagatatagaccaatggaacagaacagaggcctcagaagtaacatcacacatctacaaccatctgatcttttacaaacctgacaaaaacaagaaatggggaaacgattccctatttaataaatggtgctgggaaaactggctagccatatgtagaaagctgaaactggatcccttccttacaccttatacaaaaattcattcaagatggattaaagacttaaatgttagacctaaaaccataaaaaccctagaagaaaacctaggcaataccattcaggacataggcatgggcaaggacttcatgactaaaacaccaaaagcaatggcaacaaaagccaaagttgacaaatgggatgtaattaaattaaagagcttctgcacagcaaaagaaactaccatcagagtgagcaggcaacctacagaatgggagaaaatttttgcaatctacccatctgacaaagggctaatatccagaatctacaaagaacttaaacaaatttacaggaaaaaaatcaaacaaccccatcaaaaagtgggcaaaaaatatgaacagacacttttcaaaagaagacatttatgcagccaacagacaaatgaaaaaatgctcatcatcactggtcatcagagaaatgcaaatcaaaaccacaatgagataccatctcacaccagttag

SEQ ID NO: 4222 - DNA, 1992 bp, Homo sapiens
  SIMILAR (1)..(1272): 821254mologous to Homo sapiens putative p150,accession number U93570,Smith-Waterman Score=1773.
atgggagactttaacaccccactgtcaacattagacagatcaatgagacagaaagttaacaaggatatccaggaattgaactcagctgtgcaccaagtggacctaatagacatctacagaactctccaccccaaatcaacagaatatacattcttcttagcaccacatcgtacttattccaaaattgaccacatagttggaagtaaagcactcctcagcaaatgtaaaagaacagaaattataagaaattgtctctcagaccacagtgcaatcaaactagaactcaggattaacaaactcactcaaaactgctcaactacatggaaactgaacaacatgctcctgaatgactactgggtacataatgagatgaaggcagaaataaagatgttctttgaaaccaatgagaacaaagacacaacatacaagaatctctgggacacatttaaagcagtgtgtagagggaaatttatagcactaaatgcccacaagagaaagcaggaaagatctaaaattgacaccctaacatcacaattcaaagaactagagaagcaagagcaaacacattcaaaagctagcagaaggcaagaaataactaagatcagagcagaactgaaggagatagagacacaaaaaacccttcaaaaaatcaatgaatccaggagctggttttttgaaatgatcagcaaaattgatagaccgctagcaagactaataaagaagaaaagagagaagaatcaaatagacacaataaaaaatgataaaggggatatcatcaccgatcccacagaaatacaaactaccatcagagaatactataaacacctctatgcaattaaactagaaaatctagaagaaatggataaattcccatacacaaacaccctcccaagattaaatgaggaagaaattgaatccctgaatagaacaataacaggatctgaaattgaggcaataattaagagcctaccaaccaaaaaaagtccaggaccagatggattcacagccaaattctaccagaggtacaaagaggagctggtaccattccttctgaaactattccaatcaatagaaaaagagggaatcctccctaattcattttatgaggccagcatcatcctaataccaaagcctgtgttggaagttctagccagggcaatcaggcaggagaaagaaataaagggtattcatttaggaaaagaggaagtcaaattgtccctgtttgcagatgatatgattgtacatttagaaaatcccattttctcagcccaaaatctccttaagctgataagcaacttcagcaaagtctcaggatacaaaatcaatgtgcaaaaatcacaagcattcctatacaccaccaacaaacaaacagagagccaaatcatgagtgaactcccattcacaattgcttcaaagagaataaaatacctaggaatccaacttacaagggatgtgaaggacctcttcaaggagaactacaaaccactgctcaatgaaataaaaaaggacacaaacaaatggaagaacattccatgctcatggataggaagaatcaatatcgtgaaaatggccatactgcccaaggtaatttacagattcaatgccatccccatcaagctaccaatgactttcttcacagaattggaaaaaactactttaaagttcatatggaaccaaaaaagagcccacattgccaagacactcctaagcaaaaagaataaagctggaggcatcatgctacctgacttcaaactatactacaaggctacagtaaccaaaacagcatggtgttggtaccaaaacagagatatagaccaatggaacagaacagagccctcagaaataataccacacatctacaacaatctgatctttgacaaacctgacaaaaagaagaaatggggaaaggattcccaatttaataaatggtgctgggaaaactggctagccatatgtagaaagctgaaacgggatcccttctttacatcttaa

SEQ ID NO: 4223 - DNA, 1107 bp, Homo sapiens
  SIMILAR (295)..(1104): 771254mologous to Homo sapiens putative p150,accession number U93563,Smith-Waterman Score=1119.
atggacaaattcctggacacctacactctcccaagactaaaccaggaagaagttgaatccctgaatagaccaataacaggctctgaaattgaggcattaattaatagcctaccaaccaaaacaagtccagaactagatggattcacagctgaattctaccagtggtacaaagaggagctgataccattacttctgaaactattccaatcagcagaaaaagagggaatcctccctaattcattttacaaggccagcatcatcctgataccaaagcctggcagagtcacaataaaaaaagagaattttagaccaatatccctggtgaacattgatgcaggaatcctcaagaaaatactggcaaaccaaatccagcagcacatccaaaagcttatccatcatgatcaggtaatttatagattcaatgccatccccatgaagctaccaatggctttcttcacagaattggaaaaaactactttaaactccacatggaaccaaaaaagagcctgcattgccaagacaatcctaagcaagaagaacaaagctggaggcatcatgctgcctgacttcaaactatactacaaggctacaataaccaaaacagcatggtactggtaccaaaacagagagatagaccaatggaacagaacagaggcctcagaaataataccacacatctacaaccatctgatctttgagaaacctgagaaaaacaagaaatggggaaaggattccctatttaataaatggtgctgggaaacctggctagccatatgtagaaagctgaaactgcctcccttccttacaccttatacaaaaattaattcaagatggattaaagacttaaatgttagacctaaaaccataaaaactgtagaagaaaacaaaggcaataccactcaagacataggcatgggcaaagacttcatgagtaaaacacgaaaagcaatggcaacaaaagccaaaatagacaaatgggatctaattaaactaaagagcttctgcacagcaaaagaaactaccatcggagtgaacaagctagctacagaatgggagaaaatttttggaatctacccatctgacaaagggctaatatccagaatctga

SEQ ID NO: 4224 - DNA, 882 bp, Homo sapiens
  SIMILAR (265)..(879): 901254mologous to Homo sapiens putative p150,accession number U93563,Smith-Waterman Score=984.
atgactgtcttttcaacaaatggtgctcagaaattggatatccacaaacacctctacgcaaataaactagaaaatctagaagaaatggatacattcctcgacacatacactctcccaagactaaaccaggaagaagttgaatctctgaatagaccaataacaggagctgaaattgtggcaacaatcaatagtttaccaaccaaaaagagtccaggaccagatggattcacagccgaattctaccagaggtacaaggaggaactgctgataagcaacttcagcaaagtctcaggatacaaaatcaatgtacaaaaatcacaagcattcctatacaccaacaacagacaaacagagagccaaatcatgagtgaactcccattcacaattgcttcaaagagaataaaatacctaggaatccaacttacaagggatgtgaaggacctcttcaaggagaactacaaaccaccactcaacaaaataaaagaggacacaaacaaatggaagaacgttccatgctcatgggtaggaataatcaatattgtgaaaatggccatactgcccaaggtaatttatagattcaatgccttccccatcaagctaccaatgattttcttcacagaattggaaaaaactactttaaagttcatatggaaccaaagaagagactgcattgccaagacaatcctaagccaaaagaacaaagctggaggcatcatgctacctgacttcaaactacactacaaggctacagtaaccaaaacagcatgctactggtatcaaaacagacatatagaccaatggaacagtacagagccctcagaaataataccacacatctacaaccatctgatctttgacaaacctgacaaaaacaagaaatga

SEQ ID NO: 4225 - DNA, 1662 bp, Homo sapiens
  SIMILAR (1)..(687): 861254mologous to Homo sapiens putative p150,accession number U93564,Smith-Waterman Score=1036.
atgattgtatatttggaaaaccccatcgtctcagccccaaatctccttaagctgataagcaacttcagcaaagtctcaggatacaaaatcaacgtgcaaaaatcacaagcattcctatacaccaataatagacaaacagagagccaaatcatgagtgggtgcccattcacaattactgcaaagagaataaaatacctaggaatacaacttacaagggatgtgaaggacctcttcaaggagaactacaaaccagtgctcaacaaaataaaagaggacacaaacaaatggaagagcatttcatgctcatggataggaagaatcaatatcatgaaaagggccatactgcccaaggtaacttatacattcaatgctatccccatcaagctaccactgacttccttcacagaattggaaaaaactactttaaagttcatatggaaccaaaaaagagcacgcatagccaagacaattctaagcaaaaagaacaaagctggaggcatcacactacctgacttcaaactatactacaagtgtacagtaaccaaaacagcatggtgccagtaccaaaacagatatatagaccaatggaacagaacagaggcctcagaaataacaccacacatctacaaccatctgatctttgacaaacctgacaaaaacaaacaatggcatttatcactatttaatacagaagttcccatagtgtggtccccagaactttctagcaagttcgcaggtgatgctgatgccggtcgtccagagacacctttgagaaccggtttgaggagaatctcttttctcagacttgcaatatttctgatttgggtagagctaaaccactcgaactttagggaccaccttaagtgtctcttaaaactcagaaggctgggacccatccctagagtttctgattgggtaggacaggttggagatctagaaggaaaaaatggttccatgagccagatacagggccagctgctctgtgtagccttgggacatggcaccccagctgctccagctccagccatagctaaaagggaccaaggtgtggcttgggccatggccacaccaaggtgtggtgttgggcctatgggtgcgcagaaggcaagaggtgaggtttgggaatctctgcctagatttcaaagaatgtatggaaatgcccagatgtctaggcagaagtgtgctgcactggtggagccctcatggaacacctctacaagagcagtgcagagaagatatggggggttggagcccccatgcagcatgcccactggggcactgcctagtggagctgtgagaagagggccaccatcctctagacctcagaatggtagacctactgacagcttacatcatgcacctggaaaagtcacaggcactcaacatcagcctgtgaaagcagccaagggggctgtaccctgcagagccacaggggtggagctgcccaaggccttgggagcccaccccttgcattggcatgacctggaagtgagacatggagtcaaaggagattattttggagctttacaattgaatgactttcctggtgggcttcagacttgcatggggcctgtagcccctttgttttggccaatttctcccattaagaatgggagcatttatccagtgcctgcaccctcactgtatctcagaagtaactaa

SEQ ID NO: 4226 - DNA, 1500 bp, Homo sapiens
  SIMILAR (1385)..(1498): 811254mologous to Homo sapiens putative p150,accession number U93563,Smith-Waterman Score=180.
atggggaaaaaacagagcagaaaaactgaaaattctaaaaatcagagtgcctctccccctccagaggaatgcagctcctctccagcaatggaacaaagctggatggagaatgactttcacgaattgagagaagaaggcttcagatcaaacttctccgagctaaaggaggatgttcgaacccatagcaaagaagctaaaaatcttgaaaaaagattagatgaatggctaactggaataaccagtgtagagaagtccttaaatgacctgatggagctgaaaaccatggcacgagaactatgtgacaaatgcacaagcttcagtagcaaattccatcaactggaagaaagggtatcagtgactgaagatcaaatgaatgaaatgaagagctggttttttgaaaagatcaacaaaattgatagactgctagcaagactaataaagaagaaaagagagaagaatcaaatagaggcaataaaaaatgataaaggggatatcaccaccgatcccacagaaatacaaactaccatcagagaatactataaacacctctacacaaataaactagaaaatctagaagaaatggatacattcacgggcacatacaccctcccaagactaaaccaggaagaaattgaatcactcaataaaccaataacaggctctgaaattgaggcaataattaatagcttaccaaccaaaaaaagtccaggaccagacggattcacagctgaattctaccagaggtacaaggaggagctgcttgttcaacatacgaaaattgataaaccttattcagcttataaaccgaacccaagacccgtgaccgccactagactaagtcgaattggacgcagagttcatcaatatctagaaaaccccattgtctcagcccaaaatctccttaagctgaaaagcaacttcagcaaagtctcagggtacaaaatcaatgtgcaaaaatcacaagcattcttatacatcaagaagagacaaacagagagccaaatcatgagtgaactcccattcacaattgcttcaaagagaataaaatacctaggaatccaacttataagggatgtgaaggacctcttcaaggagaactacaaaccactgctcaatgaaataaaagagggcacaaacaaatggaagaatattccatgctcatggataggaagaatcaatatcgtgaaaatggccatactgcccaaggtaatttatagattcaatgccatccccatcaagctaccaatgactttcttcacagaattggaaaaaattactttaaagttcatatggaaccaagaaagagcctgcattgccaagacaatcctaagcaaaaagaacaaagctggaggcatcatgctacctgacttcaaactatactacaaggcttacagtaatcaaaacagcatgggactggtaccaaaacagatatctagaccaatggaacagaacagagccctcagaaataaccccacacatctacaaccatctgatctttga

SEQ ID NO: 4227 - DNA, 1962 bp, Homo sapiens
  SIMILAR (889)..(1956): 891254mologous to Homo sapiens putative p150,accession number U93563,Smith-Waterman Score=1679.
atggggagaaaccagagcagaaaagctgaaaattctaaacatcagagcgcctcttctcctccaaaggaatgcagctcctcgccagcgatggaacaaagctggatggagaatgactctgaggagttgagagaagaaggcttcaaacgaataaacagcttagagaagaccttaaatgacctgatggagctgaaaaccttggcaagagaaccacgtgatgcatgcacaagcttcagtagccaattcgatcacgtggaagaaagggtatcagtgattgaagatcaaatgaatgaaatgaagagagaagagaagtttagagaaaaaatagtaaaaagaaatgaacaaagcctccaagaaatatgggactatgtgaaaagaccaaatctacttctgattggtgtacctgaaagtgatggggagaatggaaccaagttggaaaacactctgcaggatgttatccaggagaacgtccccaacctagcaaggcaggccaacattcaaattcaggaaatacagagaatgccacaaaaatactcctcgagaagagcaactccaagacacataattgtcagattcaccaaagttgaaatgagggaaaaaatgttaagggcagagagacagaaaggtcgggttacccacaaagggaagcccatcagactaacagctgatctctctgcagaaactctacaagccagaagagagtgggggccaatattcaacattcttaaagtaaagaatttgcaacccagaatttcatatccagccaaactaagcttcataagtgaaggagaaataaagtcctttacagacaatcaaatgctgagagattctgccaccaccaggcctgccttacaagagctcctgaaggaagcactaaacatggaaaggaataacagctcaaatctccttaagctgataagcaacttcagcaaagtctcaggatacaaaatcaatgtgcaaaaatcacaagcattcttatacaccaacaacagacaaacagagagccaaatcatgagtgaactcccattcacaattgcttcaaagagtataaaatacctaggaatccaacttacaagggatgtgaaggacctcttcaaggagaactacaaaccactgctcaacgaaacaaaaggacacaaaaaaaggaagaaccttccatgctcatgggtaggaagaatcaatattgtgaaaacggccatactgcccaaggtaatttatagattcaatgccatccccatcaagctaccaatgattttcttcacagaattggaaaaaactactttaaagttcatgtggaaccaaaaaagagcctgcattgccaagacaatcctaagccaaaagaacaaagctggagggatcacgctacctgacttcaaactatactacaagtctacagtaaccaaaacagcatggtactggtaccaaaacagagatatagacccatggaacagaacagagccctcagaaataataccacacatctacaaccatctgatctttgacaaacctgagaaaaacaagcaatggggaaaggattccctatttaataaatggtgctgggaaaactggctaggcatatatagaaagctgaaactggatctcttccttatgccttatacaaaaattaattcaagatggattaaagacttaaatgttagacctaaaaccataaaaaccctagaagaaaacctaggcaataccattcaggacataggcattggcaaggacttcatgactaaaacaccaaaagcaatggcaacaaaagccaaaattgacaaatgggatctaattaaactgaagagcttctgcacagcaaaagaaactaccatcagagtgaacagacaacctacagaatggcagaaaatttttacaatctacctatctgacaaagggctaatatccagaatctacaaagaacttaaacaaatttacaagaaaaaatcaaccccatcaaaaagtgggtga

SEQ ID NO: 4228 - DNA, 1716 bp, Homo sapiens
  SIMILAR (499)..(1701): 861254mologous to Homo sapiens putative p150,accession number U93563,Smith-Waterman Score=1834.
atgcgaccccagggccccgccgcctccccgcagcggctccgcggcctcctgctgctcctgctgctgcagctgcccgcgccgtcgagcgcctctgagatccccaaggggaagcaaaaggcgcagctccggcagagggaggtggtggacctggtgagtccgagggagccgagccgggaccgccgcgctggtggaggggacctggccgcgcgccccacgggcagggcgtcagtctggctgttgggggtgtctgtctgtacagctgtgtgtcgtgtgtcttgctgcgccggggtgtcatgctttttatttacaggtgaagaaggacctggttatgcgtgcagtgagtcttggaactcagaggggagaccaaaatgggaggccatcgtggagcggacatgcgatatgggcccggagcatcacagtcaagctacgggagaaaacagtttccaggaaactggaaatgaacggcccgagtgctttccaggggctcatctgtgggaagtattggaagttctggccagggcaatcaggcaagagaaggaaataaagggtattcaaataggaagagaggaagtcaacaaattgtctctatttgcagatgacatgattgtatatttagaaaaccccatcgtctcagccaaaaatttccttaagctaataagcaacttcaacaaagtctcaggatacaaaatcaatgtgccaaactcacaagcatttctatacaccagtaacagacaaacagagagccaagtcatgagtgaactcccattcacaactgctactaagagaataaaatacctaggaatccaacttagaagggacgtgaaggacctcttcaaggagaactataaatcactgctcaaggaaataagagaggacacaaacaaatggaaaaacattccatgctcatggataggaagaatcaacatcatgaaaatggccatattgcccaaagtaatttatagattcaatgatatccccatcaagttaccactgactttcttcacagaattggaaaaaactactttaaacttcatatggaaccaaaaaagaacccacatagccaagacaatcctgggcaagaagaacaaagctggaggcatcacgctacctgacttcaaactatactacaaggctacagtaaccaaaacagcatggtactggtaccaaaacagatatacagaccaatggaacagaacagaggcctcagaaataacaccacacatctataaccatctcatctttgacaaacctgacactaacaagcaatgggaaaaggattacctatttaataaatggtgttgggaaaactggctagccatatgcagaaaactgaaactggaccccttccttacaccttatacaaaactcaactcaagatggatcaaagacttaaacgtaagacttaggaccataaaaatcctagaagaaaacctgggaaataccattcaggacgtaggcatgggcaaagacttcatgtctaaaacaccaaaagcaatggcaacaaaaaccaaaattggcaaatgggatctaattaaactaaacagcttctgcacagcaaaggaaactatcatcagagtgaacaggcaacctacagaatgggagaaaatttttgcaatctatccatctgacaaagggctaatatccagaatctacaaagaacttaaacaaatttacaagaaaacaacaaccccatcaaaaagtgggcaaaggatatga

SEQ ID NO: 4229 - DNA, 1155 bp, Homo sapiens
  SIMILAR (367)..(1152): 901254mologous to Homo sapiens putative p150,accession number U93563,Smith-Waterman Score=1230.
atgttctggggcttcagattccagacctcaacagactacaaagcctcttctgctttcattcagagaggaacacagccgctgttaaagcagcccgggctgtccatcaccatttgtgatgtgcgaagttggagtgcaagaggctccccaactgagggtggcaggggtactgaaatccagcctgcagctcctcttgccttaaagatgccattctcccatgaagccattcaccttggaggctgcatccacctggagagggggccattttctaatctgcacaaaggcacaggagaggttaatgggggcctgaaagcaccacccctggaccatcagctaaccttcttggccccatcatgctcaagagcaaggttgagcccactcaggatgatagtgttggaagttctggccagggcaattaggcaagagagagaaataaagggtattcacataggaaaagaggaagtcaaattgtgcctgtttgcagatgatatgattgtatatttagaaaaccccatcatctcagcccaaagtttccttaagctgataagcaacttcagcaaattctcaggacacaaaatcaatgtgcaaaaatcacaagcattcctatacaccaataacaaacaaacagacagccaaataatgagtgacctcccattcacaattgcttcaaagagaataaaatacctaggaatccaacttacaagggatgtgaaggacctcttcaaggagaactacaaaccactgctcaacgaaataaaggaggacacaaacaaatggaaggacattccatgctcatggataggaagaatcaatatcgtgaaaatggccatattgcccaaggtaatttatagattcaatgccatccccatcaagctaccaatgactttcttcacagaattggaaaaaactactttaaagttcatatggaaccaaaaaagagcccacattaccaagacaatcctaagccaaaagaacaaagctggaggcatcatgctacctgacttcaaactatactacaaggctacagtaaccaaaacagcatggtacttgtaccaaaacagagatatagaccaatggaacagaacagagccctcagaaataacaccacacatctacaaccatctgatctttgacaaacctgacaaaaacaagaaatag

SEQ ID NO: 4230 - DNA, 4755 bp, Homo sapiens
  SIMILAR (1057)..(2085): 721254mologous to Homo sapiens putative p150,accession number U93572,Smith-Waterman Score=1309.
atggcagcagatgaaagctcacagaacactttgcggctccagttcaaggcaatgcaggagatgcagcacaaacggttacagaagcagatggagaaaaagagggaaaaagaactgagcctcaaaagcagagctgacgaccaagaggagcccttggaggtttcagatggcctcagccttctccacgcaggggagccaaactcgaaaaatagctttgagaagagggtgcttgaagatgagattgaacaccttcgaaatgagctcagggaaacggtggacgagaacgggcgattgtataagctgctgaaggaaagggactttgaaatcaaacacctcaaaaagaaaatagaagaggacagatttgccttcacagggacagccggtgtagccggagacgtggtcgccaccaaaattgtggagctatcaaaaaagaaccggctgttgatggcagaatcagagggtgcaaaaaccagggtgaagcagctgaccaatcgcatccaggagctggagcgggaacatcctcactggggacacatccagactccaccttactccagggacagggagctcactactgcccagtggaatcctgttctttatggggcagttcatattatgaacactttccctttcgtggggctccaaatctacagagtaaaagtggctattggaaatggggacttattccccagagcccattttactaaaccagtgacagttcatgaaactcaagagctggagaccccagaggtgaaggccctgcaggacaggctggtggccaccaacttgaagatgagtgacctccgaaaccagatccagtctgtgaagcaggagctgcggatggcacagaaggttttggccagagaggttggggaagacatcaacgttcagcagctcctatcttcgccagggacctggaggggtcgggctcaacaaattcttgttttgcagagcaaggttcaagagcttgagaagcaattgggccaggcccggagccagtctgcgggaacagccagtgatgagttgtctgtctatccagacccaaggaagctgtcggcacaggagaaaaacctgctgaggatccgcagcctggaaagggaaaaacaggaaggcttggagaaacttgccagtgaacgggatgtcctccagagagagcttgaagagctaaaaaagaagttcgagggcatgaggtctcggaacaagctgctgtcaagtgagatgaagaccctcaagagtcagatgggaaccctggtggagaagggccggcatgatgacgagctcatcgacgccctcatgagaataaaatacctaggaatccaacttaaaagggatgtgaagaacctcttcaagaagaactacaaaccactgctcaatgaaataaaagaggacacaaacaaatggaagaatattccatgctcatgggtaggaagagtcaatatcatgaaaatggccatactgcccaaagtaatttatagattcagtgccatccccatcaagctaccaatgactttcttcacagaattggaaaaaactactttaaagttcatatggaatcaaaaaagagcccacattgccaagacaatcctaagcaaaaagaacaaagctggagggatcatagtacctgacttcaaactatactacaaggctacagtaaccaaaacagcatggtactggtaccaaaacagatatatagaccaatggaacagaacagaggcctcagaaataacaccacacatctacaaccatctgatctttgacaaacctgacaaaaacaagaaatgggggaaggattccctatttaataagtggtgctgggaaaactggctagccatatgtagaaagctgaaactggatcccttccttacaccttatacaaaaattaattcaagatggattaaagatttaaatgttagacctaagaccataaaaaccctagaagaaaagctaggaaataccattcaggacataggcatgggcaaggacttcatgactaaaacaccaaaagcaatggcagcaaaagccaaaatagacaaatgggatctaattaaactaaagagcttctgcatggcaaaagaaactaccatcagagaccagctgaagcagctacaggagatcctaggcagcctgagtctgcaggaggagaaaacgcgagtgtcccagcaccacctggaccagcaactgaacagcgaggctcagcggagcaacagcctagtcgcccagctgcaggccatggtagctgagcgggaggccaaagtgcgacagctggagatggagatcggacaactcaatgtgcactatcttcggaataaaggagtgggtgaggggtccagtggccgcgaggtcagccctgcctatacccagttcctggaggacccaggcctgaccaagtccccggcctcagcaggcgatcatgttggcaggcttggatcttctcggttctcggactccccagaacaaaaaggctggcaggcacaagtgtcagagatcaaggccctctggcaggctgccgaggtggagcgtgaccggctcaccgagtttgtcactgtcctgcagaaacgggtggaggagagcaacagcaagctcctggagtcagagaggaagctgcaggaggagcgacaccgcaccgtggtgctggagcaacatctggagaagatacgcctggagccagggaaggcatcagcctcccagagagcagctcccaggaccaaaacaggtctgcccacctctaacaacaggcacaacccaaccgggagcgagaagaaggacccatcctttgcccagctctccgatgtgcccgtggaatcccaaatggaagagctgacaaccaggctggccatccaggtggaggagaatgaaatgctaaaggctgccctgggcagtgccctgcggggaaaggaggaggacttccggatgtaccatgagatcctgggccaggccaggaaggcagaagagaagccctggtgggacactgcaggagaccctgggctggctgggttacagcagcagggaggcccagcagcccactggcagaggcgagagctctgggatggcaaggcggctgtgaatggacagatgcagtccctcgggcaggtgttcatcgccctcatcctaggtccctgcccctatctggcccatgacccctccatctgtacgaggagaccgtcggctgctggggggcccaggggagatggctacagggctggggatgaagatttaggggaggatcaaggccctgtccaggctatgggcatcaagacagcattgccggcggctgagctgggcctctactctctggtgctgagtggggccctggcctatgctggccggggcctccttgaggcttcacaagatggggcccacaggaaggccttccgggagtctgtgcgacctggctgggagtacattggccggaagatggatgtggctgacttcgagtgggtgatgtggttcacctcctttcgcaacgtcatcatctttgccctctccggacatgtgctgtttgctaaactctgcacgatggttgccccaaagctccgctcctggatgtatgctgtgtacggggccttggctgtgatgggcacaatgggcccttggtacctgctgctgctgcttggtcactgtgtgggcctctatgtggcctcgcttttgggccagccctggctctgtcttggccttggcttggccagcctggcctccttcaagatggaccccctaatctcttggcagagcgggtttgtaacaggcacttttgatcttcaagaggtgctgtttcatgggggcagcagcttcacagtgctgcgttgcaccagctttgcactggagagctgtgcccaccctgaccgccactactccttagctgacctgctcaagtacaacttctacctgcccttcttcttcttcgggcccatcatgacctttgatcgcttccatgctcaggtgagccaggtggagccagtgagacgcgagggtgagctgtggcacatccgagcccaggcaggcctaagcgtggtggccatcatggccgtcgacatcttctttcacttcttctacatcctcactatccccagcgacctcaagttcgccaaccgcctcccagacagtgccctcgctggcctagcctattcaaacctggtgtatgactgggtgaaggcggccgtcctctttggtgttgtcaacactgtggcatgcctcgaccacctggacccaccccagcctcccaagtgcatcaccgcactctacgtctttgcggaaacgcactttgaccgtggcatcaacgactggctttgcaaatatgtgtataaccacattggtggggagcattccgctgtgatcccagagctggcagccacagtggccacatttgccatcaccacactgtggcttgggccttgtgacattgtctacctgtggtcattccttaactgctttggcctcaactttgagctctggatgcaaaaactggcagagtgggggcccctagcacgaattgaggcctctctgtcagtgcagatgtcccgtagggtccgggccctgtttggagccatgaacttctgggccatcatcatgtacaaccttgtgagcctgaacagcctcaaattcacagagctggttgcccggcgcctgctactcacagggttcccccagaccacgctgtccatcctgtttgtcacctactgtggcgtccagctggtaaaggagcgtgagcgaaccttggcactggaggaggagcagaagcaggacaaagagaagccggagtag

SEQ ID NO: 4231 - DNA, 2793 bp, Homo sapiens
  SIMILAR (691)..(2094): 821254mologous to Homo sapiens putative p150,accession number U93563,Smith-Waterman Score=2025.
atggaaatcacaacaaactgtctctcagaacacagtgcaatcacattacaactcaggattaagaaactcactcaaaactgcacaactacatggaaattgaactacctgctcctgaatgactactgggtgaataacgaaatgaaggaagaaataaagatgttctttgaaaccaatgagaacaaagacacaacataccagaatctctgggacgtatttaaagcagtgtgtagagggaaatttatagcactaagtgcccacaagagaaagcaggaaagatctaaaactgacaccctaacatcacaattgaaagaactagagaagcaagagcaaacacattcaaaagctagcagaaggcaagaaataactaagatcagagcagaactgaaggagatagagacacaaaaaacccttcaagaaatcaatgattccaggagctcattttctgaaaagctcaacaaaattgatagaccgctagcaagactaataaagaagaaaagagagaagacacaaatagatgcaataaaaaacgataaaggggagatcaacaccaatcccacagaaatacaaactaccatcagagaatactataaatacctctatgcaaataaagtagaaaatctagaagaaatggatacattcctggacacatacaccctcccaagactaaaccaggaagaagttgaatctctgaatagaccaataacaggctctgaaattgaggcaataattaatagcctaccaaccaaagaaagtccaggaccagatggattcacagccgaattctaccagagggcaatcaggaaagggaaagaaataaagggtattcaattaggaaaagaggaagtcacattgtccctgtttgcagatgacatgattgtctatttaggaaaccccatcatctcagctcaaaatctcatgaagctgttaagcaacttcagcaaagtctcaggatacaaaatcaatgggcaaaaatcacaagcatgcccgtacaccaataacagacaaacagagagccaaatcatgagtgaactcccattcacaattgctacaaagagaataaaatacctaggaatccaacttacgagggatgtgaaggacctcttcaaggagaactacaaaccactgctcaacaaaataaaagaggacaaaaagaaatggaaaaacattcaatgctcatggataggaagaatcattatcatgaaaatggccatactgcccatggtaatttgtagattcaatgccatccccatcaagctaccaatgactttcttcacagaattggaaaaaactacgttaactttcatatggaaccaaaaaagagcctgcattgccaagaaaatcctaagcaaagagaacaaagctggaggcatcatgctacctgacttcaaactatactacaaggctacagtaaccaaaacagcatggtactggtaccaaaacagatacatagaacaatggaacagaacagaggcctcagaaataacaccacacatctacaaccatctgatctttgacaaatctgacaaaaacaagaaatggggaaacaattccctatttaataaatggtgctgggaaaactggctagctatatgtagaaagctgaaactgggtcccttccttacactttatacaaaaattaattcaagatggattaaagacttaaatgttagacctaaaaccataaaaaccctagaagaaaaccgaggcaataccattcaggacataggcatgggcaaggacttcatgactaaaacaccagaagcaatggcaacaaaaaccaaaatagacaaatgggatctaattaaactaaagagcttctgcatggcaaaagaaactaccatcagagtgcacagacaacctacagaatgggagaaaatttttgcaatctacccatctgacaaagggctaatatccagaatctacaaagaacttaaacaaatttacaagaaaaaaacaaacaaccccatcaaaaagtgggcaaaggacatgaacagacacttctcaaaagaagacatttatgcagccaacagacacatgaaaaaatgctcatcatcactggccatcagagaaatgcaaatcaaaaccacaatgaggctgagatattcaagatgcctaaatgtggacgcagtttctctgaaaagggtcgactcagaggttcaggagggaagtagaactccacttggcaggaagtgggaaaaggtcatggccagggttcagccacactggctcttcaattcctttgtggcttcagcagttcttctccagctgcgagctgaagcccacgctgctctcaggcttcccgcaacaggcacctgcgacttcgctcaccaaaatcttccagtggccacagtgagcgggcaggactggtgccagcaagccccaagcatcccaggccctctggacgcaggtgactcttctggcctctttggaaagccattggagctcgagaggcatagccagctgcctcctttccgtccatccccaaccgcgttctctaagccacgttctgtgcgccttactcccagcactcagccattccccagccccagaggccttggagtagtgacctctgcccaccagagaggagggggccggagggtggggcggagccttgtggcaaggcaggggtcacgtctccaggacgtgctacccggtggtttagacccgtcagggaggcacagcgtgaagggacagcgcagcgcagtagaggcacctgctggagacagcaccaggccagaccccaggatcacgggaactcctgctcccgccacagctctaaagagtgttgaataa

SEQ ID NO: 4232 - DNA, 3480 bp, Homo sapiens
  SIMILAR (1075)..(2646): 741254mologous to Homo sapiens putative p150,accession number U93563,Smith-Waterman Score=1984.
atgggaacctctgaagtgcagaatggagaggagagagctggcaccagcggccagggcagcgtggagcagctcagcggcagctcagtccagctccctcctggcctcaaactctgctttgagccctacttttccagctgtgcttctgactgcattcttcatgccagccccctctccttaatggctgcatcaggctcccaaaaccccaatctgtgggcttcctggttgtgctgcaaatgggttcagtgcccagaacgtcagcttggctgccacctgacttcaagtgtcatctatggcctcaggtactacccccaggccaaacgcagtgaattagaactcagggactgtgagggcctctgcaatcagacatctcccctcagctcacttgatgggatgggctggaaagcagcagcagaagagagcaactctggaatcagaaacatctggattccaattccagcatttgctactcacaagcaatacaatgtcagacaggtgataagcccctctccaccttactggtctcatcgaggaaatggaaataacagcctctgtgtcacaaggttatcaggaggactgaagcaaccagtagcaggcacaggaagaggtttagaaggtgggagcggaacaagggacctgatgccattcttgtcagcagcacccaaggaacagcccccaatcctggcacctgcacgtaggagctggttttttgaaaagatcaacaaaattgatagactgctagcaagactaataaagaagaaaagagagaagaatcaaatagatgcaataaaaaatggtaaaggggatatcaccactgatcccacagaaatacaaactaccatcagagaatactataaacacctctatgcaaataaactagaaaatctagaagaaatggataaattcctcgacacatacaccctcccaagactaaaccaggaagaagctgaatctctgaatagaccaataacaggctctgaaattgaggcaataattaatagcttatcaaccaaaaaaagtccaggaccagatggattcacagccgaattctaccagaggtacaaggaggagctggtaccattccttctgaaactattccaatcaacagaaaaagagggaatcctccctaactcattttatgaggccagcatcatcctgataccaaagcctggcagagacacaacaaaaaaagagaattttagaccaatatccttgatgaacattgatgcaaaaatcctcaataaaatactggcaaaccgaatccagcagcacatcaaaaagcttatccaccatgatcaagtgggcttcatccctgggatgcaaggctggttcaacatacgaaaatcaataaacgtaatccagcatataaacagaaccaaacacaaaaaccacatgattatctcaatagatgcagaaaaggcctctgacaaaattcaacaacccttcatgctaaaaactctccgtaaattaggtattgatgagacacaaacagagagccaaatcatgagtgaactcccattcacaattgcttcaaagagaataaaatacctaggaatccaacttacaagggacgtgaaggacctcttcaaggagaactacaaaccactgctcaatgaaataaaagaggatacaaacaaatggaagaactttccatgctcatgggtaggaagaatcaatattgtgaaaatggccatagtgcccaaggtaatttatagattcaatgccagccccatcaagctaccaatgactttcttcacagaattggaaaaaactactttaaagttcatatggaaccaaaaaagagcctgcattgccaagtcaatcctaagccaaaagaacaaagctggaggcatcatgctacctgacttcaaactatactacaaggctacagtaaccaaaacagcatggtactggtaccaaaacagagatatagaccaatggaacagaacagagccctcagaaataacgccgcatatctacaactatctgttctttgacaaacctgacaaaaacaagcaatggggaaaggattccctatttaataaatggtgctgggaaaactggctagccatatgtagaaagctgaaattggatcctgtacttacaccttatacaaaaattaattcaagatggattaaagacttacatgttagacctaaaaccataaaaaccctagaagaaaacctaggcattaccattcaggacataggcatgggcaaggacttcatgtctaaaacaccaaaagcaatggcaacaaaagccaaaattgacaaatgggatctaattaaactaaagagcttctgcacagcaaaagaaactaccatcagagtgaacaggcaacctacagaatgggagaaaatttttgcaacctactcatctgacaaagggctaatatccagaatctacaatgaactcaaacaaatttacaagaaaaaaacaaacaaccccatcaaaaagtgggcgaaggacatgaacagacacttctcaaaagaagacatttatgcagacaaaaagcacatgaaaaaatgctcatcatcactgatcatcagagaaatgcaagtcaaaaccacaatgagataccatctcacaccagttagaatggcgatcattaaaaagtcaggaaacaacagcctctttagaggtcatggagccaaagaatcttatgttgacaaggacaagaggggccatctacattcaggagttccttttcaaaagtccccagcaggatttgcaaaagctgagagaggatccaggagaagtgtagtagctgcaggcctgctgccgtctctcaccagcaacatgagccggcagacaaatgacaacacatgcacggctgccacagtgccgagctaccgaatgcacagacaatatgatgctgtcctgtcctgtgcaagatgtctcttgtggcccaccctaactggaattatgcagaaaagggaattctgggaagcacagttcagccttgccatggtgacatgtaacaatgtggcaggccagaccccaccccatacaacagaaccaagaaagaaaaaaggtgtgatggcaaaactctctggggctttcactggcaaatctgtcttctcaggtgagagctcaatgggagaggaaagccctgcaggaatgcgaaatggaacaggtgctagggtggggcaggaggagagggtgggagttgggaaggaaaggcagctgaggaagaaagaactggaggtgggactccctgaattagaatctccagggagtgaggccagagtggtgtcgagctgcatgtccccctctgatgcgcaggcatatttgggacaccactccccgcccccagctgtgggccacctgggaacttgcttggctacctctagatatactgattcctgtaccttccagtggttctgtttgctgtctggatacatttggtctttgcctactcaatgtgaagatggcgaggatgaagacctttatgatggtccacttccatttaatgaatggtaa

SEQ ID NO: 4233 - DNA, 1009 bp, Homo sapiens
  SIMILAR (476)..(1006): 911254mologous to Homo sapiens putative p150,accession number U93572,Smith-Waterman Score=863.
atgctggatgcttcctgccatcgaacatcggactccaagtttttcagctttggggttcagactggcttccttactcctgagcttgcacaccttgtgggaccttgtgatcgtgatcacaactcctcaccagcaagggaacaaaactggacagagaatgagtttgacgaattgacagaagtaggcttcagaaagtgggtaataacaaactcctccgagctaaaggagcatgttctaacccaaagcaaggaagctaagaaccttgaaaaaagggcaatcaagcaagagaaagaaataaagggtattcaattaggaaaagaggaagtcaaattgtccctgtttgcagatgacatgattgtatatttagaaaaccccattgtctcagcccaaaatctccttaagctgataagtaaattcagcaaagtttcaggatacaaaatcaatgtgcaaaaatcacaagcattgctttacaccaataacagagagccaaatcatgagtgaactcccattcacaattgctatgaagagaataaaatacctaggaatacaacttacaagagatgtgaaggacctcttcaaagacaactacaaaccactgctcaaggaaataagagaggacacaaataaatggaaaaacattccatgttcatggctaggaagaatcaatatcatgaaaatggccatactgcctaaagcaatttatagattcaatgctatccccatcaagctcctatagacttttttcacagaattggaaaaaactactttaaatttcatatggaaccaaaaaagagcccgcatagccaagacaatcctaagcaaaaagaacaaagctggaggcatcacgctacctgacttcaaactataccacaaggctacagtaacaaaaacagcatggtactggtaccaaaacagatatatagaccaatggaacagaacagaggcctcagaaataacgccacacatctacaaccatctgatctttgacaaacctgagaaaaacaagcaatag

SEQ ID NO: 4234 - DNA, 2463 bp, Homo sapiens
  SIMILAR (737)..(904): 871254mologous to Homo sapiens putative p150,accession number U93572,Smith-Waterman Score=269.
atgccacatgcaggacatgcacgcagtccagggcacacactgatcaagttggcagaatggtggatgtccagatggatggagtggaaccctggcttccccttgagcatcgatgccaaatgccacaaggatttaccccgtgatatccagtttgatagtgaaaaaggagtggactttgttctgaattactccaaagcactaaaccaggaagaagttgaatccctgaatagaccaataacaggctctgaaattgaggcaataattaacagcctaccaacccagaaaagttcaggaccagatggattcacagccgaattctaccagaggtacaaggaggagctggtaccattccttctgaaactattccaatcaatagaaaaagagggaatcctccctaactcattttatgaggccagcatcatcctgataccaaagcctggcagatacacacacaaaaaaaacaattttagaccaatatccctgatgaacatcgatgcaaaaatcctcaataaaatactggcaaaccgaatccagcagcacatcaaaaagcttatccaccaggatcaagtgggcatcatccctgggatgcaaagctggttcaacatacacaaatcaataaatgtaatccagcatataaacagaaccaaagacaaaaaccacatgattatctcaatagatgcagaaaaggcctttgacaaaattcaacaaccattcatgctaaaaactctcaataaattagagaataaaatacctaagaatccaacttacaagggatgtgaaggacctcttcaaggagaactacaaatcactgctcaacgaaataaaggaagacacaaacaaatggaagaacatcccatgctcatggataggaagaatgaatatcataaaaatggccatactcccaaggtaatttatagattcaatgtcatccccatcaaactaccaatgactttcttctcagaattggaaaaatctacgttaaagttcatatggaaccaaaaaagagcccgcattgccaagacaatcctaagccaaaagaacaaagctggaggcatcatgctacctgacttcaaactatactacaaggctacagtaaccaaaacagcatggtactggtaccaaaacagagatatagaccaatggaacagaacagagccctcagaaatgacaccacacatctacaaccatctgatctttgacaaacctgacaaaaacaagcaatggggaaaggattccctatttaataaatggtgctgggaaaactggctagccataggtagacagctgaagctggatcccttccttacaccttatacaaaaattaattcaaggtggattaaagacttaaatgttagacctaaaaccatcaaaaccctagaggaaaacctaggcaataccattcaggacataagcatgggcaaggacttcatgtctaaaacaccaaaagcaatggcaacaaaagccaaaatggacaaatgggatctaattaaactaaagagcttctgcacagcaaaagaaactaccatcagagtgaacaggcaacctacagaatgggaaaaaaattttgcaatctactcatctgacaaagggctaatatccagaatctacaaacaactcaaacaaatttacaagaaaaaaacaaacaaccccatcaaaaagtgggcgaaggatatgaacagacacttctcaaaagaagacgtttatgcagccaacagacacatgaaaaaatgctcatcatcactggccatcagagaaatgcaaatcaaaaccataatgatataccatctcacaccagttacaatggcaatcattaaaaagtcaggaaacaacaggtgctggagagggtgtggagaaatgggaacacttttatactgttggtgggactgtaaactagttcaacctttgtggaagacactgtggcaattcctcagggatctagaactaggaataccatttgacccagccatcccattactgggtatatacccaaaggattataaatcatgctgctataaagacacatgcacaccaaagttggcccgagatgaccaaattcacattctcaagcaacaccgacgtaaagaactggaaacacggcaaaaacaatatcgagcatggtatgaaataaaccctttccacagtgtatggcctgtcactgctggaaagtcaccaaggcaccagctcccagtgtgggtgcacaatccccaaacttcaccttacctacaactccagacaagagatggagaggagagtaatgaaaataactttggatcaaccatattggcatctgatttctttgcagaaattgacaagctgtcaattctgcaaattcatatggaaatggaagggacccagaatagccaaaacaatcttgataaaaagaaaacaaagatggaggacttgcacttctcaatatcaaaattactacacagctatagtattcaagacaatgtgatatcggcataa

SEQ ID NO: 4235 - DNA, 462 bp, Homo sapiens
  SIMILAR (420)..(1): 651254mologous to Rattus norvegicus carbonic anhydrase III,accession number AB030829,Smith-Waterman Score=516.
caagacagccagtccatctggttcatgagctgcctcaacaaagctggggtatttgtctgaattccagtgaacaacatggagctctgcagcatagctcactccatctactatgtgctcggagccgtggtcatcagcggacccccagtgaaggtgaacctgccgtaacctgtagcttccagtgagaggaccaccccgcagaactgatttgttctctgtgtcatcaaagtcaacattgaaggaatggccgctgttgctgatgattttagctgagcttgggtcatacttgatactaagtggtcggagggaagagtcatatttcacttctttggttttaatctcaattggagattgctgatcaccatcagcaatagggaaaaattccttccagtgaataggaccgttgtgctcgcggtatccccagctgagcctcgacatggtccctcgggaattccaccacactga

SEQ ID NO: 4236 - DNA, 791 bp, Homo sapiens
  SIMILAR (549)..(758): 821254mologous to Homo sapiens putative p150,accession number U93564,Smith-Waterman Score=297.
atttatttatttatttatttatttatttatttatttttgagacagaatttcgctctcgttgcccaagttggagtgcaatggcgcgatcttggctcactgcaacctccgcctcccgggttcaagcgattctcctgcctcagcctcccagggttttcaacaaatacttcttgaaccacctgcaaggacaaggtactgtgaatagcaggcatgatcattccgtgctggttgctagacaagttcaaagaaggctaagacagatgaggatgaaatctaacagacatgtctctgccgtcttggaacttgagagaggccagcaacagacaggccacaatgctcagaacccagtgtccacatgtcctattcactggaaggaatttttccctattgctgatggtgatcagcaatctccaattgagattaaaaccaaagaagtgaaatatgactcttccctccgaccacttagtatcaagtatgacccaagctcagctaaaatcatcagcaacagcggccattccttcaatgttgactttgatgacacagagaacaaatcagaattggaaaaaactacttcaaacttcatagggaaccaaaaaagagcctgcatagccaagacaatcttaagcaaaaataacaaagctggaggcatcatgctacctgacttcaaactaaactacaaggctacagtaaccaaaacagcatggtattggtaccaaaacagatatatagaccaatggaacagaacagaggcctcggaaataaacaccacacatctacaaccatctgatctttga

SEQ ID NO: 4237 - DNA, 4451 bp, Homo sapiens
  SIMILAR (1)..(651): 921254mologous to Homo sapiens putative p150,accession number U93574,Smith-Waterman Score=1018.
atgattatctcaatagacacagaaaatgcctttgaaaaaattcaacagcccttcatgctaaaaactctcaataaattaggtattgatgggacgtatctcaaaataataagagctatttatgacaaacccacagccaatatcatactgaatgggcaaaaactggaagcattccctttgaaaactggcacaagacagggatgccctctctcaccactccttttcaacatagtgttggaagttatggccagggtaatcaggcaggagaaagaaataaagggtattcaattaggaaaagaggaagtcaaattgtccctgtttgtagatgacatgattgtgtatttagaaaaccccattgtctcagcccaaaatctccttaagctgataagcaacctcagcaaagtctcaggatacaaaatcaatgtgcaaaaatcacaagcattctcatataccaataacagacaaacagagagccaaatcatgaatggactcccattcacaactgcttcaaagagaataaaatacctaggaatccaacttacaagggatgtgaaggaactcttcaaggagaactacaaaccactgctcaacgaaaaaaaagtggatacaaacaaatggaagaacattccatgctcatggataggaagaatcaattatcctgaaaatggccatactgcccaagaattggaaaaaactactttaaagttcatatggaaccaaaaaagagcctgcattgccaagtcaatcctaagcaaaaagaacaaagctggaggcatcacactacctgacttcaaactatactacaaggctacagtaaccaaaacagcatggtactggtaccaaaacagagatatagaccagtggaacagaacagagccctcagaaataataaccacacatctacaaccatctgatctttgacaaacctgacaaaaacaagaaatggggaatgggttccctatttaataaatggtgctgggaaaactggctagccatatgtagaaagctgaaactggatcccttccttacaccctatacaaaaattaattcaagatggattaaagacttaaatgttagacctaaaaccataaaaaccctagaagaaaacctaggcaataccattcaggacatagacatgggcaaggacttcatgtctaaaacaccaaaagcaatggcaacaaaagccaaaattgacaaatgggatctaactaaactaaggagcttctgcacagcaaaagaaactaccatcagagtgaacaggcaacctaaagaatgggagaaaatttttgcaatctactcatctgacaaagggctaatatccagaatctacaaagaactcaaacgaatttacaagaaaaaaacaaccccatcaaaaagtgggcgaaggatatgaacagatacttctaaaaagaagacatttatgcagccaacagacacatgaaaaagtgctcatcatcactggccatcagagaaatgcaaatcaaaaccacaatgagatacatctcacaccagttagaatggcaatcattaaaaagtcagggaacaacaggtgggaaatgaacaatgagaacacttggacacaggaaggggaacatcacacactggggcctgttgtggggtgggggaagcggggagggatagcattagtagatatacctaatgtaaatgacaagttaatggtgttggaagttctggccagagcaatcaggcaaaagaaagaaataaagggcattcaattaggaaaagaggaagtcaaattgtccctgtttgcagatgacatgattgtgtatctagaaaactccatcgtctcagcccaaaatcttaagctgataagcaacttcagcaaagtctcaggatacaaaatcaatgtgcaaaaatcacaagcattcctatacaccaataacagacaaacagagagccaaatcatgagtgaattcccattcacaattgctacaaagagaataaaatacctaggaatccaacttacaagggatgtgaaggacctcttcaaggagaactacaaaccactgctcaaggaaataagagaggacacaaacaaatggaagaacattccatgctcaaggataggaagaatcaatatcatgaaaatggccatactgcccaaggtaatttatagattcaatgacatccccatcaagctaccaatgactttcttcacagaattggaaaaaactactttaaagttcatatggaaccaaaaaagagcctgcattgccaaaacaatcttaagcaaaaagaacatagctggaggcatcacgctacctgacttcaaactatactacaaggctacagtaaccaaaacagcatggtactggtaccaaaacagagatatagaccaatggaacagaacagaggcctcagaagtaacatcacacatctacaaccatctgatcttttacaaacctgacaaaaacaagaaatggggaaacgattccctatttaataaatggtgctgggaaaactggctagccatatgtagaaagctgaaactggatcccttccttacaccttatacaaaaattcattcaagatggattaaagacttaaatgttagacctaaaaccataaaaaccctagaagaaaacctaggcaataccattcaggacataggcatgggcaaggacttcatgactaaaacaccaaaagcaatggcaacaaaagccaaagttgacaaatgggatgtaattaaattaaagagcttctgcacagcaaaagaaactaccatcagagaatttgagcagtttaacaggaggctaaatgaagtttctaagagagttcgcatacccttgcctgtgtctaatatactttgggaacattgtatacgattggctaatcgaactattgtagaaggatatgccaatgtcaagaaatgcagtaatgagggtcgtgccctgatgcaattggattttcaacagtttttaatgaaacttgaaaaactaacagatattagacccattcctgataaagaatttgtagaaacttatattaaagcttattacctaactgagaatgacatggaacggtggatcaaagagcacaggttgaggggaagaagagagtctgtagagaagagagacccagaacttcatctgtgtgttctgctgtgcatccttgacagcacctggcacagaatctcagctaagatggatgaaatgcaagtactcaggccctttgaactagaatttttgcctaaactgaaagagttgaaatacctgagactgggcgatttacaaacgaaagaggcttataatggacttaccattccacgtggctggggaagcttcacaatcatggtggaaggcaaggaggagcaggtcatgtcttacatggatggcagcaggcaaaaagagaatgaggaagacactgcagatgacatgattatatatctagaaaaccccattgtctcagcccaaaatctccttaagctgataagcaatttcagcaaagtctcaggatacaaaatcaatgtacaaaaatcacaagcattcttatacaccaataacagtcaaacagagagccaaatcatgagtgaactcccattcacaattgcttcaaagagaataaaatacctaggaatccaacttacaagggacgtgaaggacctcttcaaggagaactacaaaccactgctcaatgaaataaaagaggatacaaacaaatggaagaacattccatgctcatgggtaggaaaaatcaatatcgtgaaaatggccatacttcccaaggtaatttatagattcaatgccatccccatcaagctaccaatgactttcttcacagaattggaaaaaactactttaaagttcatatggaaccaaaaaagagcccgcatcgccaagtcaatcctaagccaaaagaacaaagctggaggcatcacgctacctgacttcaaactatactacaaggctacagtaaccaaaacagcatggtactggtaccaaaacagagatatagatcaatggaacagaacagagccctcagaaataacaccacatatctacaactatctgatctttgacaaacctgagaaaaacaagcaatggggaaaggattccctatttaataaatggtgctgggaaaactggctagccatatgtagaaagctgaaactggattccttccttacaccttatacaaaaatcaattcaagatggattaaagacttaaacgttagacctcaaaccataaaaaccctagaagaaaacctaggcattaccattcaggacataggcatgggcaaggacttcatgtctaaaacaccaaaagcaatggcaacaaaagccaaaattgacacatgggatctaattaaactaaagagcttctgcacagcaaaagaaactaccatcagagtgagcaggcaacctacaaaatgggagaatatttttgcaccctactcatctgacaaagggctaatatccagaatctacaattaa

SEQ ID NO: 4238 - DNA, 2702 bp, Homo sapiens
  SIMILAR (1)..(621): 951254mologous to Homo sapiens putative p150,accession number U93563,Smith-Waterman Score=1009.
atgaaggcagaaataaagatgttctttgaaaccaacgagaacaaagacacaacataccagaatctctgggacacattcaaagcattgtgtagagggaaatttatagcactaaatgcccacaagagaaagcaggaaagatccaaaattgacaccctaacatcacaattaaaagaactagaaaagcaagagcaaacacattcaaaagctagcagaaggcaagaaataactaagatcagagcagaactgaaggaaatagagacacaaaaaacccttcaaaaaattaatgcatccaggagctggttttttgaaaggatcaacaaaattgatagaccactagcaagactaataaagaaaaaaagagagaagaatcaaatagatgcaataaaaaatgataaaggggatatcaccaccgatcccacagaaatacaaactaccatcagagaatactacaaacacctctatgcaaataaactagaaaatctagaagaaatggataaattcctcgacatatacaccctcccaagactaaaccaggaagaagttgaatctctgaatagaccaataacaggagctgaaactgtggcaataatcaatagcttaccaaccaaaaaaaagcccgggaccagacagattcacagccaaattctaccagaggtacaaggaggagctggtaccattccttctgaaactattccaatcaatagaaaaagagggaatcctccctaactcattttatgaggccagcatcatcctgataccaaagctgggcagacacacaaccataaaagagaattttagaccaatatccttgatgaacattgatgcaaaaatcctcaataaaatactggcaaaccgaatccagcagcacatcaaaaagcttatccaccatgatcaagtgggcttcatccctgggatgcaaggctggttcaatataaacaaatcaataaatgtaatccagcatataaacagaaccaaagacaaaaaccacatgattatctcaatagatgcagaaaaggcctttgacaaaattcaacaacgcttcatgctaaaaactctcaataaattcggtattgatgggacgtatctcaaaataataagagctatctatgacaaacccacagccaatatcatactgaatgggcaaaaactggaagcattccctttgaaaactggtacaagacagggatgccctctctcaccactcctattcaacacagtgttggaagttctggccagggcaattaggcaggagaaggaaataaacggtattcaattaggaaaagaggaagtcaaattgttcctgtttgcagacgacatgattgtatatctagaaaacccaattgtctcagcccaaaatctccttaagctgataagcaacttcagcaaagtctcaggatacaaaatcaatgtacaaaaatcacaagcattcttacgcaccaacaacagacaaacagagagcaaaatcatgagtgaactcccattcacaactgcttcaaagagaataaaatacctaggaatccaacttacaagggatgtgaaggacctcttcaaggaaaactacaaaccactgctcaaggaaataaaagaggatacaaacaaatggaagaacattccatgctcatggataggaagaatcaatatcgtgaaaatggccatactgcccaaggtaatttacagattcaatgccatctccatcaagctaccaatgactttcttcacagaattggaaaaaactactttaaagttcatatggaaccaaaaaagagcccgcattgccaaggcaatcctaagccaaaagaacaaagctggaggcatcatgctacctgacttcaaactatactacaaggctaacagtaaccaaaacagcatggtactgggtaccaaaacaggagatatagatcaatggaacagaacagagccctcagaaataataccacacatctacaaccatctgatctttgacaaacctgacaaaaacaagaaataaggaaaggattccctatttaataaatggtgctgggaaaactggctagccatatgtagaaagctgaaactggatccctttcttacaccttatacaaaaattaattcaagatggattaatgacttaaatgttaggacctaaaaccataaaaaaccctagaagaaaacctaggcaataccattcaggacataggcatgggccaagaacctcatgactaaaacaccaaaagccaatggcaacaaaagccaaaattgacagatgggacctaattaaactaaagagcttctgcacagcaaaagaaactacccatcagagtgaacaggcaacctacagaatgggagaaaatttttgcaacctactcatctgacaaagggctaatatccagaatctacaatgaacttaaaacaaatttacaagaaaaaaacaaacaaccccctcatcaaaaagtgggcaaaggatatgaacagacacttctcaaaggaagacatttattgcagccaacagacatgtgaaaaaatgctcatcatcactggtcaccagagaaatgcaaatcaaaaccacaaggagataccatctcacaccagttagaatggcgatcattaaaaagtcaggaaacaacagtaatagttccctatttgactacagagacctcattgtcctcatcaactttttttctcacatgacagctgctctttattgtcccttctttggaaggcag

SEQ ID NO: 4239 - DNA, 2664 bp, Homo sapiens
  SIMILAR (595)..(1515): 911254mologous to Homo sapiens hnRNP B1 protein,accession number M29064,Smith-Waterman Score=1613.
atgactatgaactttgtcgcagacagtcatactggccggaatcctctagcctcagcggctggcgccaaaaccggactccgcccacttcctcgcccctgcggtgcgagggtgtggaatcctccagacgctgggggagggggagttgggagcttaaaaactagtacccctttgggaccactttcagcagcgaactctcctgtacaccaggggtcagttccacagacgcgggccagggggggcgggaccctattccaagaggtagtaactagcaggactctagccttccgcaattcattgagcgcatttacggaagtaacgtcgggtactgtctctggccgcaagggtgggaggagtacgcatttggccggaagacgcgttagtgggggggaaggttctagaaaagcggcggcagcggctctagcggcagtagcagcagcgccgggtcccgtgcggaggtgctcctcgcagagttgtttctcgagcagcggcagttctcactacagcgccaggacgagtccggttcgtgttcgtccgcggagatctctctcatctcgctcggctgcgggaaatcgggctgaagcgactgagtccgcgatggagaaaactttagaaactgttcctttggagaggaaaaagagagaaaaggaacagttccgtaagctctttattggtggcttaagctttgaaaccacagaagaaagtttgaggaactactacgaacaatggggaaagcttacagactgtgtggtaatgagggatcctgcaagcaaaagatcaagaggatttggttttgtaactttttcatccatggctgaggttgatgctgccatggctgcaagacctcattcaattgatgggagagtagttgagccaaaacgtgctgtagcaagagaggaatctggaaaaccaggggctcatgtaactgtgaagaagctgtttgttggcggaattaaagaagatactgaggaacatcaccttagagattactttgaggaatatggaaaaattgataccattgagataattactgataggcagtctggaaagaaaagaggctttggctttgttacttttgatgaccatgatcctgtggataaaatcgtattgcagaaataccataccatcaatggtcataatgcagaagtaagaaaggctttgtctagacaagaaatgcaggaagttcagagttctaggagtggaagaggagatggatatggcagtggacgtggatttggggatggctataatgggtatggaggaggacctggaggtggcaattttggaggtagccccggttatggaggaggaagaggaggatatggtggtggaggacctggatatggcaaccagggtgggggctacggaggtggttatgacaactatggaggaggaaattatggaagtggaaattacaatgattttggaaattataaccagcaaccttctaactacggtccaatgaagagtggaaactttggtggtagcaggaacatggggggaccatatggtggaggaatatggaaaaacacaagcataactgagagaaaaaaatccagaaagctggatttaatacaaagtaaaaaaggcagccggacaaaggaagctcctcagcctccagtcgcctctctgtgcatgcacctcggtcactggtctcgactaatggtttctccgggagcccagttaacagggaaaaattcgcatggcctctcggtttcttcggtccgaaaatccaacgttggtccaagaaggctctgtgcggcaatgaaggccactggtccagacaatgcccaaagccaggtaagcccaccaggccatgccccctctgcggaggaccccactggaagtcggactgtgagcagcccctgcacggaccgcccccatcccttcctgagccggccaaaacctcctactcagatctcattggtcttgccgctgaagactgacggtgccctggaacggatgccccagcaactaccattgcttcatcagagccaaggtacccaatccatccacccagacccctccagtacttctagctttcttctaccctttcaacctcccaccctaaaacgtgcagcctttccttgtcctccatccatagttaaccctgctgtttgggatacttccacaccctcagtcgcagaacaccatacccccatccgcattacccttaaagagcccacccagttcctatcacagaagcagtatcccatcccccaagcagctctcgtaggcctacagcctatcatttctcacctcctcgccagtcacctactccgcccaacagactctccttttaacacaccaattctacctgttaaaaagccaaatggaacttatcgtttagtccaggacctcaggctcattaaccaagctgtactcccacgccacgcggggctgggtcgagacttgggctcccggagggcggcgcgtggtcccgcgtccgcgagcgtggcggcgcgcggccggctgtcccgaggctgcggcgaccgcccagttaacgtggccgccgcggggcaaaaaatgggaaaaaaacagaatggaaagagtaaaaaagttgaagaggcagagcctgaagaatttgtcgtggaaaaagtactagatcgacgtgtagtgaatgggaaagtggaatatttcctgaagtggaagggatttacagagtaa

SEQ ID NO: 4240 - DNA, 1344 bp, Homo sapiens
  SIMILAR (481)..(753): 461254mologous to Murine leukemia virus putative gag-pol polyprotein,accession number AF169256,Smith-Waterman Score=187.
atgagaaaagtaaaaggcaaaaaccggcagagtttcaaatgcttgcctccgccatcaggagccctgcaggcccacggggcggcagctccgcacggaagcctcctaacactccacctccacctggtgcctgtttcaagtgcggcaatgaaggccactggtccagacaatgcccaaagccaggtaagcccaccaggccatgccccctctgcggaggaccccactggaagtcggactgtgagcagcccctgcgaggaccgcccccatcccttcctgagctggcctacttggatctcattggccttgctgctgaagactgacggtgccctggaacggatgccccagcaactaccatcgcttcatccaagccaaggtacccaatccatccacccagacccctccagtacttctagctttcttctaccctttcaacctcccaccctaaaacgtgcagcctttccttgtcctccatccatagttaaccctgctgtttgggatacttccacaccctcagtcgcagaacaccatacccccatccgcattacccttaaagagcccacccagttcctatcacagaagcagtatcccatcccccaagcagctctcgtaggcctacagcctatcatttctcacctcctcgccagtcacctactccgcccaacagactctccttttaacacaccaattctacctgttaaaaagccaaatggaacttatcgtttagtccaggacctcaggctcattaaccaagctgtactcccactggttcaagaaattactcagtcctgctctatctgccactcaacgtcaccccagggctccctccggccactgccttttcctacccaccaagcccagggccagttgcccgggcaagattggcaagtagacttcactcacatgccgcctaataaacggctctgctatattctagtctttgtactttctccggtccagacacggtctttcattcgtgaagcagcaaatgaggccatgcctctccctgttggcactaccttgtcctctcaacataactgtcttgcaggcacagatgtgtttatctgtcaatccgaccctcatcaaaagctacagccgaagaggagaggcccctacactgtgatactcagcacgccaactgcagcccagtcccaaggtgcaaggctacttgtgccagcagcgtgcgccagcaaggtagcagaagcaggaagaaagccggcaggaagacacgtacccctgaagatccagaaagaggccatctgtgtacaacgtagcagtaacgtgggcctggaatggtccctggaggatgatcagcgacaagctgtatctaatgggaaaattcatgcttga

SEQ ID NO: 4241 - DNA, 918 bp, Homo sapiens
  SIMILAR (483)..(602): 701254mologous to Oncorhynchus mykiss HSC71,accession number S85730,Smith-Waterman Score=144.
atgccaaactatgtcacctttacggataccaaacaattgattagtgatactccaaataatcaagttccaatgaaccgtgccagcatggcttttgatgccaaatgtctgactggatgcagatttgatgatgccattgtccagtttgatatgacatattggcctttcacggtggtaaatgatgctggcaggcccaaggtccaagtagagtatgagagagacaaaaagctgctacccataggaggtgtcttctatggttctgacaaagatgaaggaaattgcaaaagtctaccttgggaagactgttaccaatgctgtgagacatctcaaaatgttcaagattttctgtttttggatgtcactcctctttcccttgatattaaaactgctgatggagtcatggctgtcctcatcaagtgtgatgctaccattcctaccaggcagacacagaccttcactacctactctgacaagcctagcatgtcattgccaaggataaaaacctacttcgcaagtttgagctcacaggcgtacctcctgcacaccatggtgctcatcagattgaagtcacctttgatattaatgccaagggcatcctcaatgtctactctcactgatgacaagggccatttgagcaaggaagacattgagcctatggtccaggaaactgagaagtacaaagctgaagatgagaagcagagggacaaggtgtcatccaagaattcacttgatccctatgtgttcaacatgaaagcaactgctgaagatgagaaacttcaagtcaagattaacaatgagcacaaacagaagattcttagcaagtgccatgaaattatcaactggctcgacaagaatcagactgcagagaaggaagaatttgaacatgcacagcaagagctggagaagtcttcaagtccatga

SEQ ID NO: 4242 - DNA, 995 bp, Homo sapiens
  SIMILAR (1)..(468): 981254mologous to Escherichia coli IS5 39.3kDa protein,accession number U70214,Smith-Waterman Score=803.
atgcatcagaccaagaaaggcaatcagtggcactttggcatgaaggcccacattggtgtcgatgccaagagtggcctgacccacagcctggtcaccacgcggcccaacgagcatgacctcaatcagctgggtaatctgctgcatggagaggagcaatttgtctcagccgatgccggctaccaaggggcgccacagcgcgaggagctggccgaggtggatgtggactggctgatcgccgagcgccccggcaaggtaagaaccttgaaacagcatccacgcaagaacaaaacggccatcaacatcgaatacatgaaagccagcatccgggccagggtggagcacccatttcgcatcatcaagcgacagttcggcttcgtgaaagccagatacaaggggttgctgaaaaacgataaccaactggcgatgttattcacgctggccaacctgtttcgggcggaccaaatgatacattgcaccagaggagagggactcatcaccaccaagatcccaaaagccccagacaacggtagctactgcctgccttcgaagaacgatgattcagaagaagaggatccagagatgtcccctatggttgtgacaaagatgaaggaaattgcagaagcctaccttgggaagactgttaccaatgctgtgctcacagtgccagcctactttaatgactctcagcgtcaggctaccaaaaagatgctagaactattgctggtctcaatggacttagaattagcaatgagccaactgctgctgctattgcttatggcttaaaccaaaaggttggaactgaaagaaatgtgttgatctttgacctgggaggcagcatcaccccgagaatccgcacgcctgagacaggctcagacgacgccatcaagagcattctagagcaggccaagaaggagatcgagtcgcagaagggcggtgagtgtgacccctgcaggcaaagcctgaggcccccggggccagctgcgaacaggagatga

SEQ ID NO: 4243 - DNA, 677 bp, Homo sapiens
  SIMILAR (12)..(539): 981254mologous to Homo sapiens 71 Kd heat shock cognate protein,accession number Y00371,Smith-Waterman Score=892.
  misc_feature (1)...(677): n = a,t,c or g
cggacgcgtgggtgactgtcctcatcaagcgtaataccaccattcctaccaagcagacacagaccttcactacctattctgacaaccagcctggtgtgcttattcaggtttatgaaggcgagcgtgccatgacaaaggataacaacctgcttggcaagtttgaactcacaggcatacctcctgcaccccgaggtgttcctcagattgaagtcacttttgacattgatgccaatggtatactcaatgtctctgctgtggacaagagtacgggaaaagagaacaagattactatcactaatgacaagggccgtttgagcaaggaagacattgaacgtatggtccaggaagctgagaagtacaaagctgaagatgagaagcagagggacaaggtgtcatccaagaattcacttgagtcctatgccttcaacatgaaagcaactgttgaagatgagaaacttcaaggcaagattaacgatgaggaccaacagaagattctggacaagtgtaatgaaattatcaactggcttgataagaatcaggtttgtgnnnnnnnnnnnnnnnnnncctccccccctcagggggggggagggggagggaaacccaagcttgggctgaatttcaggggagggcacaagagtggagggtccaaaaatattggggttccaccaaaaattagg

SEQ ID NO: 4244 - DNA, 365 bp, Homo sapiens
  SIMILAR (259)..(363): 1001254mologous to Homo sapiens L7a protein,accession number X52138,Smith-Waterman Score=189.
cccacgcgtccgccagagacaaagcatgagaagaagcagagactgtacttgtgggccagcttaagcagctgagtagctgtttggcggtccacaagtacagaccagagacaaagcaagagaagaagcagagactgttggcccgggccgagaagaaggctgctggcaaaggggacgtcccaacgaagagaccacctgtccttcgagcaggagttaacaccgtcaccaccttggtggagaacaagaaagctcagctggtggtgtcgtaaaatgggggtcccttactgcattatcaagggaaaggcaagactgggacgtctagtccacaggaagacctgcaccactgtcgccttcacacaggtgaacta

SEQ ID NO: 4245 - DNA, 432 bp, Homo sapiens
  SIMILAR (148)..(432): 981254mologous to Homo sapiens L7a protein,accession number X52138,Smith-Waterman Score=480.
cgaattcccgggtcgacgatttcgtcgccgcccaagatgccaagggaaagaaggtggctccggccccagctgtcgtgaagaagcaggaggctaagaaagtggtgaatcccctgtttgagaaaaggcctaagaattttggcattggacaggcagagactgttggcccgggccgagaagaaggctgctggcaaaggggacgtcccaacgaagagaccacctgtccttcgagcaggagttaacaccgtcaccaccttggtggagaacaagaaagctcagctggtggtgattgcacacgacgtggatcccatcgagctggttgtcttcttgcctgccctgtgtcgtaaaatgggggtcccttactgcattatcaagggaaaggcaagactgggacgtctagtccacaggaagacctgcaccactgtcgccttcaca

SEQ ID NO: 4246 - DNA, 376 bp, Homo sapiens
  SIMILAR (201)..(230): 1001254mologous to Mus musculus surfeit 3 protein,accession number M14689,Smith-Waterman Score=49.
  misc_feature (1)...(376): n = a,t,c or g
nattgcacacgacgtggatcccatcgagctggttgtcttcttgcctgccctgtgtcgtaaaatgggggtcccttactgcattatcaagggaaaggcaagactgggacgtctagtccacaggaagacctgcaccactgtcgccttcacacaggtgacaaaggtgctttggctaagctggtggaagctatcaggaccaattcaatgtcctgggtcctaagtctgtggctcgtaaatgtacactgttgagttttctgtacatacctcacccgctttgtgaaatggccccgctatatcaggttgcagcggcagagagccatcctctataagcggctgaaagtgcctcctgcgattaaccagttcacccaggccctgtatt

SEQ ID NO: 4247 - DNA, 882 bp, Homo sapiens
  SIMILAR (736)..(801): 1001254mologous to Mus musculus surfeit 3 protein,accession number M14689,Smith-Waterman Score=100.
gccgaaaggaaagaaggccaagggaaagaaggtggctccggccccagctgtcgtgaagaagcaggaggctaagaaagtggtgaatcccctgtttgagaaaaggcctaagaattttggcattggacaggacatccagcccaaaagagacctcacccgctttgtgaaatggccccgctatatcaggttgcagcggcagagagccatcctctataagcggctgaaagtgcctcctgcgattaaccagttcacccaggccctggaccgccaaacagctactcagctgcttaagctggcccacaagtacagaccagagacaaagcaagagaagaagcagagactgttggcccgggccgagaagaaggctgctggcaaaggggacgtcccaacgaagagaccacctgtccttcgagcaggagttaacaccgtcaccaccttggtggagaacaagaaagctcagctggtggtgattgcacacgacgtggatcccatcgagctggttgtcttcttgcctgccctggtgtcgtaaaatgggggtcccttgactgcattatcaagggaaaggcaagactgggacgtctagtccacaggaagacctgcaccacttgttgccttcacacaggtgaactcggaagacaaaggcagctttggctaagctggtggaagctatcaggaccaattacaatgacagatacgatgagatccgccgtcactggggtggcaatgacctgcgtcctaaagtctgtggctcgtatcgccaagctcgaaaaggcaaaggctaaagaacttgccactaaactgggttaaatgtacactgttgagttttctgtacataaaaataattgaaataatacaaattttccttcagccagtgttaaaaaaaaa

SEQ ID NO: 4248 - DNA, 1150 bp, Homo sapiens
  SIMILAR (154)..(273): 1001254mologous to Mus musculus alpha N-catenin I,accession number D25281,Smith-Waterman Score=197.
atggcctgtggtgaggcctattctaccgatttccacgctccatctgtggaatccatcagcagggcatttaccctcattcagggttctgacacctgcctggcaggcgcaggagacacaaagaaagctggagtggatgagaaaggggaggttggggtggaagaggccctggaagctgtcaaaaatgctacaaatgagcaagaccttgcaaaccgttttaaagagtttgggaaagagatggtgaaacttaactatgtagcagcaagaagacaacaggtgggaaagattttagaaatgctaggggagaaaatggcacttgatgcaaacacacacgcatgtatgtgtgcaaacaggtatacacagtatttccctgaatgcaaattaaaatcacagtggaataccactacatacctactagaatggctaaaacaaaaaaggcagacactatccagtgtggctgagaatatggattatctggaactttcatgtactgctgaaaatgaaggactatctgacgggttcgtttgggaggaagaacatgcacggcatggctcgctcgctctctccgttttcctactgatctgcagagacagtgcatttgaactactgctgcccaggagtcatgttctcagactggattttgaaacagtgataggtttgagcacacgcgctttagagggctacagtggttgtgagaaatttcctgaaatgagaagagttaacagcagggctcaggcccagagagatccattttctgtccctgagtctctggctggagttattagagttgctgcagggaagccccacccaatgaggatggatgggtcaggctcaggcctgaagaggcactctggcagcagtctgccacagccgggctggctgctgccctccgccaaggagcataaatggcttagacagcaggcagccacagctgtggtgctggtcactactccccctgggagcttggcaggcttaagcagaaagattatgttacttgcccaagaacacacacaaagtcaatggcaaaacctggctttgaacttctggggtctggctgcagacctcttttattccctgccaccaaatgatcccttatattctggcttgtctggagttgatccatcagtcataaatgagttggttctaagagaag

SEQ ID NO: 4249 - DNA, 450 bp, Homo sapiens
  SIMILAR (46)..(378): 1001254mologous to Homo sapiens hnRNPcore protein A1,accession number X79536,Smith-Waterman Score=577.
  misc_feature (1)...(450): n = a,t,c or g
cccacgcgtccgagcatcgttaaagtctctcttcaccctgccgtcatgtctaagtcagagtctcctaaagagcccgaacagctgaggaagctcttcattggagggttgagctttgaaacaactgatgagagcctgaggagccattttgagcaatggggaacgctcacggactgtgtggtaatgagagatccaaacaccaagcgctccaggggctttgggtttgtcacatatgccactgtggaggaggtggatgcagctatgaatgcaaggccacacaaggtggatggaagagttgtggaaccaaagagagctgtctccagagaagattctcaaagaccaggtgcccacttaactgtgaaaaagatatttgtcggtggtagtggaagcaattttggaggtggtggaagctacaatgattttgggaattacacaatcagtcttcanattttn

SEQ ID NO: 4250 - DNA, 501 bp, Homo sapiens
  SIMILAR (179)..(487): 1001254mologous to Homo sapiens hnRNPcore protein A1,accession number X79536,Smith-Waterman Score=538.
tcgccgccgaagaagcatcgttaaagtctctcttcaccctgccgtcatgtctaagtcagagtctcctaaagagcccgaacagctgaggaagctcttcattggagggttgagctttgaaacaactgatgagagcctgaggagccattttgagcaatggggaacgctcacggactgtgtggattctcaaagaccaggtgcccacttaactgtgaaaaagatatttgttggtggcattaaagaagacactgaagaacatcacctaagagattattttgaacagtatggaaaaattgaagtgattgaaatcatgactgaccgaggcagtggcaagaaaaggggctttgcctttgtaacctttgacgaccatgactccgtggataagattgtcattcagaaataccatactgtgaatggccacaactgtgaagttagaaaagccctgtcaaagcaagagatggctagtgcttcatccagccaaagaggtcgagtggtcttggaaac

SEQ ID NO: 4251 - DNA, 765 bp, Homo sapiens
  SIMILAR (382)..(762): 921254mologous to Homo sapiens hnRNPcore protein A1,accession number X79536,Smith-Waterman Score=648.
atgtctaagtcagagtctcctaaagagcccgaacagctgaggaagctcttcattgaaggcttgagctttgaaacaaccaatgagagcctgaggggccattttgagcaacacggaatgctcacgggctgtgtggtaatgagagatccaaacaccaagcgctccaggggctgtggatttgtcacatgtgccactgtggaggaggtggatgcagccatgaatgcaaggccacacaaggtggatggaagagttgtggagacaaagacagctgtctcaggagattctcaaagaccaggtgcccacttaactatgaagaagatatttgttgggggctttaaagaagacactgaagaacatcacccaagagattatcctgaacaccacagaggtcgaagtggttctggaaactttggtggcggtcgcggaggtggtttcggtgggaatgacaactttggtcttggagggaactttagtcgtcgtggtggctttggtggcagccgtggtggtggtggatatggtggcagtggggatggctataatggatttggtaatgatggaagcaattttggaggtggtggaagctacaacaattttggcaattacaacaatcagtcttcaaattttggacccatgaagggaggaaactttgaagacagaagctctggcccctatggtggtagaggccaatactctgccaaaccacgaaaccaaggtggctatggcggttccagtagcagcagtaactgtggcagtggcagaatattttaa

SEQ ID NO: 4252 - DNA, 894 bp, Homo sapiens; identical to SEQ ID NO: 945
  SIMILAR (744)..(887): 451254mologous to Homo sapiens hnRNPcore protein A1,accession number X79536,Smith-Waterman Score=91.

SEQ ID NO: 4253 - DNA, 1677 bp, Homo sapiens
  SIMILAR (1)..(771): 961254mologous to Homo sapiens hnRNPcore protein A1,accession number X79536,Smith-Waterman Score=1344.
atgagagatccaaacaccaagcgctccaggggctttgggtttgtcacatatgccactgtggaggaggtggatgcagctatgaatacaacgccacacaaggtggatggaagagttgtggaaccaaagagagctgtctccagagaagattctcaaagaccaggtgcccacttaactgtgaaaaagatatttgttggtggcattaaagaagacactgaagaacatcacctaagagattattttgaacagtatggaaaaattgaagtaattgaaatcatgactgaccgaggcagtggcaagaaaaggggctttgcctttgtaacctttgacgaccatgactccgtggataagattgtcattcagaaataccatactgtgaagggccacaactgtgaagttagaaaagccctgccaaagcaagagatggctagtgcttcatccagccaaagaggtcgaaggggttctggaaactttggtggtggtcgtggagatggtttcggtgggaatgacaactttggtcgtggaggaaacttcagtggtcgtggtggctttggtggcagctgtggtggtggtggatatggtggcagtggggatggctataatggatttggtaatgatggaagcaattttggaggtggtggaagctacagtgattttggcaattacaacaatcagtcttcaaattttggacccatgaagggaggaaattttggaggcagaagctctggcccctatggcggtggaggccaatactttgcaaaaccacaaaaccaagcagcacgctgcgtggctgctcgctggctatttaggacggaagctcggttggtgtttctccagaagtttcccccttgggcggtggtggaggtggtaaccgtgatagtagcagctccggcggcagcaacagcgactacgagggatggcggcggctgcagcaggaactgcaacatcccagaggtttttccagagcttctcggatgccctaatcgacgaggacccccaggcggcgttagagagaagcagcagcaaacaaattcaaaatctaccagaagacaagaaataactaagaccatagcagaactgaaggagatagagacacgaaaaacgcttcaaaaaatcaatgaatccaggagctggttttatgaaaagatcaacaaagtagatagactgctagacagactcataaagaagaaaagagagaagagtcaaatagatgcaataaaaaatgatataggggatattgtcactgatcccgcagaaatacaaactaccatcaaagaatactataaacgtctctatgcaaatgaactagaaaatctagaagaaatggataaattcctggcaacatacagcctccacagtctaaaccaggaagaagtcgaatccctgaataaaccagtaaccagttctgaagttgaggcagtaactaatagcctaccaaccaaaaaaagtccaggaccagatggattcacagtattattggaagttctggccccggcaatcaggcaagagaaagaaataaagcatattccaataggaagagaggaagtaaaattgtctctgtttgcagatgacgtgattgtatatttagaaaaccccatcgtctcagcccaaaatctccttaagctgataagcaacttcagcaaactctcagggtacaaaatcaatgtgcaaaaatcataa

SEQ ID NO: 4254 - DNA, 1395 bp, Homo sapiens
  SIMILAR (931)..(1392): 971254mologous to Cloning vector pZC320 SopA,accession number U26464,Smith-Waterman Score=779.
aaataccacactgtgaatggccacaactgtgaagttaggaaagccctgtcaaagcaagagatagctagtgcttcatgcagccaaagaggtcgaagtggttctggaaactttggtggtgatcgtggtggtggttttggtgggaatgacaactttggtcgtggaggaaacttcagtggtcatggtggctttggtggcagctgttgtggtggtggatatggtggcagtggggatggctataatggatttgggaatgatgccagcaattttggaggtggggggagctcaatgagtttggcattacaacaatcaatcttcccattttggacccctgagcgaggaaactttggaggcagaagctcttgcctcttgggggtgccccagcctcaacttatgttaaaggacctaactcccagcgaactcaaaatgagggctggtttgaaggataagccccttggagaggggatggaggggcaagaggaaataaagggggaggggcaaaccaatagaacggtttgtttgtctgaaaaaaaaattctgaaatggccctacaaaggaaaggacgtgagagacaccggagggggcgcttttaatgctgggagacgggcaccagctgttgccctcatcccctgcccctccgagagttgcggaagcggccaccctggtttgtcccaccggcgaaaaactgttagtgttgggcctaagcttgcatgccctgcggtccttgttaagcttgcatgcctgcggttcgactctagagatccccctatgagctgtaagtaccaaggaccttctggcaaagatagtcatagaatgcacagcaccgcttacctctgcaagagaacaatgcaaaacaaggcacgactggagctcgcagactctgaggctgtgagtaccaaggaccttctggcaaagatagtcatagaatgcacagcacccggagcgaggaaaataacccggcgctggagaataggtgaagcagcggatttagttggggtttcttctcatgctatcatagatgccgagaaagcagggcgactaccgcacccggatatggaaattcgaggacgggttgagcaacgtgttggttatacaattgaacaaattaatcatatgcgtgatgtgtttggtacgcgattgcgacgtgctgaagacgtatttccaccggtgatcggggttgctgcccataaaggtggcgtttacaaaacctcagtttctgttcatcttgctcaggatctggctctgaaggggctacgtgttttgctcgtggaaggtaacgacccccagggaacagcctcaatgtatcacggatgggtaccagatcttcatattcatgcagaagacactctcctgcctttctatcttggggaaaaggacgatgtcacttatgcaatatag

SEQ ID NO: 4255 - DNA, 2160 bp, Homo sapiens
  SIMILAR (483)..(1442): 371254mologous to Homo sapiens hnRNPcore protein A1,accession number X79536,Smith-Waterman Score=341.
atgaagtgtttaaagtttataaatcacaaagaaatattggaggcttctgaaagaaaacaagcagagtcattagattttccctttaaaaaacttcgctggcatctctgtgaaggatggattgaagaggaaagagatgagtcaagaaaatcggaaaccatcttcaaagacctcttcaaagtccctgtgcttaaagaaaccatctattacaaattctatgggccccctgtctatcagattgaaactgtgtattttatggcactgagtccacctaagtcaaagcaatttgacaaaacaaaacaaaacaacaacaacaaaaaaacacatcagtttgtaattgttttctttaaaacagatgaacacctttctgcccgtggacgccgccgaagaagcatcgttaaagtctctcttctccctgccgtcattggtctaaagtcaaagtttcttaaaaagcccgaccagttgaggaagctcttcattckgagggttygagctttgaaacaactcgatgagagcctcgaggagccattttcgaggcaatgggggaaacgcthcacggactctgtggtaatgagagatccaaacaccaagcgctccagggggctttgggtttgtcacatatgccacttgtggaggaggtggatgcagcctatgaatgcaaggccacacaaggtggaatggaaggagttgttggaaccaaagagagcttgtctccagagaagattctcaaagaccagggtgcccacattaacttgtgaaaaagatatttgttggtggcattaaagaagacacctgaagaacatcacctaagagattattttgaacagtatggaaaaattgaagtgattgaaatcatgactgacccgaggcagtggcaagaaaaggggctttgccttttgtaacctttgaccgaccatgacctccgtggataagattgtcattccagaaataccatactgtgaatgggccacaacctgtgaagtttagaaaagccctgtcaaaagcaagaagatggctagtgcttcatccaagccaaaggagggtcgaagtgggttctgggaaacttttggtggtgggtcgtgggaggtgggtttcggtgggaatggacaacttcggtcgtgggaggaaacttcagttggtccgtggtggcctttggtggcagccgtggttggtggtggatatggttggcagtggggatggcctataatggatttggtaatgatggaaagcaattttgggaggtggtggaaagctacaatgattttggggaattacaacaatcaagtcttcaaattttggacccatgaagggagggaaattttggaaggcagaagctctggcccctatgggcggtggaggccaatacttttgctaaaccccgaaaaccaaggtggctatggcggttccagcagcagcaagtaactattggcagtggcagaagattttaatttaggaaaccaaagcttagcaggaagaggagagccagagaagttgacagggaagctacaggtttacaacagatttgtgaactcagcctaagcacagtggtggcagggcctagcctgctacaaagaagacatgttttagacaaatactccatggtgtaatgggcaaaaaactccgaggactgtatttgtgactaattgtataacaggttattttagtttcctgttcctgtggaaagtgtaaagcattcccaccaaagggttttaatgtagattttttttttttgcaccccatgctgttgattgctaaatgtaacagtctgatcgtgacgctgaataaatgtcttttttttaatgtgctgtgtaaagttagtctactcttaagccatcttggtaaatttccccaacagtgtgaagttagaattccttcagggtgatgccaggttctatttggaatttatatacaacctgcttgggtggagaagccattgtcttcggaaaccttggtgtagttgaactgatagttactgttgtgacctgaagttcaccattaaaagggattacccaagcaaaatcatggaatggttataaaagtgattgttggcacatcctatgcaatatatctaaattgaataatggtaccagataaaattatagatgggaatgaagcttgtgtatccattatcatgtgtaatcaataaacgatttaattctcttg

SEQ ID NO: 4256 - DNA, 922 bp, Homo sapiens
  SIMILAR (256)..(738): 531254mologous to Homo sapiens putative p150,accession number U93563,Smith-Waterman Score=427.
gacccaggagacaccccaaatactgcaagtgcccccaactgcagaagtgggaaagggagatcctcctctcctgaacacatacccccactggagaaactggaggactctatgcagacaaaccccagtaccaacccagagcctggtagacttgctgagtggctagacccagaagagagacaacaatcactgcagtttggcttacaagaagccacatccataggaaaaggaggacagtactacatcaagggaacaccccatgggacaaaagaatctgaacaacagccttcagccctagatcttccctctgacagagcctacccaaatgagaaggaaccagaaaaccaactctggaggttagttattaagcttatcaaggaggcaccagagaaaggggcatatctcaatgtaataaaagccgtctatgacaaacccacgaatggggaaaagttgagagcattccctctgagaactggaacaaaacacagatgcccactctcaccactcctcttcaacatattactggaagtcctagccagagcaatcagacaagagaaagaaataaagagcatccaaattggtaaagaggaagtcaaactctcactgtttgctgatgatataatcatttaccttgaaagccctaaatactcctccagaaagctccaagaactgataaaagaattcagcaaagtttccagatatgagattaatgtacacaaatcagtagcactgctgtacactcaacagtaaccaagctgagaatcaaatcaagaactcagcctcttttacaatagctgcaaaaaataaaataaaatacttaggaatatacctaaccaaggatgcaaaagacggctacaaggaaaactacaaaacactgatgaaagaaattatagatgacaaaaacaaacagaaatacatcccatga

SEQ ID NO: 4257 - DNA, 1197 bp, Homo sapiens
  SIMILAR (1)..(771): 871254mologous to Homo sapiens putative p150,accession number U93563,Smith-Waterman Score=1144.
atgggagactttaacaccccactgtcaactttagacagatcaacaagacagaaagtcaacaagcatacccaggaacttaactcagctctgcaccaagcggacctaatagacatctacagaactctccaccccaaatcaacagaatatacatttttttcagcaccacaccacacctactccaaaattgaccacatagttggaagtaaagcactcctcagcaaatataaaagaacagaaattgtaacaaactgtctctcagaccacagtgcaatcaaactagaactcaggattaagaatctcactcaaaaccgctcaactacatggaaactgaacaacctgctcctgaatgactactgggtacataacgaaatgaaggcagaaataaagatgttctttgaaaccaacgagaacaaagacacaacataccagagtctctgggacacattcaaagcagtgtgtagagggaaatttatagcactaaatgcccacaagagaaagcaggaaagatccaaaattgacaccctaacatcacaattaaaagaactagaaaagcaagagcaaacacattcaaaagctagcagaaggcaagaaataactaaaatcagagtagaactgaaggaaatagagacacaaaaaacccttcaaaaaattaacgaatccaggagctggttttttgaaaggatccacaaaattgaaatacgaactgccatcagagaatactacaaacacctctatgcaaataaactagaaaatctagaagaaatggataaattcctggacacatacactctcccaagactaaaccaggaagaagttgaatctctgaatagaccaaaaacaggagctgaaattgtggcaataatcaatagcttaccaacgaaaaagagtgcaggaccagatggactcacaaccgaattctaccagaggtacaaggaggaatttgtaccattccttctgaaactattccaatcaatagaaaaagagggaatcctccctaactcattttatgaggccagcatcatcctgataccaaagcctggcagagacacaaccaaaaaagagaattttagaccaatatccttgatgaacattgatgtaaaaatcctcaataaaatactggcaaaccgaatccagcagcacatcaaaaagcttatccaccatgatcaagtgggcttcatccctgggatgcaaggctag

SEQ ID NO: 4258 - DNA, 1834 bp, Homo sapiens
  SIMILAR (879)..(1832): 921254mologous to Homo sapiens putative p150,accession number U93563,Smith-Waterman Score=1506.
aacgaaaactaacaaacaggaaggacatccacatcaaaaacccatctgtatgtcaccatcatcaaagaccaaaggtagataaaaccacaaagatggggaaaaaacagagcagaaaaactggaaactctaaaaatcagagcacatctcctactctaaaggaaagcagctcctcaccagcaacagaacaaagctggacagagaatgactttgacgagttgagagaagaaggcttcagaagatcagactactccgagctacaggaggaagttcaaaacaatggcaaagaagttaaaaactttggaaaaaaattagatgaatggataactagaataaccaatgcaaagaagtccttaaaggacctgatggagctgaaaaccaaggcacgagaactatgtgatgaacgcacaagcctcagtagccaatgcaatcaactggaagaaagggtatcagtgatggaagatgaaatgaatgaaataaagcaagaagagaagtttagagaaaaaagaataaaaagaaacgaacaaagcctccaagaaatatgggactatatgaaaagaccaaatctacgtctgattggtgtacctgaaagtgacggggagaatggaaccaagttggaaaacactctgcaggatattatccaggagaacttccccaatctagcaaggcaggccaacattcaaattcaggaaatacagagaacgccacaaagatactccttgagaagagcaaccccaagacacataattgtcagattcaccaaagttgaaatgaaggaaaaaatgttaagggtagccagagagaagggtcgggttacccacaaagggaagcctgtcagactaacagctgatctcttggcagaaactctacaagccagaagacaagacacacataggctcaaaataaagggatggaggaagatttaccaagcaaatggaaaacagaaaaaggcaggggttgcaatcctagtctcagataaaacagaatttaaaccaacaaagatcaaaagagacaaagaaggccattacataatggtaaagggatcaattcaacaagaagagctaactatcctaaatatatatgcacccaatacaggagcacccagattcacaaagcaagtccttagagacctacaaagagacttagactccaacacaataataacgggagactttaacaccccactgtcaacattagacagatcaatgagacagaaagttaacaaggatatccaggaattgaactcagctctgcaccaagcagacctaatagacatctacagaactctccaccccaaatcaacagaaaatacattcttttcggcaccacaccacacctattccaaaattgaccacatagtgggaagtaaagcactcctcagcaaatgtaaaagaaaagaaattataacaaactgtctctcagaccacagtgcaatcaaactagaactcaggattaagaaactccctcaaaactgctcaactatatggaaactgaacaacctgctcctgaatgactactgggtacataacgaaatgaaggcagaaataaagatgttgtttgaaaccaatgagaacaaagacacaacataccagaatctctgggacacattgaaagcagtgtgtagagggaaatttatagcactaaatgcccacgggagaaaacaggaaagatctaaaattgacaccctaacatcacaattaaaagaactagcaaagcaagagcaaacacattcaaaagctagcagaaggcaagaaataactaagatcagagcagaactgaaggaaatagagacacaaaaaacccttcaaaaaattaatgaatccaggagctggttttt

SEQ ID NO: 4259 - DNA, 502 bp, Homo sapiens
  SIMILAR (348)..(497): 901254mologous to Homo sapiens lamin-like protein,accession number M24732,Smith-Waterman Score=216.
gctattctgtacctcatttccgatttttgtcagtttcctttttttttatctataaatttgttccgaccacgaggcatccctggtgtctctctaaatctgctgtgattctgggggctgccggattcggcaaattgtttgttgctcaatcaaaactcctttaaatttaattcaactgaagtttcttttaacaagtacaagatcatcattattttttgccaacccttataattgatccctctatctttagtccttttatttattttcttactcaattactgaaataaagaggagaaatgaactctagaggcagaaataatctcagcatcataaataaaaccgatttcccttttatagcactaaatgcccacaagagaaagcaggaaagatctaaaatcggcaacctaacatcacaattaaaagaactagagaagcaagagcaaacaaattcaaaagctagcagaaggcaagaaataactaagatcagagcagaactgaagacaca

SEQ ID NO: 4260 - DNA, 2433 bp, Homo sapiens
  SIMILAR (2433)..(1720): 931254mologous to Homo sapiens p40,accession number U93569,Smith-Waterman Score=1120.
tagcccttttctgcatctattgagataatcatgtggttttgtctttggctctgttaatatgctggattacatttattgatttgcgtatattgaaccagccttgcatcccagggatgaagcccacttgatcatggtggataagcttttcgatgtgctgctggattcgttttgccagtattttattgaggatttttgcatcaatgttcatcaaggatattggtctaaaattctcttttttggttgtgtctctgcctggctttggtatccaggatgatacttgccctcataaaatgaattagggaggattccctctttttgtattgattggaatagtttcagaaggaatggtaccagctcctgcttgtacctctgggagaagttggctgtgaaatccgtctggtcctggactttttttggttggttaggctattagttattgcctcaatttcagagcctgttattggtctattcagagattcaacttcttcctggtttagtcttgggagggtgtatgtgtccaggaatttatccatttcttctagattttctagtttatttgcatagaggtgtttatagtattctctgatggtagtttgtatttctgtgggatcagtggtgatatcccaatttatcgttttttattgcgtctatttgattcttctctcttttcttctttattagtcttgctagcggtttatcaattttgttgatcttttcaaaaataaaaaataaaaaaccagctcctggattcattgattttttttgaagggtttttttttgtgtctctatctccttcagttctgctctgatcttagttatttcttgccttctgctagcttttgaatgtgtttgtttgctctttgcttctctagttcttttaattgtgatgttagggtgtcaattttagatactttcctgctttcctcttgtgggcatttagggcttataaatttccctctacacactggctttgaatgtgtccccagaagattctggttatgttggtgtctttttttctcattgggtttcaaagaacatctttctttatttctgccttcatttccgttatggtacccagtaggtcattccaggaggcaggttgctcagtttccatgtagctgagctggttttgagtgagtttcttaatcctgagttctagtttgattggcactgtgggtctgagagatagtttggttataatttctgttcttttacatttgctgaggagtgctttacttccaactatgaggttaattttggaataggtgtggtgtgggtgctgaaaagaatgtatattctgttgatttagggtggagagttctgtagaagtctattaggtctgcttggtgcagagctgagttcaatttcctggatatccttgttaactttctgtcttggtgatctgtctaatgttgacagtggggtgttaaagtctcccattattattgcgtaggagtctaagtctcttcgtaggtctctaaggacttgctttatgaatctgggtgctcctgtattgggtgcatatatatttaggacagttagctcttcttgttgaattgatccctttaccattatgtaatggccttctttgtcttttttgatctttgttggtttaaagtctgttttatctgagactaggattgcaacccctgcatttgtttgttttccatttgcttggtagatcttcctccatccctttattttgagcctatgtgtgtctcggtttttcctttccatgtttagtgcttccttcaggagctcttgtagggcaggcctggtggtgacaaaatctgtcagcatttgcttgtctgtaaaggattttatttctccttcacttatgaagcttagtttggctggatatgaaattctgggttgaaaattcttttctttaagaatgttgaatattggcccccactctcttctggcttgtagagtttctgccgagagatccactgttagtctgatgggcttccctttatgggtaacccaacctttctctctggctgcccttaacattttttccttcatttcaactttggtgaatctgacaattatgtgtcttggagttgctcttctcgaggagtatctttgtggcgttctctgtatttcctgaatctgaatgttggcctgccttgctagattggggaagttctcctggataatatcctgcagagtgttttccaacttggttccattctccccgtcactttcatgtacaccagtcagacgtagatttggtcttttcacatagtcccatatttcttggaggctttgttcatttctttttattcttttttctctaaacttcccttctcgcttcatttcattcatttcatcttccatcactgatacactttcttccagttgattgcatcggctcctgaggcttctgcattcttcacgtagttcttgagccttggctttcagctccat

SEQ ID NO: 4261 - DNA, 354 bp, Homo sapiens
  SIMILAR (139)..(354): 841254mologous to Mus musculus Pro-Pol-dUTPase polyprotein,accession number Y12713,Smith-Waterman Score=346.
gagaaggctctgcaacaggtccaggctgctgtgcaagctgttctgccacttgggccatatgatccagcagatccaatggtgcttgaggtgccagtagcagatagggatgctgtttggagcctttgccaggcccccatagccacccctgtcattgcccaatgggcccatgaacaaagtggccatggtggcagggatggaggttacacatgggctcagcaacatggacttccatcctccaaggctaaactggctacggccactgctgagtgcccaatttgccagcagcagagagcaacactgagccctcgatgtggcaccattcctcggggtgatcagccagctacctggtggcag

SEQ ID NO: 4262 - DNA, 1185 bp, Homo sapiens
  SIMILAR (1033)..(1182): 941254mologous to Mus musculus Pro-Pol-dUTPase polyprotein,accession number Y12713,Smith-Waterman Score=246.
atgggagaagagcgtagatggaggcccagcagcaacgggaagcatggtgcatttgcggaactggacaaaggctggttggtgtggctggaaggaaaaggtgtaattggggcaagaagaagctggagagcacacagtgccctgataaaaatatgtgttcaacagataaaggactcccttcctggtaaaatgagtaagggactcttacaacagcaacaaaaacctaagcacctgctccatgatctgtataaggcaatgagcaccagatggggagtgcagaaagccaggctcaactgcacagctttgccaccaactggctgtgtgactttggacccatcgttcctcactgagcctcagtttccccggcagctgtcagaagacctgcttctcacgcgtgaggccctggagaaggaggtgcagctgcggcgacagctccagcaggagaaggaggagctgttgtaccgggtccttggggccaatgcctcgcctgccttccctctggcccctgtcactcccactgaggtggagaaggaaagggagctagagcttcgagacagactggatgagcagcaaagggtcctggaaggaaagaatgaagaggccctgcaagaccctagattggtagatccactgacatcttgcactgtgcactttgaaaagccacagatgctcaacgccagactatggaagcatgcagggagggaggctgtagcctgcaaagtcagagggtcagagctgcccaagacaatgggaacctaccccttgcatcagcatgacctggatgtgagacatggagtcaaaggagatcattttggagctttaagatttgattgccctgctggattttggacttgcatggggcctttagccccttcattttggccaatttctcccatttggaatggaccaccacttgatatcagcggataccctgccacttctacacagaagtccactatgtgtctgaggatcattgatactcgactgcatccagagagtcgactcaagcagcagtcaaactttgcactgaacgctagggagaaggctctgcaacaggtccaggctgctgtgcaagctgctctgccacttgggccctatgacccagcagatccaatggtacttgaggtgtcactggcagatagggatgctgtttggagcctttggcaggcccccttaggtgaatcatag

SEQ ID NO: 4263 - DNA, 1995 bp, Homo sapiens
  SIMILAR (1266)..(1370): 681254mologous to Mus musculus Pro-Pol-dUTPase polyprotein,accession number Y12713,Smith-Waterman Score=132.
atggattgtgattcctgtgatggatctgggaaaagctggatgcttcctgtcctcaaacatcagactccaggttcttcagtttcgaaattcagactggctctccttgctcctcagtctgaagacagcctattgtgggaccttgtgatcatatctaacatgggaactgcagtcactgaacttcaaaatttaaatacaatgggaatgattggatcccaaagtggcagtggccaagttgcagcactcaactgtcaaaagcaaggtgggcgtagctaccataatagacagcagaggcaaagcagcaatcagaatagtctgactcaggagacctctggctttttacctgagcacatttgcattggaaagggaaatgatcagacatttcggggactactagacactggctctgagctgatgttgattccagtggatgcaaaatatcattgtggtcccccagttaaaatccaacttacaatgggtccagtgggtccccagtctcctcctgtggtcatttatccagtgccagaatgcataattggcatagacatacttagcagctggcagaacccaccccccgttggcttcctgactgggagagtgagggctattatgatgggaaaggccaaatggaggccattagaggtgtctctacctagaaagatagtaaatcaaaaacaatatcacatccatggagggaccgtggagattagtgtcaccttcaaggagttgaaagatgcaggagtagtgattcccaccatattcctgtttaactctcccatttggcctgtgcagaagacagatggaacttgtggatcttggagaatgacagtggattattgtaagcttaaccaagtggtgactccgacagtagctgccgtattagatgtggtttcattgcttgagcaaatttacacatctcctggtacctggtatgtagccaatgacttgacaaatgcctttttctccattactgttcataaggcccaccagaagcaatctgccttcagctggcaaggccagcaatatacctttaccgtcctacctcaggggatgagtttggtgcatttggcgcctcctacgaccaagaaagaggcacaatgcctagtgggcctgtttggattttggggcaacacatttctcatttggaagaaggctctgcaactggtccaggctgctatgcaagctgctctgccacttgggccatatgacccagcagatccaatggtgtttgaagtatcagtggcagattgggatgctgtttggagcctttggcagggtcccatagccacaaagtgggtcatgcacagcaccattccttcatcacatggaagtggtatacacgtgattggtctcgagcaggtcctgaaggcacaaggagttccctatgatcagttgacagaggaagagaagactagggcctggttcacagatggttctgcacgatatgcaggcaccatccgaaggtggacagctgcagcactacagcccctttctaggacatccctgaaggagagcggtgaagggaaatcttcccagtgggcagaagttcgagcagtgcaccttgttgtgcattttacatggaaggagaaatggccagatctgatggtttggctggatgatcaaggacttggaagaagcatgattggaaaattggtgacaaataaatttggggaagagatgtgtggatggacctctctgagtgagtggccaaaaactgtgaaaatattggtatcccgtgtgagtgctcaccaacgggtgacctcagcagaggagaattttaataatcaggtggatgagataagccattctgtggacaccactcagcctctttccccagccacccctgtcattgcccaatgggcccatgaacaaagtggccatggtggcagagatagaggttacgaatgggctcagcaacatgtacttccactcaccaaggctgacctggctacagccactgctgatgcccaatttgccagcagcagagaccaacaatga

SEQ ID NO: 4264 - DNA, 1518 bp, Homo sapiens
  SIMILAR (223)..(939): 761254mologous to Mus musculus Pro-Pol-dUTPase polyprotein,accession number Y12713,Smith-Waterman Score=953.
atggttaatactgagcgtcaacttgattggattgaaagatgccaagtattgatcttagctttatctgaggagataaaccctgagctgcctgaggcaattgtgatggcctcctctgaggtagttaccaggcaagataatattgattctcctcaggagccacccccaacacccctgtttgcttctagacctgtaactagactaaagtcctggcgagcccctagagtgcgtccagtgggtccccggactcatcctgtggtcatttccccagtgccagaatgcataattagcatagacatacttcgaagctggcagaacccccacattggcaccctgactggtagggtgagggctgttatggtgagaaaggccaaatggaagccattagagctgtctctacctagaaaaatagtaaaccaaaaacaatattgtgtccctggagggattgtggagattagtgccaccaccaaggacttgaaagatgcaaaggtggtgattcccaccatatccctgttcaactatcctatttggcttgtgcagaagaatgatggatcttggagaatggcagtggattatcataagcttacccaaggggtgactccaattgcagctgctgtaccaaatgtgatttcattgcttgagcaaattaacacatcttctggtacctggtatgcagccatttacttggtaaatgtctttttctccattcctgtccataaggccctcaagaaacaatttgccttcagctggcaaggtcaaccatatacctttaccattctaccttgggggcatatcaactctccgactttgtgttataatctcatttggagagaacttgatcacttttcgcttccacaagatatcacactggttcattacattgatgacattatgctaattggatccagtgagcaagaagtagcaaacacactggacttattggagaaggctctgcaacaggtccaggctgctgtgcaagctgctctaccacttgggccatatgacccagcagatccagtggtgcttgaggtgtcagtggcagatagggatactgtttggagcctatgctcctgctgctacactccctggtttgggacactttctcatgtcagcaatttgcaaacctggagcccatgtccccctccagtgtccccagtggggtcccagagacctcagctgtcacgtgagaaaaacaaaaatactaaacgtattcattccatccccgaagtattaattatgaaaccatatttcacagctgttgctaaaccatctctgctttcccataagtggctccctttagaaaaaccagaaaatccttgctgttattcctcagatcacagaacagcagtccccaacctgctcctttatcgacggagcaccaggagaaaaacagagctcactaacaaggaactcacttcggcacacttcactggagacttacccaggcgagctgtgtgggttttaggagacagaacagcagtccgtccttcactggagcaaggcatggcattgtggatttga

SEQ ID NO: 4265 - DNA, 918 bp, Homo sapiens
  SIMILAR (460)..(894): 661254mologous to Mus musculus Pro-Pol-dUTPase polyprotein,accession number Y12713,Smith-Waterman Score=488.
atgtgtccagtgggtccctggactcatcctgtggtcatttccccagtgtcagaatgcatagttggcatagacatacttggcagctggcagaacctccatattggctccctgactgatatcacaatggtccattacattgatgacatgatgctgattggatccagtgagcaagaagtagcaaactcactggacttattggtgagacatttgcatgctagaggatgcaaaataaatccgactaaaattcagggaacttctacctcagtaaaatttttagagttccagtggtgtggggtctgtcaagatattccttctaagtgggttctagaacagaaggctctgcaacaggtccaggctgctgtgcaagctgctctgccacttgagccatatgacccagcagatccaatggtgcttgaggtgtcagtggcagatggggttgctgtttggagcctttggcaggccccgatagccaggattcacgggtccaggaatcaaggggtggaagtggaagtgtcaccactcaccaatatccctagtgatccactagcaaaatttttgtttcctgctccctcaacattatgttctgctggcctagagttattagttccagagggaggaaccctgctaccaggaaacacaacaatgattccattaaattggaagttaagattggtacctggatactttgggctcctcctagctttaagtccacaggctaagaatggagtcacagtgttggctgaggtgattgacccagactatcaagatgaaatcactctactattccacaacggaggtggggaagagtatgcacggaatacaggagatccattaaggcatctcttagtattaccaagccctatgattaaggtcaatgggaaaactacaacaccccaatccaggcaggactacaaatga

SEQ ID NO: 4266 - DNA, 1599 bp, Homo sapiens
  SIMILAR (1557)..(1598): 641254mologous to Homo sapiens putative p150,accession number U93563,Smith-Waterman Score=55.
atgaaggcagaaataaagatgttctttgaaaccaatgagaacaaagagacaacataccagaatctctgggacacatttaaagcagtgtgtagagggaaatttatagcactaaatgctcacaggagaaagcaggaaagatctaaagttggcaccctaacatcacaattgaaagaactagagaagcaagagcaaacaaattcaaaagctagcagaaggcaagaaataactaagatcagagcagaactggaggagacagagacacaaaaaacccttccaaaaatcaatgaatccaggagctggttttttgaaaagatcaacaaaattgatagaccgctagcaagaccaataaagaaaagagagaagaatcaaatggaagcaataaaaaatgataaaggggatatcaccacagatcccacagaaatacgaactaccatcagagaatactataaacacctctacacaaataaactagaaagtctagaagaaatggataaattcctcgacacctacaccctcccaagactaaaacaggaagaagttgaatctctgattagaccagtaacaggctctgaaattgaggcaataattaatagcttaccaaccaaaaaaagtccaggaccagacggattcacagccgaattcttccagaggtacaaggaggagctgaggataaaatacctaggaatccaacttacaagggatatgaaggacctcttcaaggagcactataaaccactgctcaatgaaataaaagaggacacaaacaaatggaagaacattccatgctcatggataggaagaatcaatatcatgaaaatggccatactgcccaaggtaatttatagattcaatgccatccccttcgagctaccaatgactttcttcacagacttggaaaaaactactttaaagttcatatggaaccaaaaaagagcccacattgccaagtcaatcctaagccaaaagaacaaagctggaggcatcacgctacctgacttcaaactatgctacaaggctacagtaaccaaaacagcatggtactggtaccaaaacagagatatagaccaatggaacagaacagagccctcagaaataataccacacatctacaactatctgaactttgacaaacctgacaaaaacaagaaatggggaaaggattccctattcaacaaatggtgctgggaaaactggctagccatatgtagaaagctgaaactggatcccttccttacaccttatacaaaaattaattcaagatggagtaaagacttacatgttagacctaaaaccataaaaaccctagaagaaaacctaggcaataccattcaggacataggcatgggcaaggacttcatgactaaaacaccaaaagcaatggcaacaaaagccaaagttgacgaatgggatctaattaaactaaagagcttctgcacagcaaaagaaactaccatcagagtgaacaggcaacctacagaatgggagaaaatttttccaatctactcatctgacaaagggcttatatccagaatctacaaagaactcaaacaaatttgcaagaaaaaaacaaccccatcaacaagtgggcaaaggatatga

SEQ ID NO: 4267 - DNA, 1569 bp, Homo sapiens
  SIMILAR (381)..(431): 761254mologous to Homo sapiens putative p150,accession number U93572,Smith-Waterman Score=74.
atggataaattcctggacacatacactctcccaagactaaaccaggaagaagttgaatctctgaatagaccaataacaggctctgaaattgtggcaataatcaatagcttaccaaccaaaaagagtccaggaccagatggattcacagccgaattctaccagacgtacaaggaggaactggtaccattccttctgaaactattccaatcaacagagaaagagggaatcctccctagctcattttatgaggccagcatcatcctgataccaaagccgggcagagacacaaccgaaaaagagaattttagaccaatatccttgatgagcattgacgcaaaaatcttcaataaaatactggcaaaccgaatccagcagcacatcaaaaagctttccaccatgatcaagtgggcttcaaccctgggatgcaaggctgtgttggaagttctggccaggacaatcaggcaggagaaagaaataaagggtattcaattaggaaaagaggaagtcaaattgtccctgtttgtagatgacatgattgtatatctagaaaaccccatcgtctcagcccaaaatctcctcaagctgataagcaacttcagcaaagtctcaggatacaaaatcaatgtacaaaaatcacaagcattcttatacaccaacaacagacaaacagagagccaaatcatgagtgaactcccattcacaattgcttcaaagagaataaaatacctaggaatccaacttacaagggatgtgaaggacttcttcaaggagaactacaaaccactgctcaacgaaataaaagaggatacaaagaaatggaagaacattccatgctcatggataggaagaatcaatatcataaaaatggccatactgcccaaggtaatttatagattcaatgccatccccatcaagctaccaatgactttcttcacagaactggaaaaaactactttaaagttcatatggaaccaaaaaagagcccacatcgccaagtcaatcctaagccaaaagaacaaagctggaggcatcacgctacctgacttcaaactatactacaaggctacaataaccaaaacagcatggtactggtaccaaaacagagatatagatcaatggaacagaacagagccctcagaaataatgccgcatagctacaactatctgatctttgacaaacctgagaaaaacaagcaatggggaaaggattccctatttaataaatggtgctgggaaaactggctagccatatgtagacagctgaaactggatcccttccttacaccttatacaaaaattaattcaagatggattaaagacttaaatgttagacctaaaagcataaaaaccctagaagaaaacctaggcattaccattcaggacataggcatgggcaaggacttcatgtctaaaacaccaaaagcaatggcaacaaaagccaaaactgacaaatgggatctaattaaactaaagagcttctgcacagcaaaagaaactaccatcagagtgaacaggcaacctacaaaatgcagaaaattttcgcaacctactcatctgacaaatggctaa

SEQ ID NO: 4268 - DNA, 422 bp, Homo sapiens
  SIMILAR (2)..(58): 841254mologous to Homo sapiens cell death regulator aven,accession number AF283508,Smith-Waterman Score=85.
cgatgcagagacctatggagaagagaatgatgaacagggaaattatttctaaaagaaagattgtctgtaactgggagcgatatctagatattgaaaaagaggccaataatgaaagtggagagtcacagaggggaacagatttcagtgtcctccttagctctgcaggggactcattctcacagttccggtttgctgaggagaaagaatgggatagtgaagcttcttgtccaaaacagaattcaccattttatgtggatagtgagttattggttcgagcccttcaagagctgcctctctgcctccgactcaacgttgctgccgaactggtccagggtacagttcctttagaggttcctcaggtgaaaccaaagagaactgatgatggcaagggattatggatgcagttaaaggggcccttgggg

SEQ ID NO: 4269 - DNA, 1092 bp, Homo sapiens
  SIMILAR (328)..(1089): 931254mologous to Homo sapiens putative p150,accession number U93564,Smith-Waterman Score=1224.
atgctgaagctatctaagggtccccagctaccagtcatctcactggcatacaaaagacactcctgtcactggagattccaggtatttcaaggagctgtgttccaaggaccagggatgaagaccaaatacttattattaccacacctgtgttatagatcctgtattgtaattggctgcatgcctcccatcaaccgctccactgtaccagcatggtcacaggaaggtagaacaccaagcaggctcctggggtccccgactccaggacttgacttctggatggcatttctggacctgccctgggtcagaggggagcccactgccctgaaggtgctggaagttctgaccagggcaatcaggcaggagaaggaaataaagggtattcaattaggaaaacaggaagtcaaattgtccctgtttgcagatgacatgattgtatatctagaaaactccatcgtctcaacccaaaatctccttaagctgataggcaacttcagcgaagtctcaggatacaaaatcaatgtgcaaaaatcacaagcattcttatacaccaataacagacaaacagagagccaaatcatgagtgaactcccattcacaattgcttcaaagagaataaaatacctaggaatccaacttacaagggacatgaaggacctcttcaaggagaactacaaaccactgctcaacgaaataaaagaggatacaaacaaatggaagaacattccatgctcatgggtaggaagaatcaatatcttgaaaatggccatactgcccaaggtaattcatagattcaatgccatccccatcaagctaccaatgactttcttcacagaactggaaaaaacaactttaaagttcatatggaaccaaaaaagagcccacattgccaagtcaatcctaagccaaaagaacaaagctggaggcatcacgctacctgacttcaaactatactacaaggctgtaaccaaaacagcatggtactggtaccaaaacagagatatagaccaagggaacagaacagagccctcagaaataatgccgcatatctacaactatctgatctttgacaaacttgacaaaaacaagaaatag

SEQ ID NO: 4270 - DNA, 549 bp, Homo sapiens
  SIMILAR (480)..(548): 821254mologous to Homo sapiens putative p150,accession number U93574,Smith-Waterman Score=117.
gttgaagatgacagcgatgcagagacctatggagaagagaatgatgaacagggaaattattctaaaagaaagattgtctctaactgggatcgatatcaagatattgaaaaagaggtcaataatgaaagtggagagtcacagaggggaacagatttcagtgtcctccttagctctgcagagaataaaatacctaggaatccaaattacaagggatgtgaaggacctcttcaaggagaactacaaaccactgctcaacaaactaaaagaggacacaaacaaatggaggaacgttccatgcccacgggtaggaagaatcagtattgtgaaaatggccatactgcccaagaattaaaaaaaaaaactactttaaagttcatatggaaccaaaaaagagcccacattgccaagacaattctaagtaaaaagaacaaagctggaggcatcacgctacctgacttcaaactatactacaaggctaccaaacagcatggtgctggtaccaaaacagagatacagaccaatggaacagaacaaagccctcagaaataa

SEQ ID NO: 4271 - DNA, 3039 bp, Homo sapiens
  SIMILAR (478)..(1728): 871254mologous to Homo sapiens putative p150,accession number U93563,Smith-Waterman Score=1922.
atgggagactttaacaccccactgtcaacattagacagatcaacgcgacagaaagttaacaaggatatccagaaatggaactcagctctgcaccaagtggacctaatagacatctacagaactctccaccccaaatcaacagaatatacattcttctcaacactacatcacacttattccaaaattgaccacatagttggaaaaatacaaattcccatcagggaatactataaacacctctacgcaagtaaactagaaaatctagaagaaacggataaattcctggacacatacaccctcccaagactaaaccaggaagaagttgaatccctgaatagaccaatagcaggttctgaaattgaggcaataattaatagcctaccaaccaaaaaaagtccaggaccagatggattcacagccgaattctaccagagtgttggaagttctggccagggcaatcaggcaggagaaagaaataaagggtattcaattaggaaaaaggaagtcaaattgtccatgtttgcagatgacattactgcatatttagaaaaccccatcgtctcagccccaaatctccttaagctgataagcaacttcagcaaatctcaggatacaaaatcaatgtgcaaaaatcacaagcattcctctacaccaataagagacaaacagagccaaatcatgagtgaactcccattcacagttgcttcaaagagaataaaatacctaggaatcaaacttagaagggatgtgaaggacctcttcaaggagaactacaaaccactgctcaatgaaataaaagaggacacaaacaaatggaagaacattccatgctcatggataggaagaatcaatattgtgaaaatgaccatactgcccaaggtaatttatagattcaatgccatccccatcaagctaccaatgactttctttgcagaattggaaaaaactactttaaagttcatatggaatcaaaaaagagcccacattgccaagacaatcctaagccaaaagaacaaagctggaggcatcatgctacctgacttcaaactatactacaaggctacagtcaccaaaacagcatggtactggtaccaaaacagagatatagaccaatggaacagaatagagccctcagaaataataccacacatctgtaagcatctaatctttgacaaacctgacaaaaacaagaaatggggaaaggattccctatttaataaatggtgctgggaaaactggctagccatatgtagaaagctgcatctggaccccttccttacaccttatacgaagattaattcaagatggattaaagacttaaatgttagacataaaaccataaaaaccctagaagaaaacctaggcaataccattcaggacataggcatgggcaaggacttcatgactaaaacaccaaaagcaatggcaacaaaagccaaaattgacaaatgggatctaattaaactaaagagcttctgcacagcaaaagaaactaccatcagagtgaacaggcaacctacagaatgggagaaaattttcgcaacctactcatctgacaaagggctaatatccagaatctacaatgaactcaaacaaatttacaagaaaaaaacaaacaaccccatcaaaaagtgggcgaaggacatgaacagacacttctcaaaagaagacatttatgcagccaaaaaacacatgaaaaaatgctcatcatcactggccatcagagaaacactgtataatgacagaaggataggaaagttgacacagacttgtgacgagactgccttccagccacatgtctgcacaatttcaaggcccatgctctctagcccttaccgctcctcgcttacagagaagtggtcccaagatttctccaaacctccttatcctttcctttttcataagggttacctaaaccccagagagcaagataaggaagttctgaccagggcaatcaggcaggagaaagaaagaaagggtattcaattaggaaaagaggaagtcaaattgtcgctgtttgcagatgacatgattgtatatttagaaaaccccatcgtctcagcccaaaacccccttaaggtggtaagcaacttcagcaaagtctcaggatacaaaatcagtgtgcaaaaatcacaagcattcttatacaccaataacagacaaacagagagccaaatcatgagtgaactcccattcacaattgcttcaaagagaataaaatacctaagaatccaacttacaagggatgtgaaggacctcttcaaggagaactgcaaaccactgctcaatgaaatagaagaggacacaaacaaatggaagaacattccatgctcatggataggaagaatcaatatcgtgaaaatggccatactgcccaaggtaatttatagattcaatgccatccccatcaagctaccaatgactttcttcacagtattggaaaaaacgactttaaagttcatatggaaccaaaaaagagcccacattgccaagacaatcctaagccaaaagaacaaagctggaggcatcacactacctgacttcaaactatactacaaggctacagtaaccaaaacagcatggtactggtaccaaaacagagatatagaccaatggaacagaacagagccctcagaaataataccacacatctacaaccatgtgatctttgacaaatctgacaaaaacaagaagtggggaaaagattccctatttaataaatggaagaggaaaagagacacaaagacagatacacaaggagaccatgatgaggcagaagcaagagatcacagtgatgcttctatgagccaagaaaatctaagaactgccagccatcaccagaagctaaaagagaagcctgaaacaaattctgcctcagagcctccaggaggaatcatcccgggagacatcttgatatcagatttccagcctccaaaacttcatcccggtgcttatgcaatgggctcagatgaagcagccatcgtggcagagatgcatgggtccaacggcaagagattcttttggcaaagggtgaattag

SEQ ID NO: 4272 - DNA, 1995 bp, Homo sapiens
  SIMILAR (1)..(1818): 881254mologous to Homo sapiens putative p150,accession number U93572,Smith-Waterman Score=2808.
atgaatattgatgcaaaaatcctcaataaaatactggcaaaccgaatccagcagcacatcaagaagcttatccaccatgatcaagtgggcttcatccctgagatgcaaggctgggtcaacatatgcaaatcaataaacataatccagcatataaacagaaccaaagacaaaaaccacatgattatctcaatagatgcagaaaaggcctttgacaaaattcaacaacgcttcatgctaaaaactctcaataaattaggtattgatgggacatatctcaaaataataagagctatctatgacaaacccacagccaatatcatactgaatgggcaaaaactggaagcattccctttgaaaactggcacaagacagggatgccctctctcaccactcctattcaacatagtgttggaagttctggccagggcaatcatgcaggagaaggaaataaagggtattcaattaggaaaagaggaagtcaaattgtccctgtttgcagatgacatgattgtatatttagaaaaccccatcgtctcagcccgaaatctccttaagctgataagcaacttcagcaaagtctcaggatacaaaatcaatgtgcaaaaatcacaaacattcctacacaccaataacaggcaaagagagagccaaatcatgagtgaactcccattcacaattgcttcaaagagaataaaatacctagaaatccaacttacaagggatgtgaaggacctcttcaaggagaactacaaaccactgctcaatgaaataaaagaggacacaagcaaatggaagaacattccatgcttatggataggaagaatcaatatcatgaaaatgtccatactgcccaaggtaattcataaattcaatgccatccccatcaagcgaccaattactttcttcacagaattggaagaaactactttaaagttcatatggaaccaaaaaagagcccgcattgccaagacaatcctaagcaaaaagaacaaagctggaggcatcacgctacctgacttcaaactatactacaaggctacagtagccaaaacagcatggtactggtaccaaaacagagatatagaccaatggaacagaacagagccctcagaaataataccacacatctgcaaccatctgatctttgacaaacctgacaaaaacaagaaatggggaaaggattccctgtttaataaatggtgctgggaaaactggctagccatatgtagaaagctaaaactggatcccttccttacacctcatacaaaaactaattcaagatggattaaaggcttaaatgttagacctaaaaccataaaaaccctacaagaaaacctaagctataccattcaggacataggcacgggcaaggacttcatgtctaaaacaccaaaagcaatggcaacaaaagccaacattgacaaatgggatctaattaaactaaagagcttctgcacagcaaaagaaactaccatcagagtgaacaggcaacctacagaatgggagaaaatttttgcaatctacccatctgacaaagggctaatatccagaatctacaatgaactcaaacaaatttacaagaaaaaaacaaacaaccccatcaaaaagtgggtgaaggatacgaacagacacttctcaaaagaagacatttatgcagccaaaagacacatgacaaaatgctcatcatcactggctgttagagaaatgcaaatcaaaaccacaatgagataccatctcacaccagttgaagaggtgagggcgggtgagatggccaagacaagaagatgccaaaatgtcaaaggtgccagtgaggaaggcatcagagctcttgctttgtttctcattaacctcactgtccatatggagggcaaccacattgatggagacattgaaattcaaaccaatagaagtcccttgcaagcccctggagaaatctgtgagtcttttactgctttgatggcaatgcaactgctcagtaaattgttttggagttga

SEQ ID NO: 4273 - DNA, 549 bp, Homo sapiens
  SIMILAR (3)..(548): 1001254mologous to Homo sapiens fatty acid coenzyme A ligase 5,accession number AB033899,Smith-Waterman Score=974.
ccgcggtgcctcgactccttaacaggatctacgataaggtacaaaatgaggccaagacacccttgaagaagttcttgttgaagctggctgtttccagtaaattcaaagagcttcaaaagggtatcatcaggcatgatagtttctgggacaagctcatctttgcaaagatccaggacagcctgggcggaagggttcgtgtaattgtcactggagctgcccccatgtccacttcagtcatgacattcttccgggcagcaatgggatgtcaggtgtatgaagcttatggtcaaacagaatgcacaggtggctgtacatttacattacctggggactggacatcaggtcacgttggggtgcccctggcttgcaattacgtgaagctggaagatgtggctgacatgaactactttacagtgaataatgaaggagaggtctgcatcaagggtacaaacgtgttcaaaggatacctgaaggaccctgagaagacacaggaagccctggacagtgatggctggcttcacacaggagacattggtcgctggctcccgg

SEQ ID NO: 4274 - DNA, 616 bp, Homo sapiens
  SIMILAR (3)..(68): 1001254mologous to Homo sapiens fatty acid coenzyme A ligase 5,accession number AB033920,Smith-Waterman Score=131.
atgaagcttatggtcaaacagaatgcacaggtggctgtacatttacattacctggggactggacatcagagtcaattcataaatatcttagaaatgtgcctggaattatcaccatgcaagagtttctcagctgattcagcacggtatgttctaggtcacgttggggtgcccctggcttgcaattacgtgaagctggaagatgtggctgacatgaactactttacagtgaataatgaaggagaggtctgcatcaagggtacaaacgtgttcaaaggatacctgaaggaccctgagaagacacaggaagccctgggacagtgatggctggcttcacacaggagacattggtcgctggctcccggatatagaaaatcacaatagacttattgtttgcaccttaacaaatacaagctggagaagccacaaaatcatagttttgaaaacctatcagaaagctgatgacacaaagacacctaaagaaactacattccagaacatcatgaacctttttcttaaagagaagagagccacagctgttctcattcgtggtggagtgggggaaacctccacagatctaagtaagaagaaaccagccaaacttctggcaaacttttaa

SEQ ID NO: 4275 - DNA, 498 bp, Homo sapiens
  SIMILAR (212)..(343): 521254mologous to Mus musculus endonuclease/reverse transcriptase,accession number AF016099,Smith-Waterman Score=126.
atgaaactggatcttcatctctcaccttatacaaaaatcaactcaagatggatcaaagacttaaatctaagacctgaaaccataaaaattctagaagatatcatcagaaaaactcttttagatattggcttaggcaaggattttatgatcaagaacccaaaagtaaatgcaacaaaaacgaaaataaataaatgggacctaattaaactgaaaaaacttctgcacagcaaaagaaataagcagcagagaaatcagagaacctacagagtgggagaaaatatttgcaaattctgcatccgacaaaggactaatatccagaatctacaaggaactcaaacaaatcagaagcactttacagcttctctttggcatatccgaattgccagcatcactattcttgggctttggggccattatgaaatcaaaaaaggcttctttgaatacaagtactgcaatactgagacagttgatctggtgattgacgtggccaccaagtga

SEQ ID NO: 4276 - DNA, 1125 bp, Homo sapiens
  SIMILAR (685)..(1113): 951254mologous to Leishmania major probable levansucrase precursor,accession number AL160371,Smith-Waterman Score=717.
atgtgccatgggattggtgcacagatcatcccatcacaccagaccgttcagctggatattacggcctttttaaagaccgtaaagaaaaataagcacaagttttatccggcctttattcacattcttgcccgcctgatgaatgctcatccggagttccgtatggcaatgaaagacgggtttattgagaatatgtttttcgtctcagccaatccctgggtgagtttcaccagttttgatttaaacgtggccaatatggacaacttcttcgcccctgttttcaccatgggcaaatattatacgcaaggcgacaaggtgctgatgccgctggcgattgggggtcctttagagtccccagacagggatgggggtcctctagagtcgactaacagggatgcaagcccagagtcttggagttgccggaagtccactccaagactggttgcctgggtatcagcagcaaaggtatttattcgcgataagctcatggagcggcgtaaccgtcgcacaggaaggacagagaaagcgcggatctgggaagtgacggacagaacggtcaggacctggattggggaggcggttgccgccgctgctgctgacggggggggctttagagtcgacctagcaaggcgttcaattcggaaggatcgaaacgccagatcgcaaaacccagtacatacagaaggagacatgaacatgaacatcaaaaaaattgtaaaacaagccacagttctgacttttacgactgcatttctggcaggaggagcgactcaagccttcgcgaaagaaaataaccaaaaagcatacaaagaaacgtacggcgtctctcatattacacgccatgatatgctgcagatccctaaacagcagcaaaacgaaaaataccaagtgcctcaattcgatcaatcaacgattaaaaatattgagtctgcaaaaggacttgatgtgtgggacagctggccgctgcaaaacgctgacggaacagtagctgaatacaacggctatcacgttgtgtttgctcttgcgggaagcccgaaagacgctgatgacacatcaatctacatgttttatcaaaaggtcggcgacaactcaatcgacaagctggaaaaacgcgggccgtgtctttaa

SEQ ID NO: 4277 - DNA, 1374 bp, Homo sapiens
  SIMILAR (1)..(672): 971254mologous to Cloning vector pZC320 SopA,accession number U26464,Smith-Waterman Score=1144.
atgaaactcatggaaacacttaaccagtgcataaacgctggtcatgaaatgacgaaggctatcgccattgcacagtttaatgatgacagcccggaagcgaggaaaatgggggggggctggagaataggtgaagcagcggatttagttggggtttcttctcaggctatcagagatgccgagaaagcagggcgactaccgcacccggatatggaaattcgaggacgggttgagcaacgtgttggttatacaattgaacaaattaatcatatgcgtgatgtgtttggtacgcgattgcgacgtgctgaagacgtatttccaccggtgatcggggttgctgcccataaaggtggcgtttacaaaacctcagtttctgttcatcttgctcaggatctggctctgaaggggctacgtgttttgctcgtggaaggtaacgacccccagggaacagcctcaatgtatcacggatgggtaccagatcttcatattcatgcagaagacactctcctgcctttctatcttggggaaaaggacgatgtcacttatgcaataaagcccacttgctggccggggcttgacattattccttcctgtctggctctgcaccgtattgaaactgagttaatgggcaaatttgatgaaagtaaactgcccaccgatccacacctgggactaccgtttttcgatatgcttcttgatctgctcaagaacgttgatcttaaagggggggagcctgatgtacgtattttgcttaccaaatacagcaatagtaatggctctcagtccccgtggatggaggagcaaattcgggatgcctggggaagcatggttctaaaaaatgttgtacgtgaaacggatgaagttggtaaagttctgacttttacgaggggagggctggcaggaggagcgactcaagccttcgcgaaagaaaaggaccaaaaagcatacaaagaaacgtacggcgtctctcatattacacgccatgatatgctgcagatccctaaacagcagcaaaacgaaaaataccaagtgcctcaattcgatcaatcaacgattaaaaatattgagtctgcaaaaggacttgatgtgtgggacagctggccgctgcaaaacgctgacggaacagtagctgaatacaacggctatcacgttgtgtttgctcttgcgggaagcccgaaagacgctgatgacacatcaatctacatgttttatcaaaaggtcggcgacaactcaatcgacagctggaaaaacgcgggccgtgtttttaaagacagcgataagttcgaagccaacgatccgatcctgaaagacaaaaccaagaatgggcccggtttgcaaccttttaatctgaaggaaaaatccgttattctacactga

SEQ ID NO: 4278 - DNA, 1296 bp, Homo sapiens
  SIMILAR (1)..(627): 991254mologous to Cloning vector pSacBII SacB,accession number U09128,Smith-Waterman Score=1117.
atgctgcagatccctaaacagcagcaaaacgaaaaataccaagtgcctcaattcgatcaatcaacgattaaaaatattgagtctgcaaaaggacttgatgtgtgggacagctggccgctgcaaaacgctgacggaacagtagctgaatacaacggctatcacgttgtgtttgctcttgcgggaagcccgaaagacgctgatgacacatcaatctacatgttttatcaaaaggtcggcgacaactcaatcgacagctggaaaaacgcgggccgtgtctttaaagacagcgataagttcgacgccaacgatccgatcctgaaagatcagacgcaagaatggtccggttctgcaacctttacatctgacggaaaaatccgtttattctacactgactattccggtaaacattacggcaaacaaagcctgacaacagcgcaggtaaatgtgtcaaaatctgatgacacactcaaaatcaacggagtggaagatcacaaaacgatttttgacggagacggaaaaacatatcagaacgttcagcagtttatcgatgaaggcaattatacatccggcgagaaccatacgctgagagaccctcactacgttgaagacaaaagccataaataccttgatgaacgagaatgtcagcaaacaatttctggaggcaaacgggcagtctgggaccacggtcccactcgtatcgtcggtctgattattagtctgggaccacgatcccactcgtgttgtcggtctgattatcggtctgggaccacggtcccacttgtattgtcgatcagactatcagccgataagttcgacgccaacgatccgatcctgaaagatcagacgcaagaatggtccggttctgcaacctttacatctgacggaaaaatccgtttattctacactgactattccggtaaacattacggcaaacaaagcctgacaacagcgcaggtaaatgtgtcaaaatctgatgacacactcaaaatcaacggagtggaagatcacaaaacgatttttgacggagacggaaaaacatatcagaacgttcagcagtttatcgatgaaggcaattatacatccggcgacaaccatacgctgagagaccctcactacgttgaagacaaaggccataaataccttgtattcgaagccaacacgggaacagaaaacggataccaaggcgaagaatctttatttaacaaagcgtactacggcggcggcacgaacttcttccgtaaagaaagccagaagcttcagcagagcgctaaaaaacgcgatgctgaagttaaataa

SEQ ID NO: 4279 - DNA, 1281 bp, Homo sapiens
  SIMILAR (7)..(1158): 961254mologous to Cloning vector pBACe3.6 levansucrase,accession number U80929,Smith-Waterman Score=1948.
atgaacatgaacatcaaaaaaattgtaaaacaagccacagttctgacttttacgactgcacttctggcaggaggagcgactcaagccttcgcgaaagagaataaccaaaaagcatacaaagaaacgtacggcgtctctcatattacacgccatgatatgctgcagatccctaaacagcagcaaaacgaaaaataccaagtgcctcaattcgatcaatcaacgattaaaaatattgagtctgcaaaaggacttgatgtgtgggacagctggccgctgcaaaacgctgacggaacagtagctgaatacaacggctatcacgttgtgtttgctcttgcgggaagcccgaaagacgctgatgacacatcaatctacatgttttatcaaaaggtcggcgacaactcaatcgacagctggaaaaacgcgggccgtgtctttaaagacagcgataagttcgacgccaacgatccgatcctgaaagatcagacgcaagaatggtccggttctgcaacctttacatctgacggaaaaatccgtttattctacactgactattccggtaaacattacggcaaacaaagcctgacaacagcgcaggtaaatgtgtcaaaatctgatgacacactcaaaatcaacggagtggaagatcacaaaacgatttttgacggagacggaaaaacatatcagaacgttcagcagtttatcgatgaaggcaattatacatccggcgacaaccatacgctgagagaccctcactacgttgaagacaaaggccataaataccttgtattcgaagccaacacgggaacagaaaacggataccaaggcgaagaatctttatttaacaaagcgtactacggcggcggcacgaacttcttccgtaaagaaagccagaagcttcagcagagcgctaaaaaacgcgatgctgagttagcgaacggcgccctcggtatcatagagttaaataatgattacacattgaaaaaagtaatgaagccgctgatcacttcaaacacggtaactgatgaaatcgagcgcgcgaatgttttcaaaatgaacggcaaatggtacttgttcactgattcacgcggttcaaaaatgacgatcgatgtgccgcaagccaaaggcaacaatgtggttatcacaagctacatgacaaacagaggcttcttcgaggataaaaaggcaacatttgcgccaagcttcttaatgaacatcaaaggcaataaaacatccgttgtcaaaaacagcatcctggagcaaggacagctgacagtcaactaa

SEQ ID NO: 4280 - DNA, 1257 bp, Homo sapiens
  SIMILAR (7)..(642): 991254mologous to Cloning vector pBACe3.6 levansucrase,accession number U80929,Smith-Waterman Score=1108.
atgaacatgaacatcaaaaaaattgtaaaacaagccacagttctgacttttacgactgcacttctggcaggaggagcgactcaagccttcgcgaaagaaaataaccaaaaagcatacaaagaaacgtacggcgtctctcatattacacgccatgatatgctgcagatccctaaacagcagcaaaacgaaaaataccaagtgcctcaattcgatcaatcaacgattaaaaatattgagtctgcaaaaggacttgatgtgtgggacagctggccgctgcaaaacgctgacggaacagtagctgaatacaacggctatcacgttgtgtttgctcttgcgggaagcccgaaagacgctgatgacacatcaatctacatgttttatcaaaaggtcggcgacaactcaatcgacagctggaaaaacgcgggccgtgtctttaaagacagcgataagttcgacgccaacgatccgatcctgaaagatcagacgcaagaatggtccggttctgcaacctttacatctgacggaaaaatccgtttattctacactgactattccggtaaacattacggcaaacaaagcctgacaacagcgcaggtaaatgtgtcaaaatctgatgacacactcaaaatcaacggagtgaaacggatactattgcgaagaatcttttatttaacaaagcagtactacggcggcggcacgaacttcttccgtaaagaaagccagaagcttcagcagagcgctaaaaaacgcgatgctgagttagcgaacggcgccctcggtatcatagagttaaataatgattacacattgaaaaaagtaatgaagccgctgatcacttcaaacacggtaactgatgaaatcgagcgcgcgaatgttttcaaaatgaacggcaaatggtacttgttcactgattcacgcggttcaaaaatgacgatcgatggtattaactcaaacgatatttacatgcttggttatgtatcaaactctttaaccggcccttacaagccgctgaacaaaacagggcttgtgctgcaaatgggtcttgatccaaacgatgtgacattcacttactctcacttcgcagtgccgcaagccaaaggcaacaatgtggttatcacaagctacatgacaaacagaggcttcttcgaggataaaaaggcaacatttgcgccaagcttcttaatgaacatcaaaggcaataaaacatccgttgtcaaaaacagcatcctggagcaaggacagctgacagtcaactaa

SEQ ID NO: 4281 - DNA, 729 bp, Homo sapiens
  SIMILAR (1)..(387): 1001254mologous to Leishmania major probable levansucrase precursor,accession number AL160371,Smith-Waterman Score=675.
atgaacatgaacatcaaaaaaattgtaaaacaagccacagttctgacttttacgactgcacttctggcaggaggagcgactcaagccttcgcgaaagaaaataaccaaaaagcatacaaagaaacgtacggcgtctctcatattacacgccatgatatgctgcagatccctaaacagcagcaaaacgaaaaataccaagtgcctcaattcgatcaatcaacgattaaaaatattgagtctgcaaaaggacttgatgtgtgggacagctggccgctgcaaaacgctgacggaacagtagctgaatacaacggctatcacgttgtgtttgctcttgcgggaagcccgaaagacgctgatgacacatcaatctacatgttttatcaaaagagcatgctgatgcaagagttgggctcctacagctttgggcagctccgcccctgtggctgtgcaggatacagcccctgtgactgctttcacaggctggcattgagtgcctgcagattttccaggtgcacagtgcaagctgttggtggatctaccattcttgggtcggaaggatgttggccctcttctcacagctccactaggcagtgtcccagtgaagaccctgtgtggggactcaaccgcatatttcctctctgtgttgcccttgtagagagtctccataaaagctccactcctgcagcagacttctgcctagacactgaggcattttcatacatcctctga

SEQ ID NO: 4282 - DNA, 1053 bp, Homo sapiens
  SIMILAR (496)..(1050): 991254mologous to Cloning vector pZC320 SopB,accession number U26464,Smith-Waterman Score=920.
atgaacatgaacatcaaaaaaattgtaaaacaagccacagttctgacttttacgactgcacttctggcaggaggagcgactcaagccttcgcgaaagaaaataaccaaaaagcatacaaagaaacgtacggcgtctctcatattacacgccatgatatgctgcagatccctaaacagcagcaaaacgaaaaataccaagtgcctcaattcgatcaatcaacgattaaaaatattgagtctgcaaaaggacttgatgtgtgggacagctggccgctgcaaaacgctgacggaacagtagctgaatacaacggctatcacgttgtgtttgctcttgcgggaagcccgaaagacgctgatgacacatcaatctacatgttttatcaaaaggtcggcgacaactcaatcgacagctggaaaaacgcgggccgtgtctttaaagacagcgataagttcgacgccaacgatccgatcctgaaagaacagacgcaagaatggatccccttgcctgtatgtggtcgggatgtgaagtttactcttgaagtgctccggggtgatagtgttgagaagacctctcgggtatggtcaggtaatgaacgtgaccaggagctgcttactgaggacgcactggatgatctcatcccttcttttctactgactggtcaacagacaccggcgttcggtcgaagagtatctggtgtcatagaaattgccgatgggagtcgccgtcgtaaagctgctgcacttaccgaaagtgattatcgtgttctggttggcgagctggatgatgagcagatggctgcattatccagattgggtaacgattatcgcccaacaagtgcttatgaacgtggtcagcgttatgcaagccgattgcagaatgaatttgctggaaatatttctgcgctggctgatgcggaaaatatttcacgtaagattattacccgctgtatcaacaccgccaaattgcctaaatcagttgttgctcttttttctcaccccggtgaactatctgcccggtcaggtgatgcacttcaaaaagcctttacagattaa

SEQ ID NO: 4283 - DNA, 1188 bp, Homo sapiens
  SIMILAR (977)..(1015): 1001254mologous to Cloning vector pSacBII SacB,accession number U09128,Smith-Waterman Score=63.
atgaacatgaacatcaaaaaaattgtaaaacaagccacagttctgacttttacgactgcacttctggcaggaggagcgactcaagccttcgcgaaagaaaataaccaaaaagcatacaaagaaacgtacggcgtctctcatattacacgccatgatatgctgcagatccctaaacagcagcaaaacgaaaaataccaagtgcctcaattcgatcaatcaacgattaaaaatattgagtctgcaaaaggacttgatgtgtgggacagctggccgctgcaaaacgctgacggaacagtagctgaatacaacggctatcacgttgtgtttgctcttgcgggaagcccgaaagacgctgatgacacatcaatctacatgttttatcaaaaggtcggcgacaactcaatcgacagctggaaaaacgcgggccgtgtctttaaagacagcgataagttcgacgccaacgatccgatcctgaaagatcagacgcaagaatggtccggttctgcaacctttacatctgacggaaaaatccgtttattctacactgactattccggtaaacattacggcaaacaaagcctgacaacagcgcaggtaaatgtgtcaaaatctgatgacacactcaaaatcaacggagtggaagatcacaaaacgatttttgacggagacggaaaaacatatcagaacgttcagcagtttatcgatgaaggcaattatacatccggcgacaaccatacgctgagagaccctcactacgttgaagacaaaggccataaataccttgtattcgaagccaacacgggaacagaaaacggataccaaggcgaagaatctttatttaacaaagcgtactacggcggcggcacgaacttcttccgtaaagaaagccagaagcttcagcagagcgctaaaaaacgcgatgctgagttagcgaacggcgccctcggtatcatagagttaaataatgattacacatctgaaaaaagtaatgaagccgctgatcacttcaaacacgtgccgcaagccaaaggcaacaatgtggttatcacaagctacatgacaaacagaggcttcttcgaggataaaaaggcaacatttgcgccaagcttcttaatgaacatcaaaggcaataaaacatccgttgtcaaaaacagcatcctggagcaaggacagctgacagtcaactaa

SEQ ID NO: 4284 - DNA, 867 bp, Homo sapiens
  SIMILAR (1)..(663): 871254mologous to Leishmania major probable levansucrase precursor,accession number AL160371,Smith-Waterman Score=1001.
atgaacatgaacatcaaaaaaattgtaaaacaagccacagttctgacttttacgactgcacttctggcaggaggagcgactcaagccttcgcgaaagaaaataaccaaaaagcatacaaagaaacgtacggcgtctctcatattacacgccatgatatgctgcagatccctaaacagcagcaaaacgaaaaataccaagtgcctcaattcgatcaatcaacgattaaaaatattgagtctgcaaaaggacttgatgtgtgggacagctggccgctgcaaaacgctgacggaacagtagctgaatacaacggctatcacgttgtgtttgctcttgcgggaagcccgaaagacgctgatgacacatcaatctacatgttttatcaaaaggtcggcgacaactcaatcgacagctggaaaaacgcgggccgtgtctttaaagacagcgataagttcgacgccaacgatccgatcctgaaagatcagacgcaagaatggtccggttctgcaacctttacatctgacggaaaaatccgtttattctacactgactattcccgtaaacattacggggatcctctagagtcgacctgcatggcattcataggaggagcgactcaagccttcgcgaaagaaaataaccaaaaagcatacaaagaaacgtacggcgtctctcatattacacgccatgatatgctgcagatccctaaacagcagcaaaacgaaaaataccaagtgcctcaattcgatcaatcaacgattaaaaatattgagtctgcaaaaggacttgatgtgtgggacactggccgctgcaggggatcctctagagtcgacctgcaggcatgcaagctaccaaattggaaagtgtaa

SEQ ID NO: 4285 - DNA, 975 bp, Homo sapiens
  SIMILAR (1)..(483): 991254mologous to Leishmania major probable levansucrase precursor,accession number AL160371,Smith-Waterman Score=843.
  misc_feature (1)...(975): n = a,t,c or g
atgaacatgaacatcaaaaaaattgtaaaacaagccacagttctgacttttacgactgcacttctggcaggaggagcgactcaagccttcgcgaaagaaaataaccaaaaagcatacaaagaaacgtacggcgtctctcatattacacgccatgatatgctgcagatccctaaacagcagcaaaacgaaaaataccaagtgcctcaattcgatcaatcaacgattaaaaatattgagtctgcaaaaggacttgatgtgtgggacagctggccgctgcaaaacgctgacggaacagtagctgaatacaacggctatcacgttgtgtttgctcttgcgggaagcccgaaagacgctgatgacacatcaatctacatgttttatcaaaaggtcggcgacaactcaatcgacagctggaaaaacgcgggccgtgtctttaaagacagcgataagttcgacgccaacgatccgatcctgaaagatagacgcaagatggtcncgacaccggcgttcggtcgaagagtatctggtgtcatagaaattgccgatgggagtcgccgtcgtaaagctgctgcacttaccgaaagtgattatcgtgttctggttggcgagctggatgatgagcagatggctgcattatccagattgggtaacgattatcgcccagcaagtgcttatgaacgtggtcagcgttatgcaagccgattgcagaatgaatttgctggaaatatttctgcgctggctgatgcggaaaatatttcacgtaagattattacccgctgtatcaacaccgccaaattgcctaaatcagttgttgctcttttttctcaccccggtgaactatctgcccggtcaggtgatgcacttcaaaaagcctttacagataaagaggaattacttaagcagcaggcatctaaccttcatgagcagaaaaaagctggggtgatatttgaagctgaagaaatatcactcttttaa

SEQ ID NO: 4286 - DNA, 1394 bp, Homo sapiens
  SIMILAR (6)..(68): 1001254mologous to Leishmania major probable levansucrase precursor,accession number AL160371,Smith-Waterman Score=102.
aaggagacatgaacatgaacatcaaaaaaattgtaaaacaagccacagttctgacttttacgactgcattctggcaggaggagcgactcaagccttcgcgaaagaaaataaccaaaaagcatacaaagaaacgtacggcgtctctcatattacacgccatgatatgctgcagatccctaaacagcagcaaaacgaaaaataccaagtgcctcaattcgatcaatcaacgattaaaaatattgagtctgcaaaaggacttgatgtgtgggacagctggccgctgcaaaacgctgacggaacagtagctgaatacaacggctatcacgttgtgtttgctcttgcgggaagcccgaaagacgctgatgacacatcaatctacatgttttatcaaaaggtcggcgacaactcaatcgacagctggaaaaacgcgggccgtgtctttaaagacagcgataagttcgacgccaacgatccgatcctgaaagatcagacgcaagaatggtccggttctgcaaccttcacatctgacggaaaaatccgtttattctacactgactattccggtaaacattacggcaaacaaagcctgacaacagcgcaggtaaatgtgtcaaaatctgatgacacactcaaaatcaacggagtggaagatcacaaaactatttttgacggagacggaaaaacatatcagaacgttcagcagtttatcgatgaaggcaattatacgggggatcctctagaggcggaaacagcggttatcaatcacaagaaacgtaaaaatagcccgcgaatcgtccagtcaaacgacctcactgaggcggcatatagtctctcccgggatcaaaaacgtatgctgtatctgttcgttgaccagatcagaaaatctgatggcaccctacaggaacatgacggtatctgcgagatccatgttgctaaatatgctgaaatattcggattgacctctgcggaagccagtaaggatatacggcaggcattgaagagtttcgcggggaaggaagtggttttttatcgccctgaagaggatgccggcgatgaaaaaggctatgaatcttttccttggtttatcaaacgtgcgcacagtccatccagagggctttacagtgtacatatcaacccatatctcattcccttctttatcgggttacagaaccggtttacgcagtttcggcttagtgaaacaaaagaaatcaccaatccgtatgccatgcgtttatacgaatccctgtgtcagtatcgtaagccggatggctcaggcatcgtctctctgaaaatcgactggatcatagagcgttaccagctgcctcaaagttaccagcgtacgcctgacttccgccgccgcttcctgcaggtctgtgttaatgagatcaacgggg

SEQ ID NO: 4287 - DNA, 1004 bp, Homo sapiens
  SIMILAR (288)..(989): 981254mologous to Cloning vector pSacBII SacB,accession number U09128,Smith-Waterman Score=1249.
ctgccccgatggtggattcgttaattgcgcgcgtaggagtaatggctcgcggtaatgccattactttgcctgtatgtggtcgggatgtgaagtttactcttgaagtgctccggggtgatagtgttgagaagacctctcgggtatggtcaggtaatgaacgtgaccaggagctgcttactgaggacgcactggatgatctcatcccttcttttctactgactggtcaacagacaccggcgttcggtcggagagtatctggtgtcatagaaattgccgatgggagtcgccgtcaaaataaccaaaaagcatacaaagaaacgtacggcgtctctcatattacacgccatgatatgctgcagatccctaaacagcagcaaaacgaaaaataccaagtgcctcaattcgatcaatcaacgattaaaaatattgagtctgcaaaaggacttgatgtgtgggacagctggccgctgcaaaacgctgacggaacagtagctgaatacaacggctatcacgttgtgtttgctcttgcgggaagcccgaaagacgctgatgacacatcaatctacatgttttatcaaaaggtcggcgacaactcaatcgacagctggaaaaacgcgggccgtgtctttaaagacagcgataagttcgacgccaacgatccgatcctgaaagatcagacgcaagaatggtccggttctgcaacctttacatctgacggaaaaatccgtttattctacactgactattccggtaaacattacggcaaacaaagcctgacaacagcgcaggtaaatgtgtcaaaatctgatgacacactcaaaatcaacggagtggaagatcacaaaacgatttttgacggagacggaaaaacatatcagaacgttcagcagtttatcgatgaaggcaattatacatccggcgacaaccatacgctgagagaccctcactacgttgaagacaaaagccataaataccttgtattcgaagccacacgggaagactga

SEQ ID NO: 4288 - DNA, 771 bp, Homo sapiens
  SIMILAR (1)..(672): 1001254mologous to Leishmania major probable levansucrase precursor,accession number AL160371,Smith-Waterman Score=1181.
atgaacatgaacatcaaaaaaattgtaaaacaagccacagttctgacttttacgactgcacttctggcaggaggagcgactcaagccttcgcgaaagaaaataaccaaaaagcatacaaagaaacgtacggcgtctctcatattacacgccatgatatgctgcagatccctaaacagcagcaaaacgaaaaataccaagtgcctcaattcgatcaatcaacgattaaaaatattgagtctgcaaaaggacttgatgtgtgggacagctggccgctgcaaaacgctgacggaacagtagctgaatacaacggctatcacgttgtgtttgctcttgcgggaagcccgaaagacgctgatgacacatcaatctacatgttttatcaaaaggtcggcgacaactcaatcgacagctggaaaaacgcgggccgtgtctttaaagacagcgataagttcgacgccaacgatccgatcctgaaagatcagacgcaagaatggtccggttctgcaacctttacatctgacggaaaaatccgtttattctacactgactattccggtaaacattacggcaaacaaagcctgacaacagcgcaggtaaatgtgtcaaaatctgatgacacactcaaaatcaacggagtggaagatcacaaaacgatttttgacggagacggagggtaccgagctcgaattcgtaatcatggtcatagctgtttcctgtgtgaaattgttatccgctcacaattccacacaacatacgagccggaagcataa

SEQ ID NO: 4289 - DNA, 1311 bp, Homo sapiens
  SIMILAR (547)..(1308): 941254mologous to Cloning vector pBACe3.6 levansucrase,accession number U80929,Smith-Waterman Score=1251.
atgaacatgaacatcaaaaaaattgtaaaacaagccacagttctgacttttacgactgcacttctggcaggaggagcgactcaagccttcgcgaaagaaaataaccaaaaagcatacaaagaaacgtacggcgtctctcatattacacgccatgatatgctgcagatccctaaacagcagcaaaacgaaaaataccaagtgcctcaattcgatcaatcaacgattaaaaatattgagtctgcaaaaggacttgatgtgtgggacagctggccgctgcaaaacgctgacggaacagtagctgaatacaacggctatcacgttgtgtttgctcttgcgggaagcccgaaagacgctgatgacacatcaatctacatgttttatcaaaaggtcggcgacaactcaatcgacagctggaaaaacgcgggccgtgtctttaaagacagcgataagttcgacgccaacgatccgatcctgaaagatcagacgcaagaatggtccggggtctgcacctttacatctgacggaaaaatccgtttattctacactgactattccggtaaacattacggcaaacaaagcctgacaacagcgcagggcaattatacatccggcgacaaccatacgctgagagaccctcgctacgttgaagacaaaggccataaataccttgtattcgaagccaacacgggaacagaaaacggataccaaggcgaagaatctttatttaacaaagcgtactacggcggcggcacgaacttcttccgtaaagaaagccagaagcttcagcagagcgctaaaaaacgcgatgctgagttagcgaacggcgccctcggtatcatagagttaaataatgattacacattgaaaaaagtaatgaagccgctgatcacttcaaacacggtaactgatgaaatcgagcgcgcgaatgttttcaaaatgaacggcaaatggtacttgttcactgattcacgcggttcaaaaatgacgatcgatggtattaactcaaacgatatttacatgcttggttatgtatcaaactctttaaccggcccttacaagccgctgaacaaaacagggcttgtgctgcaaatgggtcttgatccaaacgatgtgacattcacttactctcacttcgcagtgccgcaagccaaaggcaacaatgtggttatcacaagctacatgacaaacagaggcttcttcgaggataaaaaggcaacatttgcgccaagcttcttaatgaacatcaaaggcaataaaacatccgttgtcaaaaacagcatcctggagcaaggacagctgacagtcaactaa

SEQ ID NO: 4290 - DNA, 753 bp, Homo sapiens
  SIMILAR (55)..(522): 941254mologous to Leishmania major probable levansucrase precursor,accession number AL160371,Smith-Waterman Score=765.
tcaattcgggaggatcgaaacggcagatcgcaaaaaacagtacatacagaaggagacatgaacatgaacatcaaaaaaattgtaaaacaagccacagttctgacttttacgactgcacttctggcaggaggagcgactcaagccttcgcgaaagaaaataaccaaaaagcatacaaagaaacgtacggcgtctctcatattacacgccatgatatgctgcagatccctaaacagcagcaaaacgaaaaataccaagtgcctcaattcgatcaatcaacgattaaaaatattgagtctgcaaaaggacttgatgtgtgggacagctggccgctgcaaaacgctgacggaacagtagctgaatacaacggctatcacgttgtgtttgctcttgcgggaagcccgaaagacgctgatgacacatcaatctacatgttttatcaaaaggtcggcgacaactcaatcgacagctggaaaaacgcgggccggtctttaaagacagcgataaggggggattttgccgatttcggaaccaccatcaaacaggattttcgcctgctggggcaaaccagcgtggaccgcttgctgcaactctctcagggccaggcggtgaagggcaatcagctgttgcccgtctcactggtgaaaagaaaaaccaccctggcgcccaatacgcaaaccgcctctccccgcgcgttggccgattcattaatgcagctggcacgacaggtttcccgactggaaagcgggcagtga

SEQ ID NO: 4291 - DNA, 621 bp, Homo sapiens
  SIMILAR (1)..(390): 981254mologous to Leishmania major probable levansucrase precursor,accession number AL160371,Smith-Waterman Score=671.
atgaacatgaacatcaaaaaaattgtaaaacaagccacagttctgacttttacgactgcacttctggcaggaggagcgactcaagccttcgcgaaagaaaataaccaaaaagcatacaaagaaacgtacggcgtctctcatattacacgccatgatatgctgcagatccctaaacagcagcaaaacgaaaaataccaagtgcctcaattcgatcaatcaacgattaaaaatattgagtctgcaaaaggacttgatgtgtgggacagctggccgctgcaaaacgctgacggaacagtagctgaatacaacggctatcacgttgtgtttgctcttgcgggaagcccgaaagacgctcatgacacatcaatctacatgttttatcaaaagatccgtatggcaatgaaagacggtgagctggtgatatcggatagtgttcacccttgttacacggttttccatgagcgaactgaaacgttttcatcgctctggagtgcatccctcgacgatttgcggcagtttctacacatatattcgcaagatgtggcgtgttgcggtgaaaacctggcgtatttccataaagggtttattgagaatatgttcgtggtctcagccaatccctgg

SEQ ID NO: 4292 - DNA, 921 bp, Homo sapiens
  SIMILAR (481)..(906): 991254mologous to Leishmania major probable levansucrase precursor,accession number AL160371,Smith-Waterman Score=738.
atgaaactcatggaaacacttaaccagtgcataaacgctggtcatgaaatgacgaaggctatcgccattgcacagtttaatgatgacagcccggaagcgaggaaaataacccggcgctggagaataggtgaagcagcggatttagttggggtttcttctcaggctatcagagatgccgagaaagcagggcgactaccgcacccggatatggaaattcgaggacgggttgagcaacgtgttggttatacaattgaacacattaatcatatgcgtgatgtgtttggtacgcgattgcgacgtgctgaagacgtatatccaccggtgatcggggttgctgcccataaagtgggcgtttacaaaacctcagtttctgttcatcttgctcaggatctggctctgaggggctacctgttttgctcgtggaagtcaattcgggaggatcgaaacggcagatcgcaaaaaacagtacatacagaaggagacatgaacatgaacatcaaaaaaattgtgaaacaagccacagttctgacttttacgactgcacttctggcaggaggagcgactcaagccttcgcgaaagaaaataaccaaaaagcatacaaagaaacgtacggcgtctctcatattacacgccatgatatgctgcagatccctaaacagcagcaaaacgaaaaataccaagtgcctcaattcgatcaatcaacgattaaaaatattgagtctgcaaaaggacttgatgtgtgggacagctggccgctgcaaaacgctgacggaacagtagctgaatacaacggctatcacgttgtgtttgctcttgcgggaagcccgaaagacgctgatgacacatcaatctacatgttttatcaaaaggtcggcgacaactcaatctacagctggaaaaacgcggcgccgtgtctttaa

SEQ ID NO: 4293 - DNA, 1029 bp, Homo sapiens
  SIMILAR (1)..(501): 991254mologous to Leishmania major probable levansucrase precursor,accession number AL160371,Smith-Waterman Score=877.
atgaacatgaacatcaaaaaaattgtaaaacaagccacagttctgacttttacgactgcacttctggcaggaggagcgactcaagccttcgcgaaagaaaataaccaaaaagcatacaaagaaacgtacggcgtctctcatattacacgccatgatatgctgcagatccctaaacagcagcaaaacgaaaaataccaagtgcctcaattcgatcaatcaacgattaaaaatattgagtctgcaaaaggacttgatgtgtgggacagctggccgctgcaaaacgctgacggaacagtagctgaatacaacggctatcacgttgtgtttgctcttgcgggaagcccgaaagacgctgatgacacatcaatctacatgttttatcaaaaggtcggcgacaactcaatcgacagctggaaaaacgcgggccgtgtctttaaagacagcgataagttcagcgccaacgatccgatcctgaaagatcaaacccaagaatggtccggatacccttgggtaacgattatcgcccaacaagtgcttatgaacgtggtcagcgtggtgcagagccgattgcaaaatgaatttgctggaaatatttctgcgctggctgatgcggaaaatatttcacgtaagattattacccgctgtatcaacaccgccaaattgcctaaatcagttgttgctcttttttctcaccccggtgaactatctgcccggtcaggtgatgcacttcaaaaagcctttacagataaagaggaattacttaagcagcaggcatctaaccttcatgagcagaaaaaagctggggtgatatttgaagctgaagaagttatcactcttttaacttctgtgcttaaaacgtcatctgcatcaagaactagtttaagctcacgacatcagtttgctcctggagcgacagtattgtataagggcgataaaatggtgcttaacctggacaggtctcgtgttccaactgagtgtatagagaaaattgaggccattcttaaggaacttgaaaagccagcaccctga

SEQ ID NO: 4294 - DNA, 945 bp, Homo sapiens
  SIMILAR (1)..(597): 991254mologous to Leishmania major probable levansucrase precursor,accession number AL160371,Smith-Waterman Score=1046.
atgaacatgaacatcaaaaaaattgtaaaacaagccacagttctgacttttacgactgcacttctggcaggaggagcgactcaagccttcgcgaaagaaaataaccaaaaagcatacaaagaaacgtacggcgtctctcatattacacgccatgatatgctgcagatccctaaacagcagcaaaacgaaaaataccaagtgcctcaattcgatcaatcaacgattaaaaatattgagtctgcaaaaggacttgatgtgtgggacagctggccgctgcaaaacgctgacggaacagtagctgaatacaacggctatcacgttgtgtttgctcttgcgggaagcccgaaagacgctgatgacacatcaatctacatgttttatcaaaaggtcggcgacaactcaatcgacagctggaaaaacgcgggccgtgtctttaaagacagcgataagttcgacgccaacgatccgatcctgaaagatcagacgcaagaatggtccggttctgcaacctttacatctgacggaaaaatccggttattctacactgactattccggtaaacattacggcaaacaaagcctgacaacagcgcagctcatggagcggcgtaaccgtcgcacaggaaggacagagaaagcgcggatctgggaagagacggacagaacggtcaggacctggattggggaggcggttgccgccgctgctgctgacggtgtgacgttctctgttccggtcacaccacatacgttccgccattcctatgcgatgcacatgctgtatgccggtataccgctgagagttctgcaaagcctgatgggacataagtccatcagttcaacggaagtctacacgaaggtttttgcgctggatgtggctgcccggcaccgggtgcagtttgcgatgccggagtctgatgcggttgcgatgctgaaacaattatcctga

SEQ ID NO: 4295 - DNA, 528 bp, Homo sapiens
  SIMILAR (1)..(390): 991254mologous to Leishmania major probable levansucrase precursor,accession number AL160371,Smith-Waterman Score=678.
atgaacatgaacatcaaaaaaattgtaaaacaagccacagttctgacttttacgactgcacttctggcaggaggagcgactcaagccttcgcgaaagaaaataaccaaaaagcatacaaagaaacgtacggcgtctctcatattacacgccatgatatgctgcagatccctaaacagcagcaaaacgaaaaataccaagtgcctcaattcgatcaatcaacgattaaaaatattgagtctgcaaaaggacttgatgtgtgggacagctggccgctgcaaaacgctgacggaacagtagctgaatacaacggctatcacgttgtgtttgctcttgcgggaagcccgaaagacgctgatgacacatcaatctacatgttttatcaaaagatcagacgcaagaatggtcccggttctgcaacctttacatctgacggaaaaatccgtttattctacactgactattccgggaaacattacggcaaacaaagcctggacacagcgccagtaaaatgtggtcaaatctggtga

SEQ ID NO: 4296 - DNA, 1704 bp, Homo sapiens
  SIMILAR (1)..(600): 991254mologous to Cloning vector pSacBII SacB,accession number U09128,Smith-Waterman Score=1065.
atgctgcagatccctaaacagcagcaaaacgaaaaataccaagtgcctcaattcgatcaatcaacgattaaaaatattgagtctgcaaaaggacttgatgtgtgggacagctggccgctgcaaaacgctgacggaacagtagctgaatacaacggctatcacgttgtgtttgctcttgcgggaagcccgaaagacgctgatgacacatcaatctacatgttttatcaaaaggtcggcgacaactcaatcgacagctggaaaaacgcgggccgtgtctttaaagacagcgataagttcgacgccaacgatccgatcctgaaagatcagacgcaagaatggtccggttctgcaacctttacatctgacggaaaaatccgtttattctacactgactattccggtaaacattacggcaaacaaagcctgacaacagcgcaggtaaatgtgtcaaaatctgatgacacactcaaaatcaacggagtggaagatcacaaaacgatttttgacggagaacggaaaacatatcagaacgttcagcagtttatcgatgaaggcaattatacatccggcgacaaccatacgctgagagaccctcactaccaaaatacgtacatcaggctcgaaccctttaagatcaacgttcttgagcagatcacgaagcatatcgaaaaactgcagtgcggaggtgtagtcaaacaactcagcaggcgtgggaacaatcagcacatcagcagcacatacgacattaatcgtgccgatacccaggttaggcgcgctgtcaataactatgacatcatagtcatgagcaacagtttcaatggccagtcggagcatcaggtgtggatcgatagaaaggcaggagagtgtcttctgcatgaatatgaagatctggtacccatccgtgatacattgaggctgttccctgggggtcgttaccttccacgagcaaaacacgtagccccttcagagccagatcctgagcaagatgaacagaaactgagctgctgcacttaccgaaagcgatatcgtgttctggttggcgagctgggtgatgagcagatggctgcattatccagattgggtaacgattatcgcccaacaagtgcttatgaacgtggtcagcgttatgcaagcctattgcagaatgaatttgctggaaatatttctgcgctggctgatgcggaaaatatttcacgtaagattattacccgctgtatcaacaccgccaaattgcctaaatcagttgttgctcttttttctcaccccggtgaactatctgcccggtcaggtgatgcacttcaaaaagcctttacagataaagaggaattacttaagcagcaggcatctaaccttcatgagcagaaaaaagctggggtgatatttgaagctgaagaagttatcactcttttaacttctgtgcttaaaacgtcatctgcatcaagaactagtttaagctcacgacatcagtttgctcctggagcgacagtattgtataagggcgataaaatggtgcttaacctggacagactaataatcagaccgacgatacgagtgggaccgtggtcccagactaataatcagaccgacgatacgagtgggaccatggtcccagtactaataatcagaccgacgatacgagtgggaccgtggtcccagtctgattatcagaccgacgatacgagtgggaccgtggtcccagactaa

SEQ ID NO: 4297 - DNA, 1449 bp, Homo sapiens
  SIMILAR (25)..(735): 981254mologous to Cloning vector pSacBII SacB,accession number U09128,Smith-Waterman Score=1247.
  misc_feature (1)...(1449): n = a,t,c or g
ttcgttggcagaaggagcgactcaagcttcgcgaaagaaaatacccaaaaagcatccaaagaaacgtacggcgtctctcatattacacgccatgatatgctgcagatccttaaacagcagcaaaacgaaaaataccaagtgcctcaattcgatcaatcaacgattaaaaatattgagtctgcaaaaggacttgatgtgtgggacagctggccgctgcaaaacgctgacggaacagtagctgaatacaacggctatcacgttgtgtttgctcttgcgggaagcccgaaagacgctgatgacacatcaatctacatgttttatcaaaaggtcggcgacaactcaatcgacagctggaaaaacgcgggccgtgtctttaaagacagcgataagttcgacgccaacgatccgatcctgaaagatcagacgcaagaatggtccggttctgcaacctttacatctgacggaaaaatccgtttattctacactgactattccggtaaacattacggcaaacaaagcctgacaacagcgcaggtaaatgtgtcaaaatctgatgacacactcaaaatcaacggagtggaagatcacaaaacgatttttgacggagacggaaaaacatatcagaacgttcagcagtttatcgatgaaggcaattatacatccggcgacaaccatacgctgagagaccctcactacgttgaagacaaaggccataaataccttgtattcgaagccaagtgtgacaatctaaaaacttgtcacacttcacatggatctgtcatggcggaaacagcggttatcaatcacaagaaacgtaaaaatagcccgcgaatcgtccagtcaaacgacctcactgaggcggcatatagtctctcccgggatcaaaaacgtatgctgtatctgttcgttgaccagatcagaaaatctgatggcaccctacaggaacatgacggtatctgcgagatccatgttgctaaatatgctgaaatattcggattgacctctgcggaagccagtaaggatatacggcaggcattgaagagtttcgcggggaaggaagtggttttttatcgccctgaagaggatgccggcgatgaaaaaggctatgaatcttttccttggtttatcaaacgtgcgcacagtccatccagagggctttacagtgtacatatcaacccatatctcattcccttctttatcgggttacagaaccggtttacgcagtttcggcttagtgaaacaaaagaaatcaccaatccgtatgccatgcgtttatacgaatccctgtgtcagtatcgtaagccggatggctcaggcatcgtctctctgaaaatcgactggatcatagagcgttaccagctgcctcaaagttacgagtgtatcctntaccaggaaattgcggtgatcctctacagtagtcgcagagtcatgcacgaaggtcgattttga

SEQ ID NO: 4298 - DNA, 1584 bp, Homo sapiens
  SIMILAR (166)..(1581): 1001254mologous to Cloning vector pBACe3.6 levansucrase,accession number U80929,Smith-Waterman Score=2482.
tcaggaccctcagctgcaggtttgttggtgtttgctggaggtccactccaggccctgtgtgcctgggtatcagcagtggaggctgcagaacagtggatattgtcaattcgggaggatcgaaacggcagatcgcaaaaaacagtacatacagaaggagacatgaacatgaacatcaaaaaaattgtaaaacaagccacagttctgacttttacgactgcacttctggcaggaggagcgactcaagccttcgcgaaagaaaataaccaaaaagcatacaaagaaacgtacggcgtctctcatattacacgccatgatatgctgcagatccctaaacagcagcaaaacgaaaaataccaagtgcctcaattcgatcaatcaacgattaaaaatattgagtctgcaaaaggacttgatgtgtgggacagctggccgctgcaaaacgctgacggaacagtagctgaatacaacggctatcacgttgtgtttgctcttgcgggaagcccgaaagacgctgatgacacatcaatctacatgttttatcaaaaggtcggcgacaactcaatcgacagctggaaaaacgcgggccgtgtctttaaagacagcgataagttcgacgccaacgatccgatcctgaaagatcagacgcaagaatggtccggttctgcaacctttacatctgacggaaaaatccgtttattctacactgactattccggtaaacattacggcaaacaaagcctgacaacagcgcaggtaaatgtgtcaaaatctgatgacacactcaaaatcaacggagtggaagatcacaaaacgatttttgacggagacggaaaaacatatcagaacgttcagcagtttatcgatgaaggcaattatacatccggcgacaaccatacgctgagagaccctcactacgttgaagacaaaggccataaataccttgtattcgaagccaacacgggaacagaaaacggataccaaggcgaagaatctttatttaacaaagcgtactacggcggcggcacgaacttcttccgtaaagaaagccagaagcttcagcagagcgctaaaaaacgcgatgctgagttagcgaacggcgccctcggtatcatagagttaaataatgattacacattgaaaaaagtaatgaagccgctgatcacttcaaacacggtaactgatgaaatcgagcgcgcgaatgttttcaaaatgaacggcaaatggtacttgttcactgattcacgcggttcaaaaatgacgatcgatggtattaactcaaacgatatttacatgcttggttatgtatcaaactctttaaccggcccttacaagccgctgaacaaaacagggcttgtgctgcaaatgggtcttgatccaaacgatgtgacattcacttactctcacttcgcagtgccgcaagccaaaggcaacaatgtggttatcacaagctacatgacaaacagaggcttcttcgaggataaaaaggcaacatttgcgccaagcttcttaatgaacatcaaaggcaataaaacatccgttgtcaaaaacagcatcctggagcaaggacagctgacagtcaactaa

SEQ ID NO: 4299 - DNA, 1539 bp, Homo sapiens
  SIMILAR (64)..(912): 881254mologous to Cloning vector pZC320 SopA,accession number U26464,Smith-Waterman Score=1285.
  misc_feature (1)...(1539): n = a,t,c or g
atgcagttttctttattgtggcctttcgtgcatgcctcgcagttgactctagaggatccccgcataaacgctggtcatgaaatgacgaaggctatcgccattgcacagtttaatgatgacagcccggaagcgaggaaaataacccggcgctggagaataggtgaagcagcggatttagttggggtttcttctcaggctatcagagatgccgagaaagcagggcgactaccgcacccggatatggaaattcgaggacgggttgagcaacgtgttggttatacaattgaacaaattaatcatatgcgtgatgtgtttggtacgcgattgcgacgtgctgaagacgtatttccaccggtgatcggggttgctgcccataaaggtggcgtttacaaaacctcagtttctgttcatcttgctcaggatctggctctgaaggggctacgtgttttgctcgtggaaggtaacgacccccagggaacagcctcaatgtatcacggatgggtaccagatcttcatattcatgcagaagacactctcctgcctttctatcttggggaaaaggacgatgtcacttatgcaataaagcccacttgctggccggggcttgacattattccttcctgtctggctctgcaccgtattgaaactgagttaatgggcaaatttgatgaaggtaaactgcccaccgatccacacctgatgctccgactgggcattgaaactgttgctcatgactatgatgtcctagttattgacagcccgcctaacctgggtatcggcacgattaatgtccgatgggctgctgatgtgcagcctttancgatccctaaacagcagcaaaacgaaaaataccaagtgcctcaattcgatcaatcaacgattaaaaatattgagtctgcaaaaggacttgatgtgtgggacagctggccgctgcaaaacgctgacggaacagtagctgaatacaacggctatcacgttgtgtttgctcttgcgggaagcccgaaagacgctgatgacacatcaatctacatgttttatcaaaaggtcggcgacaactcaatcgacagctggaaaaacgcgggccgtgtctttaaagacagcgataagttcgacgccaacgatccgatcctgaaagatcagacgcaagaatggtccggttctgcaacctttacatctgacggaaaaatccgtttattctacactgactattccggtaaacattacggcaaacaaagcctgacaacagcgcaggtaaatgtgtcaaaatctgatgacacactcaaaatcaacggagtggaagatcacaaaacgatttttgacggagacggaaaaacatatcagaacgttcagcagtttatcgatgaaggcaattatacatccggcgacaaccatacgctgagagaccctcactacgttgaagacaaaggccataaataccttgtattcgaagcccacacgggaacagaaaacggataccaaggcgaagaatctttatttaacaaagcgtactacgggaatacgtgcatgactcgcagatga

SEQ ID NO: 4300 - DNA, 1078 bp, Homo sapiens
  SIMILAR (175)..(876): 941254mologous to Cloning vector pSacBII SacB,accession number U09128,Smith-Waterman Score=1178.
  misc_feature (1)...(1078): n = a,t,c or g
ccagcgcagaaatatttccagcaaattcattctgcaatcggcttgcataacgctgaccacgttcataagcacttgttgggcgataatcgttacccaatctggataatgcagccatctgctcatcatccagctcgccaaccagaacacgataatcactttcggaaggagcgactcaaggccttcgcgaaagaaaaatacccacataagcatacaaagaaacggtcgggcgtttttcatattacacgccatgatatgctgcagatccctaaacagcagcaaaacgaaaaataccaagtgcctcaattcgatcaatcaacgattaaaaatattgagtctgcaaaagnacttgatgtgtgggacagctggccgctgcaaaacgctgacggaacagtagctgaatacaacggctatcacgttgtgtttgctcttgcgggaagcccgaaagacgctgatgacacatcaatctacatgttttatcaaaaggtcggcgacaactcaatcgacagctggaaaaacgcgggccgtgtctttaaagacagcgataagttcgacgccaacgatccgatcctgaaagatcagacgcaagaatggtccggttctgcaacctttacatctgacggaaaaatccgtttattctacactgactattccggtaaacattacggcaaacaaagcctgacaacagcgcaggtaaatgtgtcaaaatctgatgacacactcaaaatcaacggagtggaagatcacaaaacgatttttgacggagacggaaaaacatatcagaacgttcagcagtttatcgatgaaggcaattatacatccggcgacaaccatacgctgagagaccctcactacgttgaagacaaaggccataaataccggggtcctttagagtccccatcgacgcatcaagccgagtttaaccctacttcttgtgtttcgtccttgggcacccttcaaggctttcccgcccccgcttggctcgctctcgcgcaccctgtgcaccctttgaaacacaagagcgggggaagcaaccggttaagcgctgctatttggggcataaaaaggaagccggccagag

SEQ ID NO: 4301 - DNA, 1347 bp, Homo sapiens
  SIMILAR (418)..(1053): 981254mologous to Cloning vector pSacBII SacB,accession number U09128,Smith-Waterman Score=1106.
atgaaactcatggaaacacttaaccagtgcataaacgctggtcatgaaatgacgaaggctatcgccattgcacagtttaatgatgacagcccggaagcgaggaaaataacccggcgctggagaataggtgaagcagcggatttagttggggtttcttctcaggctatcagagatgccgagaaagcagggcgactaccgcacccggatatggaaattcgaggacgggttgagcaacgtgttggttatacaattgaacaaattaatcatatgcgtgatgtgtttggtacgcgattgcgacgtgctgaagacgtatttccaccggtgatcggggttgctgcccataaaggtggcgtttacaaaacctcagtttctgttcatcttgctcaggatctggctctgaaggggctacgtgttttgctcgtggaaggaggagcgactcaagctttcgggaaagaaaataaccaaaaagcatacaaagaaacgtccggcgtctctcatataacacgccatgatatgctgcagatccctaaacagcagcaaaacgaaaaataccaagtgcctcaattcgatcaatcaacgattaaaaatattgagtctgcaaaaggacttgatgtgtgggacagctggccgctgcaaaacgctgacggaacagtagctgaatacaacggctatcacgttgtgtttgctcttgcgggaagcccgaaagacgctgatgacacatcaatctacatgttttatcaaaaggtcggcgacaactcaatcgacagctggaaaaacgcgggccgtgtctttaaagacagcgataagttcgacgccaacgatccgatcctgaaagatcagacgcaagaatggtccggttctgcaacctttacatctgacggaaaaatccgtttattctacactgactattccggtaaacattacggcaaacaaagcctgacaacagcgcaggtaaatgtgtcaaaatctgatgacacactcaaaatcaacggagtggaagatcacaaaacgatttttgacggagacggaaaaacatatcagaacgttcagcaggtgaagcatagccgtcagcggatgtatctggtgccaccggttttttcacaactgaccgaacaacatcaggctgtcattgacgccatttttgccggtgatgctgacggggcgcgtaaagcaatgatggcgcaccttagttttgttcacaccaccatgaaacgattcgatgaagatcaggctcgccacgcacggattacccgcctgcccgggtttgctaggcccatcggggtcctggtgcaccaggtgactgtgaaggccactcacccttctcgggcttttttcaggattgtttga

SEQ ID NO: 4302 - DNA, 1716 bp, Homo sapiens
  SIMILAR (862)..(1713): 951254mologous to Homo sapiens malate dehydrogenase (oxaloacetate decarboxylating) (NADP+),accession number X77244,Smith-Waterman Score=1379.
atggtgtattgtcgaaacacgggtggccgatatggaaaggcaactatagaaggttactaccagaaactctctaaggcttttgtggaactcaccaaacaggcttcttgcagtggagatgaatacagatcacttaaggttgactgtgcaaatggcataggggccctgaagctaagggaaatggaacactacttctcacagggcctgtcagttcagctgtttaatgatgggtccaagggcaaactcaatcatttatgtggagctgactttgtgaaaagtcatcagaaacctccacagggaggagcgactcaagccttcgcgaaagaaaataaccaaaaagcatacaaagaaacgtacggcgtctctcatattacacgccatgatatgctgcagatccctaaacagcagcaaaacgaaaaataccaagtgcctcaattcgatcaatcaacgattaaaaatattgagtctgcaaaaggacttgatgtgtgggacagctggccgctgcaaaacgctgacggaacagtagctgaatacaacggctatcacgttgtgtttgctcttgcgggaagcccgaaagacgctgatgacacatcaatctacatgttttatcaaaaggtcggcgacaactcaatcgacagctggaaaaacgcgggccgtgtctttaaagacagcgataagttcgacgccaacgatccgatcctgaaagatcatacgcaagaatggtccggttctgcaacctttacttctgacggaaaaatccgtttattctacactgactattccggtaaacattacggccaacatagcctgacaacagggcatgtatatgcgtctgaatctgacgacccacttgaattcgacggattggaagacgacacatcgattttcgacgggacacggagtaccatatcaggtgccctagggattgcacacctgattgtgatggccttggaaaaagaaggtttaccaaaagagaaagccatcaaaaagatatggctggttgattcaaaaggattaatagttaagggacgtgcttccttaacacaagagaaagagaagtttgcccatgaacatgaagaaatgaagaacctagaagccattgttcaagaaataaaaccaactgccctcataggagttgctgcaattggtggtgcattctcagaacaaattctcaaagatatggctgccttcaatgaacggcctattatttttgctttgagtaatccaactagcaaagcagaatgttctgcagagcagtgctacaaaataaccaagggacgtgcaatttttgccagtggcagtccttttgatccagtcactcttccaaatggacagaccctatatcctggccaaggcaacaattcctatgtgttccctggagttgctcttggtgttgtggcgtgtggattgaggcagatcacagataatattttcctcactactgctgaggttatagctcagcaagtgtcagataaacacttggaagagggtcggctttatcctcctttgaataccattagagatgtttctctgaaaattgcagaaaagattgtgaaagatgcataccaagaaaagacagccacagtttatcctgaaccgcaaaacaaagaagcatttgtccgctcccagatgtatagtactgattatgaccagattctacctgattgttattcttggcctgaagaggtgcagaaaatacagaccaaagttgaccagtag

SEQ ID NO: 4303 - DNA, 1919 bp, Homo sapiens
  SIMILAR (558)..(1496): 981254mologous to Cloning vector pSacBII SacB,accession number U09128,Smith-Waterman Score=1628.
atctttcttcatccctttgttttgagcctatggttgtcattacatgtgatatggatcgcctgaagatagcagttggatcttgcttctttatccaacttgccactctatgcctattaagtggatcatttagcccatttacattcaaggtgattattgatataaaaagtgatgtaactgaacgtagcagcaccagctgtggtagattgcatgggtcagaggcacactgtcaggagagccttgatcagaccacatctggtggtgcagaaccagcatttaaacagggcagaaagagaagaaaaagaacatgtaattttgtgggaatgacaggaccctcagatgcagatctgtttgagtttgctggaggtctgctccagatgctgtttgcctgggtatcagcagtgggtagctgcagaacagtggattttggtgaaccgcaaatcctgccgcctgatcgttcctctggaagttttgtctcagaggagtacccggcctgttcaattcgggaggatcgaaacggcagatcgcaaaaaacagtacatacagaaggagacatgaacatgaacatcaaaaaaattgtaaaacaagccacagttctgacttttacgactgcacttctggcaggaggagcgactcaagccttcgcgaaagaaaataaccaaaaagcatacaaagaaacgtacggcgtctctcatattacacgccatgatatgctgcagatccctaaacagcagcaaaacgaaaaataccaagtgcctcaattcgatcaatcaacgattaaaaatattgagtctgcaaaaggacttgatgtgtgggacagctggccgctgcaaaacgctgacggaacagtagctgaatacaacggctatcacgttgtgtttgctcttgcgggaagcccgaaagacgctgatgacacatcaatctacatgttttatcaaaaggtcggggacaactcaatcgacagctggaaaaacgcgggccgtgtctttaaagacagcgataagttcgacgccaacgatccgatcctgaaagatcagacgcaagaatggtccggttctgcaacctttacatctgacggaaaaatccgtttattttaccctgactattccggtaaacattctgacaaccagagcgtgacaacagcgcaggtaaatgtgtcaaaatctgatgacacactcaaaatcaacggagtggaagatcacaaaacgatttttgacggagacggaaaaacatatcagaacgttcagcagtttatcgatgaaggcaattatacatccggcgacaaccatacgctgagagaccctcactacgttgaagacaaaggccataaataccttgtattcgaagccaacacgggaacagaaaacggataccaaggcgaagaatctttatttaacaaagcgtactacggcggcggcacgaacttcttccgtaaagaaagccagaagcttcagcagagcgctaaaaaacgcgatgctgagttagcgaacggcgccctcgtgccgcaagccaaaggcaacaatgtggttatcacaagctacatgacaaacagaggcttcttcgaggataaaaaggcaacatttgcgccaagcttcttaatgaacatcaaaggcaataaaacatccgttgtcaaaaacagcatcctggagcaaggacagctgacatggcttcaagtagcgaagcgagcacgaatgtgcggcggccaagcggtcggaagtgcttcgagaacggtgcgcataaaaatgcataacgcctatgcgctagcagacgccctagtgactgccgatgctgtcgaaatggaacaaattcccggagaagcccggcaagtaccggcattaaacaaagccctattgcctaacagcaattccaggggtgaccgggttgcccgaggaattgaccgaattaagccggccattgtttaa

SEQ ID NO: 4304 - DNA, 1239 bp, Homo sapiens
  SIMILAR (268)..(933): 951254mologous to Cloning vector pSacBII SacB,accession number U09128,Smith-Waterman Score=1139.
atggagccagttcctggagtcctttgtgctgtggtttcagatttccaggaattggaagtctatttaattatctttggacctgatggcatagttctgtccttcaggatccctgtaattctgaggagacggccacaattgattgcccttaaccgcctggccctgagaaaattgcgcaagccgtccaccttgtttgccccacaggccaaaaatcctgttggagaactggggactaaaaccgcttttggggatctaaagacccccagccttcgcgaagaaataaccaaaagcatacaaagaaacgtcggcgtctctcatattacacgccatgatatgctgcagatccctaaacagcagcaaaacgaaaaataccaagtgcctcaattcgatcaatcaacgattaaaaatattgagtctgcaaaaggacttgatgtgtgggacagctggccgctgcaaaacgctgacggaacagtagctgaatacaacggctatcacgttgtgtttgctcttgcgggaagcccgaaagacgctgatgacacatcaatctacatgttttatcaaaaggtcggcgacaactcaatcgacagctggaaaaacgcgggccgtgtctttaaagacagcgataagttcgacgccaacgatccgatcctgaaagatcagacgcaagaatggtccggttctgcaacctttacatctgacggaaaaatccgtttattctacactgactattccggtaaacattacggcaaacaaagcctgacaacagcgcaggtaaatgtgtcaaaatctgatgacacactcaaaatcaacggagtggaagatcacaaaacgatttttgacggagacggaaaaacatatcagaacgttcagcagtttatcgatgaaggcaattatacatccggcgacaaccatacgctgagagaccctcactacgttggaggaacaagttgggaaccaggggttttctcggtgtcttgtgtgtttttcggccaacaagaaggggtgatggttgagatgaattcctggacttttcctactggtttcaaggtggctgaatttgcctgtaccaaaaggcatcatgacagaacactacttcctataaacgctacacaggctcctgagattaataatgcggatctctacgataatgggagattttcccgactgttcgtcgcttctcagtggataacagccagcttctcttttaacagacaaaaacaggatgtttatcctctaccgtag

SEQ ID NO: 4305 - DNA, 1954 bp, Homo sapiens
  SIMILAR (1352)..(1951): 431254mologous to Cloning vector pSacBII SacB,accession number U09128,Smith-Waterman Score=298.
atgaacatgaacatcaaaaaaattgtaaaacaagccacagttctgacttttacgactgcacttctggcaggaggagcgactcaagccttcgcgaaagaaaataaccaaaaagcatacaaagaaacgtacggcgtctctcatattacacgccatgatatgctgcagatccctaaacagcagcaaaacgaaaaataccaagtgcctcaattcgatcaatcaacgattaaaaatattgagtctgcaaaaggacttgatgtgtgggacagctggccgctgcaaaacgctgacggaacagtagctgaatacaacggctatcacgttgtgtttgctcttgcgggaagcccgaaagacgctgatgacacatcaatctacatgttttatcaaaaggtcggcgacaactcaatcgacagctggaaaaacgcgggccgtgtctttaaagacagcgataagttcgacgccaacgatccgatcctgaaagatcagacgcaagaatggtccggttctgcaacctttacatctgacggaaaaatccgtttattctacacgggatccctaaacagcagcaaaacggaaaaataccaagtgcctcatatcgatcaatcaacgattaaaaatattgagtctgcaaaaggacttgatgtgtgggacagctggccgctgcaaaacgctgacggaacagtagctgaatacaacggctatcacgttgtgtttgctcttgcgggaagcccgaaagacgctgatgacacatcaatctacatgttttatcaaaaggtcggcgacaactcaatcgacagctggaaaaacgcgggccgtgtctttaaagacagcgataagttcgacgccaacgatccgatcctgaaagatcagacgcaagaatggtccggttctgcaacctttacatctgacggaaaaatccgtttattctacactgactattccggtaaacattacggcaaacaaagcctgacaacagcgcaggtaaatgtgtcaaaatctgatgacacactcaaaatcaacggagtggaagatcacaaaacgatttttgacggagacggaaaaacatatcagaacgttcagcagtttatcgatgaaggcaattatacatccggcgacaaccatacgctgagagaccctcactacgttgaagacaaaggccataaataccttgtattccaagaccacacgggaacagaagagcacccccaaccgcaaggagcggcccaggactcagagcttcaccagcgccttcgccgaacggcgcgagtgcatccccaacgtacccgccgacaccaaactctccaaaatcaagaccctgcgcctggccaccagctacatcgcctacctcatggacctgctggccaaggacgaccagaatggcgaggcggaggccttcaaggcagagatcaagaagaccgacgtgaaagaggagaagaggaagaaggagctggcaagtaaatgcctggatttggagcaattaggagcctcagtggaacccacgggaaacctgagaactaagataaccaaggagaagcctaggcacacagggccacctgaagtcgtagtccctggctgctgccctcacagatcgagagcctacaaatccgacaaatatgcccacactttgacagtaaccgcctcccagcacgccccaccaccgccaacacacatggaggggtttgaacttttccaccttccggacctctgcagtccgtcgcaggacgcccaaaccacaggccggacacagatgaagccagaccacagcccccgccccagccaccgcgtgccgcaagccaaaggcaacaatgtggttatcacaagctacatgacaaacagaggcttcttcgaggataaaaaggcaacatttgcgccaagcttcttaatgaacatcaaaggcaataaaacatccgttgtcaaaaacagcatcctggagcaaggacagctgacagtcaactaa

SEQ ID NO: 4306 - DNA, 1032 bp, Homo sapiens
  SIMILAR (370)..(753): 1001254mologous to Cloning vector pSacBII SacB,accession number U09128,Smith-Waterman Score=684.
atgctggctctccctggggccttgtggcttgcatgcttcgatgaagaacactgccacactgaagaggcacatttcaaggaactgagagtgggcaacaactcaggagcccagctggcttcacctagtggatcccgcaccggggctgcaggtggagctgcctgccagtcccgtgccgtgcgcttgcactcctcagcccttgggtggtcgatgggactgggcgccgtggagcagggggtggtgctcgtcagggaggctggggcagcacaggagcccatggagtgggtaggaggctcaggcatggcgggctgcaggtcccgagccctgccccgcgggaaagcagctaaggtccggcgagaaatcgatcacagcgccggaggagcgactcaagccttcgcgaaagaaaataaccaaaaagcatacaaagaaacgtacggcgtctctcatattacacgccatgatatgctgcagatccctaaacagcagcaaaacgaaaaataccaagtgcctcaattcgatcaatcaacgattaaaaatattgagtctgcaaaaggacttgatgtgtgggacagctggccgctgcaaaacgctgacggaacagtagctgaatacaacggctatcacgttgtgtttgctcttgcgggaagcccgaaagacgctgatgacacatcaatctacatgttttatcaaaaggtcggcgacaactcaatcgacagctggaaaaacgcgggccgtgtctttaaagacagcgataaaaaaggaaggacccccgcggcgggcgtcggcatcatgagcgatcgtttagccctaacgtgttttgcctcgaaggtgaaagaggttcccccaagagctgatgtgtgtaaaggtgcgccagttcctgtgtcgcacgatgctacccctctctcagcccgccctgcgaagaaggacgcccgcttccacctgcgccaagactgtaaatggctttgcgacaagtgtgaaataagagaaagagttaatgtgcaggcaactaaaagccagaaaagagtttttagctga

SEQ ID NO: 4307 - DNA, 1251 bp, Homo sapiens
  SIMILAR (295)..(795): 941254mologous to Cloning vector pSacBII SacB,accession number U09128,Smith-Waterman Score=844.
atgaaactcatggaaacacttaaccagtgcataaacgctggtcatgaaatgacgaaggctatcgccattgcacagtttaatgatgacagcccggaagcgaggaaaataacccggcgctggagaataggtgaagcagcggatttagttggggtttcttctcaggctatcagagatgccgagaaagcagggcgactaccgcacccggatatggaaattcgaggacgggttgagcaacgtgttggttatacaattgaacaaattaatcatatgcgtgatgtgtttggcttggctgtagaggatactacccaaaagcatacaaagaaacgtaccggcgtctctcatattacacgccatgatatgctgcagatccctaaacagcagcaaaacgaaaaataccaagtgcctcaattcgatcaatcaacgattaaaaatattgagtctgcaaaaggacttgatgtgtgggacagctggccgctgcaaaacgctgacggaacagtagctgaatacaacggctatcacgttgtgtttgctcttgcgggaagcccgaaagacgctgatgacacatcaatctacatgttttatcaaaaggtcggcgacaactcaatcgacagctggaaaaacgcgggccgtgtctttaaagacagcgataagttcgacgccaacgatccgatcctgaaagatcagacgcaagaatggtccggttctgcaacctttacatctgacggaaaaatccgtttattctacactgactattccggtaaacattacggcaaacaaagcctgacaacagcgcagcagctgctgcagctggtgcagtttcaagaggtggatacagattttgatttcccagaagaagataaaaaagaagaatttgaagagtgtttggaaaaattttttagtacagggcccgccagaccacctaccaaagaaaaagtcaaaagacgtgtccttattgaacctggaatgccactaaatcatatagagtactgtaaccatgaaatcatgggaaaaaatgtttactacaaacaccgttgggtggcagaacattacttccttcttatgcaatatgacgagctccaaaaaatctgttacaacgaatttgtgccatctgtaattttcttgagatataaaagtccaggggaagcagcagggacctgtcacctgaaacagaggcgatgggtgatgccggaagcagcagctcctgtgggaacaggctcaagatatcctctgacaggacagttatggacatga

SEQ ID NO: 4308 - DNA, 1014 bp, Homo sapiens
  SIMILAR (186)..(239): 881254mologous to Leishmania major probable levansucrase precursor,accession number AL160371,Smith-Waterman Score=92.
atgaattcaatacagatccctaaacagcagcaaaacgaaaaataccaagtgcctcaattcgatcaatcaacgattaaatatattgagtctccaaaagagcttgatgtatgggacagctggccgctgcaaaatgctgacggaacagtagctgaatacaacggctatcacgttgcgtttgctcttgcgggaacccgaaagacgctgatgacacatcaatctacatgttttatcaaaagatataattatagtaaggatcttttgaatagaccatcctgcattgggatggtcctgaaacctatgatgcgtatcgctgtaagaaacggaaaaagagaagacacacagagatacaagagagaaagccatgtgaagagggtagagactggtattattctgtcacaaaccaagcaacttctgacaccatcagaagctggaagaagcaaggcagcgattctccccgagaaccttcagaaggagcacgcccttgctaacatcttgacttcagacttggcctccagaactgatacaactcaaattcgccagtgcgagttatctagtattgttgtcctggtttccagcaaaggaacaactccacattcaaccggcgttgtgctgaagaggttgtttatgagtcgcaacaaccggccacctctgcccctttcccggatgatctggaagatgaagcttcctcggccgcggaaaacaaaacagcccctctgcagaatcaacatatcacatccatacacgatatgcaacatcaccaaccacgactcccgtcaagctggatcactcttcagacacggcatcctatcagttgaccacccttctgaagaggccttcttccccccaatcatgtctggtagcagcataattcgaatttgcgattccgactctaatctagccaaggtagaagcgaccctggctaacggcaaatcaaagcatcattcatcaccaaaccatgccaatgccccctacaagactaacaagtcaccccatgactattacagcataccatga

SEQ ID NO: 4309 - DNA, 2299 bp, Homo sapiens
  SIMILAR (490)..(1248): 671254mologous to Leishmania major probable levansucrase precursor,accession number AL160371,Smith-Waterman Score=844.
atgccctactcgccctcttgtccttgctttgtcttcgtgggcgccgcgggatggtgtgctcctagcccctcggttcgttttgggcgatcgttgctcggtgtcgcctttgtcatttacagcttcctgagcctgtgtttccagtacctgggaggcgagggcgccatcatggctgagattcgtggaaagcccatcaacttcttcctgcgtctgtgctccgaggtgcccattttggaggacacgctgatgcgcatcctggtcatcgggctgtcccgggagctcccgctcgggcctgcggacgccatggagcttgctgaccacctggtgaagcgggcggctgccgtgcaggcggatgaaaccccggctctggcacgcacctctggggcgctccacaaagctgcgcttcagctgggtcctgggtccccgggaggctcggggacctgccttctccacatctgccgttgggaattccgcggatcctctccctatagaggagcgactcaagccttcgcgaaagaaaataaccaaaaagcatacaaagaagcgtgcggcgtctctcatattacacgccatgatatgctgcagatccctaaacagcagcaaaacgaaaaataccaagtgcctcaattcgatcaatcaacgattaaaaatattgagtctgcaaaaggacttgatgtgtgggacagctggccgctgcaaaacgctgacggaacagtagctgaatacaacggctatcacgttgtgtttgctcttgcgggaagcccgaaagacgctgatgacacatcaatctacatgttttatcaaaaggtcggcgacaactcaatcgacagctggaaaaacgcgggccgtgtctttaaagacagcgataagttcgacgccaacgatccgatcctgaaagacagacgcaagaatggtcccggtctgcaacctttacatctgacgggaaaaatccggttattctacactgactattcccgtaaacattacggcaaacaaagcctgaccacaacgcaagtcggctacaactcaatcgacagctggaaaaacgcgggccgtgtctttaaagacagcgataagttcgacgccaacgatccgatcctgaaagatcagacgcaagaatggtccggttctgcaacctttacatctgacggaaaaatccgtttattctacactgactattccggtaaacattacggcaaacaaagcctgacaacagcgcaggtaaatgtgtcaaaatctgatgacacactcaaaatcaacggagtggaagatcacaaaacgatttttgacggagacggaaaaacatatcagaacgttcagcagtttatcgatgaaggcaattatacatccggcgacaaccatacgctgagagaccctcactacgttgaagacaaaggccataaataccttgtattcgaagccaacacggggaacagaaaacggataccaaggcgaagaatctttatttaacaaagcgtactacggcggcggcacgaacttcttccgtaaagaaagccagaagcttcagcagagcgctaaaaaacgcgatgctgagttagcgaacggcgccctcggtagaggttggaacagtttggaggactcagaagaagacaggaaaatgtgggaaagtttggaactcactagagacttgctgaatggctttgaccaaaattctgataatgatatggacaatgaaatccaagctgaggtggtttcagatggagatgaggaacttcttgggagctggagtaaaggaggagcgactcaagccttcgcgaaagaaaataaccaaaaagcatacaaagaaacgtacggcgtctctcatattacacgccatgatatgctgcagatccctaaacagcagcaaaacgaaaaataccaagtgcctcaattcgatcaatcaacgattaaaaatattgagtctgcaaaaggacttgatgtgtgggacagctggccgctgcaaaacgctgacggaacagtagctgaatacaacggctatcacgttgtgtttgctcttgcgggaagcccgaaagacgctgatgacacatcaatctacatgttttatcaaaaggtcggcgacaactcaatcgacagctggaaaaacgcgggccgtgtctttaaagacagcgataagttcgacgccaacgatccgatcctgaaagatcagacgcaagagggattctttagagccccaccggcaggtttgtcaagccctacgcccttctttttcaatacatccctttattcaggtctcgcgcaagatgccacacaagggccctttgttccacggcaaggaaattaa

SEQ ID NO: 4310 - DNA, 2799 bp, Homo sapiens
  SIMILAR (406)..(1284): 1001254mologous to Cloning vector pSacBII SacB,accession number U09128,Smith-Waterman Score=1567.
atggccgtcctgcagggagccctggcccgatgcctgcggaggttggagctgtgtctgcaggggatgccttggagatgcctgtgtaggagaagggctcaggcaaggttgcctgctaaaggccagtgccacattggtacaaggtgtgccttgaggaaggacgaggaaaagcagcggaagatagggactgggctgtttgcccatgaacaaggctgccgatggaccagcatcgtggtggtggtgggctctcagctcttccttcacctggctgagttcactattgtgtctgagcccgggaccatgggaggctctgatgccagtttcctgaggctgggacccaaccgaagcctccacttagggatcaatcagggagggcttcctgtaggagttgatgccagagtgggccctggaggagcgactcaagccttcgcgaaagaaaataaccaaaaagcatacaaagaaacgtacggcgtctctcatattacacgccatgatatgctgcagatccctaaacagcagcaaaacgaaaaataccaagtgcctcaattcgatcaatcaacgattaaaaatattgagtctgcaaaaggacttgatgtgtgggacagctggccgctgcaaaacgctgacggaacagtagctgaatacaacggctatcacgttgtgtttgctcttgcgggaagcccgaaagacgctgatgacacatcaatctacatgttttatcaaaaggtcggcgacaactcaatcgacagctggaaaaacgcgggccgtgtctttaaagacagcgataagttcgacgccaacgatccgatcctgaaagatcagacgcaagaatggtccggttctgcaacctttacatctgacggaaaaatccgtttattctacactgactattccggtaaacattacggcaaacaaagcctgacaacagcgcaggtaaatgtgtcaaaatctgatgacacactcaaaatcaacggagtggaagatcacaaaacgatttttgacggagacggaaaaacatatcagaacgttcagcagtttatcgatgaaggcaattatacatccggcgacaaccatacgctgagagaccctcactacgttgaagacaaaggccataaataccttgtattcgaagccaacacgggaacagaaaacggataccaaggcgaagaatctttatttaacaaagcgtactacggcggcggcacgaacttcttccgtaaagaaagccagaagcttcagcagagcgctaaaaaacgcgatgctgagttagcgaacggcgccctcggatgctgcatcataccctgtattcatggattggtgcagagacttatagaaacagctctcaccaaaacctttaattctcccccaccttactcagataaactcctacttttagaaaaccaagcagaacagcagagtcaagacatgttaaagagtttgaagaggaagaattatgaaaatcaagagggggaagtagtaggaaacattgagttcctcttcaaagatccattgtcctctattttcaaagcctatcttccttgcctccttgcccctagttatggatgcagcagactgaagaaattcagacatcccgcaacctgcgattatcgcaaggtcaaggcaaagtccggtaatggggattcttctagagtccgcaaagacgagggaggagcgactcaagccttcgcgaaagaaaataaccaaaaagcatacaaagaaacgtacggcgtctctcatattacacgccatgatatgctgcagatccctaaacagcagcaaaacgaaaaataccaagtgcctcaattcgatcaatcaacgattaaaaatattgagtctgcaaaaggacttgatgtgtgggacagctggccgctgcaaaacgctgacggaacagtagctgaatacaacggctatcacgttgtgtttgctcttgcgggaagcccgaaagacgctgatgacacatcaatctacatgttttatcaaaaggtcggcgacaactcaatcgacagctggaaaaacgcgggccgtgtctttaaagacagcgataagttcgacgccaacgatccgatcctgaaagatcagacgcaagaatgtattgacagcgcgcctaacctgggtatcggcacgattaatgtcgtatgtgctgctgatgtgctgattgttcccacgcctgctgagttgtttgactacacctccgcactgcagtttttcgatatgcttcgtgatctgctcaagaacgttgatcttaaagggttcgagcctgatgtacgtattttgcttaccaaatacagcaatagtaatggctctcagtccccgtggatggaggagcaaattcgggatgcctggggaagcatggttctaaaaaatgttgtacgtgaaacggatgaagttggtaaagctgccccgatggtggattcgttaattgcgcgcgtaggagtaatggctcgcggtaatgccattactttgcctgtatgtggtcgggatgtgaagtttactcttgaagtgctccggggtgatagtgttgagaagacctctcgggaactgaaccggagccaagagatcggcgtgaagcccttgtcctgcggctcggcccagatctggcagcacggcaccagcctcatgaactacctgcgcatgggtaaggaaatgggccctacccggtgtgagaataaatctggacactcagcaatgtgggcagaaaggatcctcacatactgcagcaaccaggtaactctgtgcacagaccaagacagccactactgccccagatccttcccttactcacgttgttcctcctccttatga

SEQ ID NO: 4311 - DNA, 3534 bp, Homo sapiens
  SIMILAR (394)..(987): 951254mologous to Cloning vector pZC320 SopA,accession number U26464,Smith-Waterman Score=974.
  misc_feature (1)...(3534): n = a,t,c or g
atgaaactcatggaaacacttaaccagtgcataaacgctggtcatgaaatgacgaaggctatcgccattgcacagtttaatgatgacagcccggaagcgaggaaaataacccggcgctggagaataggtgaagcagcggatttagttggggtttcttctcaggctatcagagatgccgagaaagcagggcgactaccgcacccggatatggaaattcgaggacgggttgagcaacgtgttggttatacaattgaacaaattaatcatatgcgtgatgtgtttggtacgcgattgcgacgtgctgaagacgtatttccaccggtgatcggggttgctgcccataaaggtggcgtttacaaaacctcagtttctgttcatcttgctcaggatctggctctgaaggggctacgtgttttgctcgtggaagtttctgttcatcttgctcaggatctggctctgaaggggctacgtgttttgctcgtggaaggtaacgacccccagggaacagcctcaatgtatcacggatgggtaccagatcttcatattcatgcagaagacactctcctgcctttctatcttggggaaaaggacgatgtcacttatgcaataaagcccacttgctggccggggcttgacattattccttcctgtctggctctgcaccgtattgaaactgagttaatgggcaaatttgatgaaggtaaactgcccaccgatccacacctgatgctccgactggccattgaaactgttgctcatgactatgatgtcatagttattgacagcgcgcctaacctgggtatcggcacgattaatgtcgtatgtgctgctgatgtgctgattgttcccacgcctgctgagttgtttgactacacctccgcactgcagtttttcgatatgcttcgtgatctgctcaagaacgttgatcttaaagggttcgagcctgatgtacgtattttgcttaccaaatacagcaatattgatggcctgctggcctgccggggctgccgggattttgccgatttcggaaccaccatcaaacaggattttcgcctgctggggcaaaccagcgtggaccgcttgctgcaactctctcagggccaggcggtgaagggcaatcagctgttgcccgtctcactggtgaaaagaaaaaccaccctggcgcccaatacgcaaaccgcctctccccgcgcgttggccgattcattaatgcagctggcacgacaggtttcccgactggaaagcgggcatctcaacctcgggtcgctgcgcagcgcgatggcgctgaccctgcacacccacggggattctactagagccgcaagtgcaggaggagcgactcgagccttcgcgaaagaatataaccaaaaagcatacaaagaaacgtacggcgtctctcatattacacgccatgatatgctgcagatccctaaacagcagcaaaacgaaaaataccgagtgcctcaattcgatcaatcaacgattaaaaatattgagtctgcaaaaggacttgatgtgtgggacagctggccgctgcaaaacgctgacggaacagtagctgaatacaacggctatcacgttgtgtttgctcttgcgggaagcccgaaagacgctgatgacacatcaatctacatgttttatcaaaaggtcggcgacaactcaatcgacagctggaaaaacgcgggccgtgtctttaaagacagcgataagttcgacgccaacgatccgatcctgaaagatcagacgcaagaatggtccggttctgcaacctttacatctgacggaaaaatccgtttattctacactgactattccggtaaacattacggcaaacaaagcctgacaacagcgcaggtaaatgtgtcaaaatctgatgacacactcaaaatcaacggagtggaagatcacaaaacgatttttgacggagacggaaaaacatatcagaacgttcagcagtttatcgatgaaggcaattatacacccggcgacaaccatacgctgagagaccctcactacgtgaagacaaaggccatgaggggatctnctacagtagacctggatgcatgcacgaaaggcgttctgacttttacgactgcacttctggcaggaggagcgaatcaagccttcgcgaaagaaaataccaaaaaagcatacaaagaaacgtacggcgtctctcatattacacgccatgatatgctgcagatccctaaccagcagcaaaacgaaaaataccaagtgcctcaattcgatcaatcaacgattaaaaatattgagtctgcaaaaggacttgatgtgtgggacagctggccgctgcaaaacgctgacggaacagtagctgaatacaacggctatcacgttgtgtttgctcttgcgggaagcccgaaagacgctgatgacacatcaatctacatgttttatcaaaaggtcggcgacaactcaatcgacagctggaaaaacgcgggccgtgtctttaaagacagcgataagttcgacgccaacgatccgatcctgaaagatcagacgcaagaatggtccggttctgcaacctttacatctgacggaaaaatccgtttattctacactgactattccggtaaacattacggcaaacaaagcctgacaacagcgcaggtaaatgtgtcaaaatctgatgacacactcaaaatcaacggagtggaagatcacaaaacgatttttgacggagacggaaaaacatatcagaacgttcagcagtttatcgatgaaggcaattatacatccggcgacaaccatacgctgagagaccctcactacgttgaagacaaaggccataaataccttgtatcgaagccggggcgcaaggtaaatgtgtcaaaatctgatgacacactcaaaatcaacgaagtggaagatcacaaaacgatttttgacggagacggaaaaacatatcagaacgttcagcagtttatcgatgaaggcaattatacatccggcgacaaccatacgctgagagaccctcactacgttgaagacaaaggccataaataccttgtattcgaagccaacacgggaacagaaaacggataccaaggcgaagaatctttatttaacaaagcgtactacggcggcggcacgaacttcttccgtaaagaaagccagaagcttcagcagagcgctaaaaaacgcgatgctgagttagcgaacggcgccctcggtatcatagagttaaataatgattacacattgaaaaaagtaatgaagccgctgatcacttcaaacacggtaactgatgaaatcgagcgcgcgaatgttttcaaaatgaacggcaaatggtacttgttcactgattcacgcggttcaaaaatgacgatcgatggtattaactcaaacgatatttacatgcttggttatgtatcaaactctttaaccggcccttacaagccgctgaacaaaacagggcttgtgctgcaaatgggtcttgatccaaacgatgtgacattcacttactctcacttcgcagtgccgcaagccaaaggcaacaaggggggtctttag

SEQ ID NO: 4312 - DNA, 3339 bp, Homo sapiens
  SIMILAR (1927)..(2622): 971254mologous to Leishmania major probable levansucrase precursor,accession number AL160371,Smith-Waterman Score=1216.
  misc_feature (1)...(3339): n = a,t,c or g
atgaacatgaacatcaaaaaaattgtaaaacaagccacagttctgacttttacgactgcacttctggcaggaggagcgactcaagccttcgcgaaagaaaataaccaaaaagcatacaaagaaacgtacggcgtctctcatattacacgccatgatatgctgcagatccctaaacagcagcaaaacgaaaaataccaagtgcctcaattcgatcaatcaacgattaaaaatattgagtctgcaaaaggacttgatgtgtgggacagctggccgctgcaaaacgctgacggaacagtagctgaatacaacggctatcacgttgtgtttgctcttgcgggaagcccgaaagacgctgatgacacatcaatctacatgttttatcaaaaggtcggcgacaactcaatcgacagctggaaaaacgcgggccgtgtctttaaagacagcgataagttcgacgccaacgatccgatcctgaaagatcagacgcaagaantgacagctgggtatgtggtggaaagagcactgaaactgaaatcaagatatcagctgtttgatgtagcagaggagttacctgagcaactcaagtatgactttctcatgttctgggaccacggtcccactcgtatcgtcggtctgattattagtctgggaccacggtcccactcgtatcgtcggtctgataatcagactgggaccacggtcccactcgtatcgtcggcccgagccggcacgttaaaccggggactgaggttgaaacctgtttggtggactctaaagaacccccgtcggcgacactcatcgacgctggaaaacgcgggccgtgtctttaaagacagcgataagttcgacgccaacgatccgatcctgaaagatcagacgcaagaatggtccggttctgcaacctttacatctgacggaaaaatccgtttattctacactgactattccggtaaacattacggcaaacaaagcctgacaacagcgcaggtaaatgtgtcaaaatctgatgacacactcaaaatcaacggagtggaagatcacaaaacgatttttgacggagacggaaaaacatatcagaacgttcagcagtttatcgatgaaggcaattatacatccggcgacaaccatacgctgagagaccctcactacgttgaagacaaaggccataaataccttgtattcgaagccaacacgggaacagaaaacggataccaaggcgaagaatctttatttaacaaagcgtactacggcggcggcacgaacttcttccgtaaagaaagccagaagcttcagcagagcgctaaaaaacgcgatgctgagttagcgaacggcgccctcggtatcatagagttaaataatgattacacattgaaaaaagtaatgaagccgctgatcacttcaaacacgtgctcagcttcaccagacctgcccccagtattcagttggacttctgctgatgttacctctaagtgtgacaatctaaaaacttgtcacacttcacatggatctgtcatggcggaaacagcggttatcaatcacaagaaacgtaaaaatagcccgcgaatcgtccagtcaaacgacctcactgaggcggcatatagtctctcccgggatcaaaaacgtatgctggtttttgggcctactccccttcacccttgggggatgtcaccattgcttttcacgtggccaccctcctgtccgttggctttcgcgtggggagtgcctgctgcctctgcggcggtcacgtcgccccggagagcctctgagctctggctgcccacgatgggagtcctctggggggcgccggagccgtgccgggtccccgccgcaggggacagtaacgcggagtctgcctggccggcggaaagggggtgctggggaacacagccgcaccccactctgctcgggaaagccctgagatccccagaacgtacggccgtctctcatattacacgccatgatatgctgcagatccctaaacagcagcaaaacgaaaaataccaagtgcctcaattcgatcaatcaacgattaaaaatattgagtctgcaaaaggacttgatgtgtgggacagctggccgctgcaaaacgctgacggaacagtagctgaatacaacggctatcacgttgtgtttgctcttgcgggaagcccgaaagacgctgatgacacatcaatctacatgttttatcaaaaggtcggcgacaactcaatcgacagctggaaaaacgcgggccgtgtctttaaagacagcgataagttcgacgccaacgatccgatcctgaaagatcagacacaagaatggtccggttctgcaacctttacatctgacggaaaaatccgtttattctacactgactattccggtaaacattacggcaaacaaagcctgacaacagcgcacgtgaatgtgtcaaaatctgatgacacactcaaaatcaacggagtggaagatcacacaacgatttttgacggagacggagaaacatatcagaacgttcagcagtttatcgatgaaggcaattatacatccggcgacaaccatacgctgagagaccctcactacgttgaagacaaaggccataaataccttgtattcgaagccaacacgggaacagaaaacggattggactacccagcgcagaaatatttccagcaaattcattctgcaatcggcttgcataacgctgaccacgttcataagcacttgttgggcgataatcgttacccaatctggataatgcagccatctgctcatcatccagctcgccaaccagaacacgataatcactttcggctcgaaccctttaagatcaacgttcttgagcagatcacgaagcatatcgaaaaactgcagtgcggaggtgtagtcaaacaactcagcaggcgtgggaacaatcagcacatcagcagcacatacgacattaatcgtgccgatacccaggttaggcgcgctgtcaataactatgacatcatagtcatgagcaacagtttcaatggccagtcggagcatcagaaccggtttacgcagtttcggcttagtgaaacaaaagaaatcaccaatccgtatgccatgcgtttatacgaatccctgtgtcagtatcgtaagccggatggctcaggcatcgtctctctgaaaatcgactggatcatagagcgttaccagctgcctcaaagttaccagcgtatgcctgacttccgccgccgcttcctgcaggtctgtgttaatgagatcaacagcagaactccaatgcgcctctcatacattgagaaaaagaaaggccgccagacgactcatatcgtattttccttccgcgatatcacttccatgacgacaggatag

SEQ ID NO: 4313 - DNA, 1774 bp, Homo sapiens
  SIMILAR (479)..(1129): 931254mologous to Leishmania major probable levansucrase precursor,accession number AL160371,Smith-Waterman Score=1069.
atgaagcgtgcgcctgttattccaaaacatacgctcaatactcaaccggttgaagatacttcgttatcgacaccagctgccccgatggtggattcgttaattgcgcgcgtaggagtaatggctcgcggtaatgccattactttgcctgtatgtggtcgggatgtgaagtttactcttgaagtgctccggggtgatagtgttgagaagacctctcgggtatggtcaggtaatgaacgtgaccaggagctgcttactgaggacgcactggatgatctcatcccttcttttctactgactggtcaacagacaccggcgttcggtcgaagagtatctggtgtcatagaaattgccgatgggagtcgccgtcgtaaagctgctgcacttaccgaaagtgattatcgtgttctggttggcgagctggatgatgagcagatggctgcattatccagattgggaggagcgactcaagccttcgcgaaagaaaataaccaaaaaggcatacaaagaaacgtacggcgtctctcatattacacgccatgatatgctgcagatccctaaacagcagcaaaacgaaaaataccaagtgcctcaattcgatcaatcaacgattaaaaatattgagtctgcaaaaggacttgatgtgtgggacagctggccgctgcaaaacgctgacggaacagtagctgaatacaacggctatcacgttgtgtttgctcttgcgggaagcccgaaagacgctgatgacacatcaatctacatgttttatcaaaaggtcggcgacaactcaatcgacagctggaaaaacgcgggccgtgtctttaaagacagcgataagttcgacgccaacgatccgatcctgaaagatcagacgcaagaatggtccggttctgcaacctttacatctgacggaaaaatccgtttattctacactgactattccggtaaacattacggcaaacaaagcctgacaacagcgcaggtaaatgtgtcaaaatctgatgacacactcaaaatcaacggagtggaagatcacaaaacgatttttgacggagacggaaaaacatatcagaacgttcagcagtttatcgatggttatctcctagagccggacggcggggctttgcagaactttcagcggtataccggcatacagcatgtgcatcgcataggaatggcggaacgtatgtggtgtgaccggaacagagaacgtcacaccgtcagcagcagcggcggcaaccgcctccccaatccaggtcctgaccgttctgtccgtcacttcccagatccgcgctttctctgtccttcctgtgcgacggttacgccgctccatgagcttatcgcgaataaatacctgtcggggaaaattggagctaagaaactgcggaagcttttgataaaacatgtagattgatgtgtcatcagcgtctttcgggcttcccgcaagagcaaacacaacgtgatagccgttgtattcagctactgttccgtcagcgttttgcagcggccagctgtcccacacatcaagtccttttgcagactcaatatttttaatcgttgattgatcgaattgaggcacttggtatttttcgttttgctgctgtttagggatctgcagcatatcatggcgtgtaatatgagagacgccgtacgtttctttgtatgctttttggttattttctttcgcgaaggcttgagtcgctcctcctgccagaagtgcagtcgtaaaagtcagaactgtggcttgttttacaatttttttgatgttcatgttcat

SEQ ID NO: 4314 - DNA, 2319 bp, Homo sapiens
  SIMILAR (1)..(588): 981254mologous to Leishmania major probable levansucrase precursor,accession number AL160371,Smith-Waterman Score=1019.
atgaacatcaaaaaaattgtaaaacaagccacagttctgacttttacgactgcacttctggcaggaggagcgactcaagccttcgcgaaagaaaataaccaaaaagcatacaaagaaacgtacggcgtctctcatattacacgccatgatatgctgcagatccctaaacagcagcaaaacgaaaaataccaagtgcctcaattcgatcaatcaacgattaaaaatattgagtctgcaaaaggacttgatgtgtgggacagctggccgctgcaaaacgctgacggaacagtagctgaatacaacggctatcacgttgtgtttgctcttgcgggaagcccgaaagacgctgatgacacatcaatctacatgttttatcaaaaggtcggcgacaactcaatcgacagctggaaaaacgcgggccgtgtctttaaagacagcgataagttcgacgccaacgatccgatcctgaaagatcagacgcaagaatggtccggttctgctacctttacatctgacggaaaaatccgtttattctacactgactatttcggtaaacattacgggcaacaaaggctgacaacagcgcagggagtggagcaactgctgttagtcaagcagcttattgtgccccctaaaaaggagaaagtggccatcaatcggatataccttgaggaatggtccaacctagcatggatgaacctccggtttttcgatatgcttcgtgatctgctcaagaacgttgatcttaaagggttcgagcctgatgtacgtattttgcttaccaaatacagcaatagtaatggctctcagtccccgtggatggaggagcaaattcgggatgcctggggaagcatggttctaaaaaatgttgtacgtgaaacggatgaagttggtaaagctgccccgatggtggattcgttaattgcgcgcgtaggagtaatggctcgcggtaatgccattactttgcctgtatgtggtcgggatgtgaagtttactcttgaagtgctccggggtgatagtgttgagaagacctctcgggtatggtcaggtaatgaacgtgaccaggagctgcttactgaggacgcactggatgatctcatcccttcttttctactgactggtcaacagacaccggcgttcggtcgaagagtatctggtgtcatagaaattgccgatgggagtcgccgtcgtaaagctgctgcacttaccgaaagtgattatcgtgttctggtaggcgagctggatgatgagcagatggctgcattatccagattgggtaacgattatcgcccaacaagtgcttatgaactttgcctgaataagcatgtgatccgggctctcatcaaacagctgaaggagaaaaatgagggtcaaagcatggagactttgacggggctacgaatggctcttaactcctgggctgctgtctctaaagacaaggcccctgattttgaagatcacagaatttgctgctctggtatttatgagtattcttcagagaaagaagggaaccggaacctcctgctgcccaaattcaaaccatggaaatatgttatcttcccgtcaattcgggaggatcgaaacggcagatcgcaaaaaacagtacatacagaaggagacatgaacatgaacatcaaaaaaattgtaaaacaagccacagttctgacttttacgactgcacttctggcaggaggagcgactcaagccttcgcgaaagaaaataaccaaaaagcatacaaagaaacgtacggcgtctctcatattacacgccatgatatgctgcagatccctaaacagcagcaaaacgaaaaataccaagtgcctcaattcgatcaatcaacgattaaaaatattgagtctgcaaaaggacttgatgtgtgggacagctggccgctgcaaaacgctgacggaacagtagctgaatacaacggctatcacgttgtgtttgctcttgcgggaagcccgaaagacgctgatgacacatcaatctacatgttttatcaaaaggtcggcgacaactcaatcgacagctggaaaaacgcgggccgtgtctttaaagacagcgataagttcgacgccaacgatccgatcctgaaagatcagacgcaagaatggtccggttctgcaacctttacatctgacggaaaaatccgtttattctacactgactatgaattccaccacatgctctgctggcagataagccaaaaccaatccatgtcctacttcttgaccatatcctgcctgtccctggcaggaaaattcagccttcttaaggggttgagcccatcaaaagccagctgcgggacagaaaagtga

SEQ ID NO: 4315 - DNA, 2524 bp, Homo sapiens
  SIMILAR (886)..(1590): 961254mologous to unidentified cloning vector 29kD protein essential for the replication of mini F plasmid,accession number AB015619,Smith-Waterman Score=1179.
atgtacttgccgagtgagaaccgaacacagacgctctcgcccttgcctccaaacccagtatctcgctacagctggtgcattggaagttatgagcacaaacagatgctgcagagaaatctgtttctattgctcaactgttccaagcatgtctcagtatttttagctctggggatgttctggaggagcgactcaagccttcgcgaaagaaaataaccaaaaagcatacaaagaaacgtacggcgtctctcatattacacgccatgatatgctgcagatccctaaacagcagcaaaacgaaaaataccaagtgcctcaattcgatcaatcaacgattaaaaatattgagtctgcaaaaggacttgatgtgtgggacagctggccgctgcaaaacgctgacggaacagtagctgaatacaacggctatcacgttgtgtttgctcttgcgggaagcccgaaagacgctgatgacacatcaatctacatgttttatcaaaaggtcggcgacaactcaatcgacagctggaaaaacgcgggccgtgtctttaaagacagcgataagttcgacgccaacgatccgatcctgaaagatcagacgcaagaatggtccggttctgcaacctttacatctgacggaaaaatccgtttattctacactgactattccggtaaacattacggcaaacaaagcctgacaacagcgcaagtaaatgtgtcaaaatctaatgacacactcaaaatcaacggagtgggaaaatacaaaacgatttttgacggggacgggaaaacatatcagaccgttcagcagtttatcgatgaagggaattatacatccggcggacaccatacgcttgaaagacccctcctacaatcccccactggatctgtctggcggaaacagcggttatcaatcacaagaaacgtaaaaatagcccgcgaatcgtccagtcaaacgacctcactgaggcggcatatagtctctcccgggatcaaaaacgtatgctggatctgttcgttgaccagatcagaaaatctgatggcaccctacaggaacatgacggtatctgcgagatccatgttgctaaatatgctgaaatattcggattgacctctgcggaagccagtaaggatatacggcaggcattgaagagtttcgcggggaaggaagtggttttttatcgccctgaagaggatgccggcgatgaaaaaggctatgaatcttttccttggtttatcaaacgtgcgcacagtccatccagagggctttacagtgtacatatcaacccatatctcattcccttctttatcgggttacagaaccggtttacgcagtttcggcttagtgaaacaaaagaaatcaccaatccgtatgccatgcgtttatacgaatccctgtgtcagtatcgtaagccggatggctcaagcatcgtctctctgaaaatcgactggatcatagagcgttaccagctgcctcaaagttaccagcgtatgcctgacttccggcgccgcttactgcaggtctgtgttaatgagatcaacagcagaactccaatgcgcctctcatacattgagaaaagaaggccggcagagactatatcggattttcttcgcgaatcccttcctgcaaaggatatctgagtcaattcgggaggatcgaaacggcagatcgcaaaaaacagtacatacagaaggagacatgaacatgaacatcaaaaaaattgtaaaacaagccacagttctgacttttacgactgcacttctggcaggaggagcgactcaagccttcgcgaaagaaaataaccaaaaagcatacaaagaaacgtacggcgtctctcatattacacgccatgatatgctgcagatccctaaacagcagcaaaacgaaaaataccaagtgcctcaattcgatcaatcaacgattaaaaatattgagtctgcaaaaggacttgatgtgtgggacagctggccgctgcaaaacgctgacggaacagtagctgaatacaacggctatcacgttgtgtttgctcttgcgggaagcccgaaagacgctgatgacacatcaatctacatgttttatcaaaaggtcggcgacaactcaatcgacagctggataaacgcgggccgtgtctttaaagacagcgataagttcgacgccaaccatccgatcctgaaagatcagacgcaagaatgtcaggcaccgtgtatgaaatctaacaatgcgctcatcgtcatcctcggcaccgtcaccctggatgctgtaggcataggcttggttatgccggtactgccgggcctcttgcgggatatcgtccattccgacagcatcgccagtcactatggcgtgctgctagcgctatatgcgttgatgcaatttctatgcgcacccgttctcggagcactgtccgaccgctttggccgccgcccagtcctgctcgcttcgctacttggagccactatcgactacgcgatcatggcgaccacacccgtcctgtggatctacccactagtcaattcaccatcttgttga

SEQ ID NO: 4316 - DNA, 3118 bp, Homo sapiens
  SIMILAR (469)..(1071): 1001254mologous to Cloning vector pSacBII SacB,accession number U09128,Smith-Waterman Score=1070.
atgaacatgaacatcaaaaaaattgtaaaacaagccacagttctgacttttacgactgcacttctggcaggaggagcgactcaagccttcgcgaaagaaaataaccaaaaagcatacaaagaaacgtacggcgtctctcatattacacgccatgatatgctgcagatccctaaacagcagcaaaacgaaaaataccaagtgcctcaattcgatcaatcaacgattaaaaatattgagtctgcaaaaggacttgatgtgtgggacagctggccgctgcaaaacgctgacggaacagtagctgaatacaacggctatcacgttgtgtttgctcttgcgggaagcccgaaagacgctgatgacacatcaatctacatgttttatcaaaaggtcggcgacaactcaatcgacagctggaaaaacgcgggccgtgtctttaaagacagcgataagaccccactcaatcgacgctggaaaaacgcgggccgtgtctttaaagacagcgataagttcgacgccaacgatccgatcctgaaagatcagacgcaagaatggtccggttctgcaacctttacatctgacggaaaaatccgtttattctacactgactattccggtaaacattacggcaaacaaagcctgacaacagcgcaggtaaatgtgtcaaaatctgatgacacactcaaaatcaacggagtggaagatcacaaaacgatttttgacggagacggaaaaacatatcagaacgttcagcagtttatcgatgaaggcaattatacatccggcgacaaccatacgctgagagaccctcactacgttgaagacaaaggccataaataccttgtattcgaagccaacacgggaacagaaaacggataccaaggcgaagaatctttatttaacaaagcgtactacggcggcggcacgaacttcttccgtaaagaaagccagaagcttcagcagagcgctaaaaaacgcgatgctgagttagcgaacggcgccctcggtatcatagagttaaataatgattacacattgaaaaaagtaatgaagccgctgatcacttcaaacacgagcttgacggggaaagcccgccaaccgtgcgaagaaagaagggaaaaagacgaaggaagcggcgctagggcgctggcagtgttagcggtacacctgcacaaaacacaaaccagcgcgacgaggagcgactcaagccttcgcgaaagaaaataaccaaaaagcatacaaagaaacgtacggcgtctctcatattacacgccatgatatgctgcagatccctaaacagcagcaaaacgaaaaataccaagtgcctcaattcgatcaatcaacgattaaaaatattgagtctgcaaaaggacttgatgtgtgggacagctggccgctgcaaaacgctgacggaacagtagctgaatacaacggctatcacgttgtgtttgctcttgcgggaagcccgaaagacgctgatgacacatcaatctacatgttttatcaaaaggtcggcgacaactcaatcgacagctggaaaaacgcgggccgtgtctttaaagacagcgataagttcgacgccaacgatccgatcctgaaagatcagacgcaagaatggtccggttctgcaacctttacatctgacggaaaaatccgtttattctacactgactattccggtaaacattacggcaaacaaagcctgacaacagcgcaggtaaatgtgtcaaaatctgatgacacactcaaaatcaacggagtggaagatcacaaaacgatttttgacggagacggaaaaacatatcagaacgttcagcagtttatcgatgaaggcaattatacatccggcgacaaccatacgctggagagacccctcactacgttgaaaacaaaggccataaataccttggattcgaaaccaacacgggaacagaaaacggataccaaggcgaagaatctttatttaacaaagcgtactacggcggcggcacgaacttcttccgtaaagaaagccagaagcttcagcagagcgctaaaaaacgcgatgctgagttagcgaacggcgccctcggtatcatagagttaaataatgattacacattgaaaaaagtaatgaagccgctgatcacttcaaacacggtaactgatgaaatcgagcgcgcgaatgttttcaaaatgaacggcaaatggtacttgttcactgattcacgcggttcaaaaatgacgatcgatggtattaactcaaacgatatttacatgcttggttctgatgaatcccctaatgattttggtaatcgtcacctccacaaagagcgactcgctgtataccgttggcatgctagctttatctgttcgggcaatacgatgcccattgtacttgttgactggtctgatattcgtgagcaaaaacgacttatggtattgcgagcttcagtcgcactacacggtcgttctgttactctttatgagaaagcgttcccgctttcagagcaatgttcaaagaaagctcatgaccaatttctagccgaccttgcgagcattctaccgagtaacaccacaccgctcattgtcagtgatgctggctttaaagtgccatggtataaatccgttgagaagctgggttggtactggttaagtcgagtaagaggaaaagtacaatatgcagacctaggagcggaaaactggaaacctatcagcaacttacatgatatgtcatctagtcactcaaagactttaggctataagaggctgactaaaagcaatccaatctcatgccaaattctattgtataaatctcgctctaaaggccgaaaaaatcagcgctcgacacggactcattgtcaccacccgtcacctaaaatctactcagcgtcggcaaaggagccatgggttctagcaactaacttacctgttgaaattcgaacacccaaacaacttgttaatatctattcgaagcgaatgcagattgaagaaaccttccgagacttgaaaagtcctgcctacggactaggcctacgccatagccgaacgagcagctcagagcgttttgatatcatgctgctaatcgccctgatgcttcaactaacatgttggcttgcgggcgttcatgctcagaaacaag

SEQ ID NO: 4317 - DNA, 1329 bp, Homo sapiens
  SIMILAR (235)..(831): 1001254mologous to Leishmania major probable levansucrase precursor,accession number AL160371,Smith-Waterman Score=1051.
atgatcttcttcgtcttggtcatctttgtgggttctttctatctggtgaacttgatcttggctgtggtggccatggcttatgaagaacagaatcaggcaacactggaggaggcagaacaaaaagaggctgaatttaaagcaatgttggagcaacttaagaagcaacaggaagaggcacagtcaattcggaggtatcgaaacggcagatgccaaaaaccagtacatacagaaggagacatgaacatgaacatcaaaaaaattgtaaaacaagccacagttctgacttttacgactgcacttctggcaggaggagcgactcaagccttcgcgaaagaaaataaccaaaaagcatacaaagaaacgtacggcgtctctcatattacacgccatgatatgctgcagatccctaaacagcagcaaaacgaaaaataccaagtgcctcaattcgatcaatcaacgattaaaaatattgagtctgcaaaaggacttgatgtgtgggacagctggccgctgcaaaacgctgacggaacagtagctgaatacaacggctatcacgttgtgtttgctcttgcgggaagcccgaaagacgctgatgacacatcaatctacatgttttatcaaaaggtcggcgacaactcaatcgacagctggaaaaacgcgggccgtgtctttaaagacagcgataagttcgacgccaacgatccgatcctgaaagatcagacgcaagaatggtccggttctgcaacctttacatctgacggaaaaatccgtttattctacactgactattccggtaaacattacggcaaacaaagcctgacaacagcgcagacccaacaccaggtcgtgtgggtgacaaagtccggtggagtcaaaggattgagaaaaagacagtttgagagagaaatgtgggcatcagggggccattgcgattgtggaggctgtgaaggccctgagctctgggagtccacgttatttattggtaattcaacaaagaaacatatggcaaggacagagaaagcgcggatctgggaagtgacggacagaacgggcatgacctggattggggaggcgggtgccgccgctgctgctgacggtgtgacgttctctgttccggtcacaccacatacgttccgccattcctatgcgatgcacatgctgtatgccggtataccgctgaaaggtctgcaaagcctgatgggacataactccatcagttcaacggaagtctacacgaaggtttttgcgctggatgtggctgcccggcaccgtgtgcaatttgcgatgcccgagtctgatgctgttgcgatgctgaaacaattatcctga

SEQ ID NO: 4318 - DNA, 4390 bp, Homo sapiens
  SIMILAR (2544)..(3815): 711254mologous to Cloning vector pBACe3.6 levansucrase,accession number U80929,Smith-Waterman Score=1517.
atgaacatgaacatcaaaaaaattgtaaaacaagccacagttctgacttttacgactgcacttctggcaggaggagcgactcaagccttcgcgaaagaaaataaccaaaaagcatacaaagaaacgtacggcgtctctcatattacacgccatgatatgctgcagatccctaaacagcagcaaaacgaaaaataccaagtgcctcaattcgatcaatcaacgattaaaaatattgagtctgcaaaaggacttgatgtgtgggacagctggccgctgcaaaacgctgacggaacagtagctgaatacaacggctatcacgttgtgtttgctcttgcgggaagcccgaaagacgctgatgacacatcaatctacatgttttatcaaaagggattttgccgatttcggaaccaccatcaaacaggattttcgcctgctggggcaaaccagcgtggaccgcttgctgcaactctctcagggccaggcggtgaagggcaatcagctgttgcccgtctcactggtgaaaagaaaaaccaccctggcgcccaatacgcaaaccgcctctccccgcgcgttggccgattcattaatgcagctggcacgacaggtttcccgactggaaagcgggcagtgagcgcaacgcaattaataaccagtgccaaaagagaaaagaagaagaggggacagacaagaacaccaacaaccatgcaggaacaccgagggcacggccctgagggtgtgggccgcacgggatcaaactctttaaccggccctgacgagccgctgaacaaaacagggcttgtgctgcaaatgggtcttgatccaaacgatgtgacaaacaattactctcacttcgcagtgccgcaagccaaaggcaacaataaaaaaatcacaagaaacatgacaaacagaggcttcttcgaggataaaaaggcaacatttgcgccaagcttcttaatgaacatcaaaggcaataaaacatccgttgtcaaaaacagcatcctggagcaaaacactggggttgggggcggggtgccggagaggggggccaacggccctgaaaagacgggtgattccgcccctgggccgtgggaagaccgcggttctttgaatagtggactccttgttccagagactggacaaaaccaccgaaccctatcccggggctattctgtggaaataataaggattatgcccgatttcggaaccaccatcaaacaggattttcgcctgcgggggcaaaccagcgtggaccgcttgctgcaactctctcagggccaggcggtgaagggcaatcagctgttgcccgtctcactggtgaaaagaaaaaccaccctggcgcccaatacgcaaaccgcctctccccgcgcgttggccgattcattaatgcagctggcacgacaggtttcccgactggaaagcgggcaggattttgccgatttcggaaccaccatcaaacaggattttcgcctgctggggcaaaccagcgtggaccgcttgctgcaactctctcagggccaggcggtgaagggcaatcagctgttgcccgtctcactggtgaaaagaaaaaccaccctggcgcccaatacgcaaaccgcctctccccgcgcgttggccgattcattaatgcagctggcacgacaggtttcccgactggaaagcgggcacccgagggggagagggaccgccaaaaaaacactgaaggaaagtgagggccagaggagaggttgctcacaacacaagagccaacagcccaaccgggagagttccaaaaaggagaaaaaagcaagggattttgccgatttcggaaccaccatcaaacaggattttcgcctgctggggcaaaccagcgtggaccgcttgctgcaactctctcagggccaggcggtgaagggcaatcagctgttgcccgtctcactggtgaaaagaaaaaccaccctggcgcccaatacgcaaaccgcctctccccgcgcgttggccgattcattaatgcagctggcacgacaggtttcccgactggaaagcgggcagtgagcgcaacgcaattaatacactgttctgtatgtgaactcatttactccttagaacagctctataaggatggtcttactatgtgccctgctttgcagatctggaatctgaggcaaggtcacaccactagattttgccgatttcggaaccaccatcaaacaggattttcgcctgctggggcaaaccagcgtggaccgcttgctgcaactctctcagggccaggcggtgaagggcaatcagctgttgcccgtctcactggtgaaaagaaaaaccaccctggcgcccaatacgcaaaccgcctctccccgcgcgttggccgattcattaatgcagctggcacgacaggtttcccgactggaaagcgggcagtgagcgcaacgcaattaatggattttgccgatttcggaaccaccatcaaacaggattttcgcctgctggggcaaaccagcgtggaccgcttgctgcaactctctcagggccaggcggtgaagggcaatcagctgttgcccgtctcactggtgaaaagaaaaaccaccctggcgcccaatacgcaaaccgcctctccccgcgcgttggccgattcattaatgcagctggcacgacaggtttcccgactggaaagcgggcagctgtctgcaaagggccattcccaacttcaacagatccctaaacagcagcaaaacgaaaaataccaagtgcctcaattcgatcaatcaacgattaaaaatattgagtctgcaaaaggacttgatgtgtgggacagctggccgctgcaaaacgctgacggaacagtagctgaatacaacggctatcacgttgtgtttgctcttgcgggaagcccgaaagacgctgatgacacatcaatctacatgttttatcaaaaggtcggcgacaactcaatcgacagctggaaaaacgcgggccgtgtctttaaagacagcgataagttcgacgccaacgatccgatcctgaaagatcagacgcaagaatggtccggttctgcaacctttacatctgacggaaaaatccgtttattctacactgactattccggtaaacattacggcaaacaaagcctgacaacagcgcaggtaaatgtgtcaaaatctgatgacacactcaaaatcaacggagtggaagatcacaaaacgatttttgacggagacggaaaaacatatcagaacgttcagcagtttatcgatgaaggcaattatacatccggcgacaaccatacgctgagagaccctcactacgttgaagacaaaggccataaataccttgtattcgaagccaacacgggaacagaaaacggataccaaggcgaagaatctttatttaacaaagcgtactacggcggcggcacgaacttcttccgtaaagtaagccagaagcttcagcagagcgctaaaaaacgcgatgctgagttagcgaacggcgccctcggtatcatagagttaaataatgattacacattgaaaaaagtaatgaagccgctgatcacttcaaacacgatccctaaccagcagcaaaacgaaaaataccaagtgcctcaattcgatcaatcaacgattaaaatatttgagtctgcaaaaggacttgatgtgtgggacagctggccgctgcaaaacgctgacggaacagtagctgaatacaacggctatcacgttgtgtttgctcttgcgggaagcccgaaagacgctgatgacacatcaatctacatgttttatcaaaaggtcggcgacaactcaatcgacagctggaaaaacgcgggccgtgtctttaaagacagcgataagttcgacgccaacgatccgatcctgaaagatcagacgcaagaatggtccggttctgcaacctttacatctgacggaaaaatccgtttattctacactgactattccggtaaacattacggcaaacaaagcctgacaacagcgcaggtaaatgtgtcaaaatctgatgacacactcaaaatcaacggagtggaagatcacaaaacgatttttgacggagacggaaaaacatatcagaacgttcagcagtttatcgatgaaggcaattatacatccggcgacaaccatacgctgagagaccctcactacgttgaagacaaaggccataaataccttgtattcgaagccaacacgggaacagaaaacggataccaaggcgaagaatctttatttaacaagcccatagatacagtgcctgttccagtggaggtggcggagggtgcaatggactccatgagagtccttagctttggtggcttaatgctctatttttgtgctgattggcctcctgccagtaggtggtgttttccagaaaccgtcagctgcagtagtgtggagagggaccgacg

SEQ ID NO: 4319 - DNA, 7271 bp, Homo sapiens
  SIMILAR (6315)..(6821): 881254mologous to Cloning vector pBACe3.6 levansucrase,accession number U80929,Smith-Waterman Score=782.
  misc_feature (1)...(7271): n = a,t,c or g
atgaacatgaacatcaaaaaaattgtaaaacaagccacagttctgacttttacgactgcacttctggcaggaggagcgactcaagccttcgcgaaagaaaataaccaaaaagcatacaaagaaacgtacggcgtctctcatattacacgccatgatatgctgcagatccctaaacagcagcaaaacgaaaaataccaagtgcctcaattcgatcaatcaacgattaaaaatattgagtctgcaaaaggacttgatgtgtgggacagctggccgctgcaaaacgctgacggaacagtagctgaatacaacggctatcacgttgtgtttgctcttgcgggaagcccgaaagacgctgatgacacatcaatctacatgttttatcanaagataatgaagcgtgcgcctgttattccaaaacatacgctcaatactcaaccggttgaagatacttcgttatcgacaccagctgccccgatggtggattcgttaattgcgcgcgtaggagtaatggctcgcggtaatgccattactttgcctgtatgtggtcgggatgtgaagtttactcttgaagtgctccggggtgatagtgttgagaagacctctcgggtatggtcaggtaatgaacgtgaccaggagctgcttactgaggacgcactggatgatctcatcccttcttttctactgactggtcaacagacaccggcgttcggtcgaagagtatctggtgtcatagaaattgccgatgggagtcgccgtcgtaaagctgctgcacttaccgaaagtgattatcgtgttctggttggcgagctggatgatgagcagatggctgcattatccagattgggtaacgattatcgcccaacaagtgcttatgaacgtggtcagcgttatgcaagccgattgcagaatgaatttgctggaaatatttctgcgctggctgatgcggaaaatatttcacgtaagattatttacccgctgtatcaacaccgccaaattgcctaaatcagttggtgctcttttttctcaccccggtgaaactatctgcccgggcaggtgcgactctaaagaaccccctcttgagagcgactcagccttcgcgaagaaaataccaaaaacatacaaagaaacgtacggcgtctctcatattacacgccatgatatgctgcagatccctaaacagcagcaaaacgaaaaataccaagtgcctcaattcgatcaatcaacgattaaaaatattgagtctgcaaaaggacttgatgtgtgggacagctggccgctgcaaaacgctgacggaacagtagctgaatacaacggctatcacgttgtgtttgctcttgcgggaagcccgaaagacgctgatgacacatcaatctacatgttttatcaaaaggtcggcgacaactcaatcgacagctggaaaaacgcgggccgtgtctttaaagacagcgataagttcgacgccaacgatccgatcctgaaagatcagacgcaagaatggtccggttctgcaacctttacatctgacggaaaaatccgtttattctacactgactattccggtaaacattacggcaaacaaagcctgacaacagcgcagtttttcgtgtcaggaattcctcgctttgtccacaacccctggcacatagcagtgttggaagttctggccagggcaattaggcaggagaaggaaataaagggtattcagttaggaaaagaggaagtcaaattgtccctgtttgcagatgacatgattgtatatctagaaaaccccattgtctcagcccaaaatctccttaagctgataagcaacttcagcaaagtctcaggatacaaaatcaatgtacaaaaatcacaagcattcttatacaccaacaacagacaaacagagaaccaaatcatgagtgaactcccattcacaattgcttcaaagagaataaaatacctaggaatccaacttacaagggatgtgaaggacctcttcaaggagaactacaaaccactgctcaaggaaataaaagaggatacaaacaaatggaagaacattccatgctcatgggtaggaagaatcaatatcgtgaaaatggccatactgcccaagggaagcataggtttctgcctgcctgcagagtttaggcagaagtgggaccactgggctggaagcactagcaatgtgacccatctggccacaggaggtggaatgagtgaagtttcctgccctgccatctggtgcttccagtacaaaaggtggctgtgtaccttgacaaattcaggtagaagaaagactgctcagctggaagctctagcaagcataaacttcctggctaccagaggcagaggaggagcgactcaagccttcgcgaaagaaaataaccaaaaagcatacaaagaaacgtacggcgtctctcatattacacgccatgatatgctgcagatccctaaacagcagcaaaacgaaaaataccaagtgcctcaattcgatcaatcaacgattaaaaatattgagtctgcaaaaggacttgatgtgtgggacagctggccgctgcaaaacgctgacggaacagtagctgaatacaacggctatcacgttgtgtttgctcttgcgggaagcccgaaagacgctgatgacacatcaatctacatgttttatcaaaaggtcggcgacaactcaatcgacagctggaaaaacgcgggccgtgtctttaaagacagcgataagttcgacgccaacgatccgatcctgaaagatcagacgcaagaatggtccggttctgcaacctttacatctgacggaaaaatccgtttattctacactgactattccggtaaacattacggcaaacaaagcctgacaacagcgcagaccgttcagctggatattacggcctttttaaagaccgtaaagaaaaataagcacaagttttatccggcctttattcacattcttgcccgcctgatgaatgctcatccggagttccgtatggcaatgaaagacgtctgggaccacgatcccactcgtgttgtcggtctgattatcggtctgggaccacggtcccacttgtattgtcgatcagactatcagcgtgagactacgattccatcaatgcctgtcaagggcaaggattttgccgatttcggaaccaccatcaaacaggattttcgcctgctggggcaaaccagcgtggaccgcttgctgcaactctctcagggccaggcggtgaagggcaatcagctgttgcccgtctcactggtgaaaagaaaaaccaccctggcgcccaatacgcaaaccgcctctccccgcgcgttggccgattcattaatgcagctggcacgacaggtttcccgactggaaagcgggcaggattttgccgatttcggaaccaccatcaaacaggattttcgcctgctggggcaaaccagcgtggaccgcttgctgcaactctctcagggccaggcggtgaagggcaatcagctgttgcccgtctcactggtgaaaagaaaaaccaccctggcgcccaatacgcaaaccgcctctccccgcgcgttggccgattcattaatgcagctggcacgacaggtttcccgactggaaagcgggcaggattttgccgatttcggaaccaccatcaaacaggattttcgcctgctggggcaaaccagcgtggaccgcttgctgcaactctctcagggccaggcggtgaagggcaatcagctgttgcccgtctcactggtgaaaagaaaaaccaccctggcgcccaatacgcaaaccgcctctccccgcgcgttggccgattcattaatgcagctggcacgacaggtttcccgactggaaagcgggcanggcaaatattatacgcaaggcgacaaggtgctgatgccgctggcgattcagatccctaaacagcagcaaaacgaaaaataccaagtgcctcaattcgatcaatcaacgattaaaaatattgagtctgcaaaaggacttgatgtgtgggacagctggccgctgcaaaacgctgacggaacagtagctgaatacaacggctatcacgttgtgtttgctcttgcgggaagcccgaaagacgctgatgacacatcaatctacatgttttatcaaaaggtcggcgacaactcaatcgacagctggaaaaacgcgggccgtgtctttaaagacagcgataagttcgacgccaacgatccgatcctgaaagatcagacgcaagaatggtccggttctgcaacctttacatctgacggaaaaatccgtttattctacactgactattccggtaaacaccacggcaaacaaagcctgacaacagcgcaggtaaatgtgtcaaaatctgatgacacactcaaaatcaacggagtggaagatcacaaaacgatttttgacggagaacggaaaacatatcagaacgttcagcagtttatcgatgaaggcaattatacatccggcgacaaccatacgctgagagaccctcactaccaaaatacgtacatcaggctcgaaccctttaagatcaacgttcttgagcagatcacgaagcatatcgaaaaactgcagtgcggaggtgtagtcaaacaactcagcaggcgtgggaacaatcagcacatcagcagcacatacgacattaatcgtgccgatacccaggttaggcgcgctgtcaataactatgacatcatagtcatgagcaacagtttcaatggccagtcggagcatcagnatgggcggaaaactgtcctcctggctgatgtgaaagatctgggccccttcccgggttcgttgaaggctgttacctgggggggaggaccttacaaaaaaaaaacgcttgaggtgctgacccgcggttcgactctagaggatccccttctgacttttacgactgcacttctggcaggaggagcgactcaagccttcgcgaaagaaaataaccaaaaagcatacaaagaaacgtacggcgtctctcatattacacgccatgatatgctgcagatccctaaacagcagcaaaacgaaaaataccaagtgcctcaattcgatcaatcaacgattaaaaatattgagtctgcaaaaggacttgatgtgtgggacagctggccgctgcaaaacgctgacggaacagtagctgaatacaacggctatcacgttgtgtttgctcttgcgggaagcccgaaagacgctgatgacacatcaatctacatgttttatcaaaaggtcggcgacaactcaatcgacagctggaaaaacgcgggccgtgtctttaaagacagcgataagttcgacgccaacgatccgatcctgaaagatcagacgcaagaatggtccggttctgcaacctttacatctgacggaaaaatccgtttattctacactgactattccggtaaacattacggcaaacaaagcctgacaacagcgcaggagcagtacctgcctggtgccattgcactttttaatgtgaacaacagcagcaataaggaccaaggatcccctgctctgctcaagaacgttgatcttaaagggttcgagcctgatgtacgtattttgcttaccaaatacagcaatagtaatggctctcagtccccgtggatggaggagcaaattcgggatgcctggggaagcatggttctaaaaaatgttgtacgtgaaacggatgaagttggtaaagatacttcgttatcgacaccagctgccccgatggtggattcgttaattgcgcgcgtaggagtaatggctcgcggtaatgccattactttgcctgtatgtggtcgggatgtgaagtttactcttgaagtgctccggggtgatagtgttgagaagacctctcgggtatggtcaggtaatgaacgtgaccaggagctgcttactgaggacgcactggatgatctcatcccttcttttctactgactggtcaacagacaccggcgttcggtcgaagagtatctggtgtcatagaaattgccgatgggagtcgccgtcgtaaagctgcttgcacttaccgaaagtgattatcgtgttctggttggcgagctggatgatgagcagatggctgcattatccagattgggtaacgattatcgcccaacaagtgcttatgaacgtggtcagcgttatgcaagccgattgcagaatgaatttgctggaaatatttctgcgctggctgatgcggaaaatatttcacgtaagattattacccgctgtatcaacaccgccaaattgcctaaatcagttgttgctcttttttctcaccccggtgaactatctgcccgggagatagccgagcgatatcttcattataatttcttcgcctttcggcgcattcagatccctaaacagcagcaaaacgaaaaataccaagtgcctcaattcgatcaatcaacgattaaaaatattgagtctgcaaaaggacttgatgtgtgggacagctggccgctgcaaaacgctgacggaacagtagctgaatacaacggctatcacgttgtgtttgctcttgcgggaagcccgaaagacgctgatgacacatcaatctacatgttttatcaaaaggtcggcgacaactcaatcgacagctggaaaaacgcgggccgtgtctttaaagacagcgataagttcgacgccaacgatccgatcctgaaagatcagacgcaagaatggtccggttctgcaacctttacatctgacggaaaaatccgtttattctacactgactattccggtaaacattacggcaaacaaagcctgacaacagcgcaggttaggcgcgctgtcaataactatgacatcatagtcatgagcaacagtttcaatggccagtcggagcatcaggtgtggatcgtaatgaagccgctgatcacttcaaacacggtaactgatgaaatcgagcgcgcgaatgttttcaaaatgaacggcaaatggtacttgttcactgattcacgcggttcaaaaatgacgatcgatggtattaactcaaacgatatttacatgcttggttatgtatcaaactctttaaccggcccttacaagccgctgaacaaaacagggcttgtgctgcaaatgggtcttgatccaaacgatgtgacattcacttactctcacttcgcagtgccgcaagccaaaagcaacaatgtggttatcacaagctacatgacaaacagaggcttcttcgaggataaaaaggcaacatttgcgccaagcttcttaatgaacatcaaaggcaataaaacatccgttgtcaanaacagcatcctggagcaaggacagctgacagtcaactaa

SEQ ID NO: 4320 - DNA, 3604 bp, Homo sapiens
  SIMILAR (541)..(1155): 1001254mologous to Cloning vector pZC320 SopA,accession number U26464,Smith-Waterman Score=1083.
  misc_feature (1)...(3604): n = a,t,c or g
atgaacatgaacatcaaaaaaattgtaaaacaagccacagttctgacttttacgactgcacttctggcaggaggagcgactcaagccttcgcgaaagaaaataaccaaaaagcatacaaagaaacgtacggcgtctctcatattacacgccatgatatgctgcagatccctaaacagcagcaaaacgaaaaataccaagtgcctcaattcgatcaatcaacgattaaaaatattgagtctgcaaaaggacttgatgtgtgggacagctggccgctgcaaaacgctgacggaacagtagctgaatacaacggctatcacgttgtgtttgctcttgcgggaagcccgaaagacgctgatgacacatcaatctacatgttttatcaaaaggtcggcgacaactcaatcgacagctggaaaaacgcgggccgtgtctttaaagacagcgataagttcgacgccaacgatccgatcctgaaagatcagacgcaagaatggtccggttctgcaacctttacatctgacggaaaaatccgtttgtggtgcataaacgctggtcatgaaatgacgaaggctatcgccattgcacagtttaatgatgacagcccggaagcgaggaaaataacccggcgctggagaataggtgaagcagcggatttagttggggtttcttctcaggctatcagagatgccgagaaagcagggcgactaccgcacccggatatggaaattcgaggacgggttgagcaacgtgttggttatacaattgaacaaattaatcatatgcgtgatgtgtttggtacgcgattgcgacgtgctgaagacgtatttccaccggtgatcggggttgctgcccataaaggtggcgtttacaaaacctcagtttctgttcatcttgctcaggatctggctctgaaggggctacgtgttttgctcgtggaaggtaacgacccccagggaacagcctcaatgtatcacggatgggtaccagatcttcatattcatgcagaagacactctcctgcctttctatcttggggaaaaggacgatgtcacttatgcaataaagcccacttgctggccggggcttgacattattccttcctgtctggctctgcaccgtattgaaactgagttaatgggcaaatttgatgaaggaggagcgactcaagccttcgcgaaagaaaataaccaaaaagcatacaaagaaacgtacggcgtctctcatattacacgccatgatatgctgcagatccctaaacagcagcaaaacgaaaaataccaagtgcctcaattcgatcaatcaacgattaaaaatattgagtctgcaaaaggacttgatgtgtgggacagctggccgctgcaaaacgctgacggaacagtagctgaatacaacggctatcacgttgtgtttgctcttgcgggaagcccgaaagacgctgatgacacatcaatctacatgttttatcaaaaggtcggcgacaactcaatcgacagctggaaaaacgcgggccgtgtctttaaagacagcgataagttcgacgccaacgatccgatcctgaaagatcagacgcaagaatggtccggttctgcaacctttacatctgacggaaaaatccgtttattctacactgactattccggtaaacattaccggcaaacaaagcctgacaacagcgcaggcattgccccaaacactgaccctcaactgtgtttgcagaaatttgctctttgaaacagaaaagcgaaagctcatggagcggcgtaaccgtcgcacaggaaggacagagaaagcgcggatctgggaagtgacggacagaacggtcaggacctggattggggaggcggttgccgccgctgctgctgacggtgtgacgttctctgttccggtcacaccacatacgttccgccattcctatgcgatgcacatgctgtatgccggtataccgctgaaagttctgcaaagcctgatgggacataagtccatcagttcaacggaagtctacacgaaggtttttgcgctggatgtggctgcccggcaccgggtgcagtttgcgatgccggagtctgatgcggttgcgatgctgaaacaattatcctgagaataaatgccttggcctttatatggaaatgtggaactgagtggatatgctgtttttgtcgcctggccctgagagagttgcagcaagcggtccacgctggtttgccccagcaggcgaaaatcctgtttgatggtggttccgaaatcggcaaaatccattaattgcgttgcgctcactgcccgctttccagtcgggaaacctgtcgtgccagctgcattaatgaatcggccaacgcgcggggagaggcggtttgcgtattgggcgccagggtggtttttcttttcaccagtgagacgggcaacagctgattgcccttcaccgcctggccctgagagagttgcagcaagcggtccacgctggtttgccccagcaggcgaaaatcctgtttgatggtggttccgaaatcggcaaaatccctgcgctgttgtcaggctttgtttgccgtaatgtttaccggaatagtcagtgtagaataaacggatttttccgtcagatgtaaaggttgcagaaccggaccattcttgcgtctgatctttcaggatcggatcgttggcgtcgaacttatcgctgtctttaaagacacggcccgcgtttttccagctgtcgattgagttgtcgccgaccttttgataaaacatgtagattgatgtgtcatcagcgtctttcgggcttcccgcaagagcaaacacaacgtgatagccgttgtattcagctactgttccgtcagcgttttgcagcggccagctgtcccacacatcaagtccttttgcagactcaatatttttaatcgttgattgatcgaattgaggcacttggtatttttcgttttgctgctgtttagggatctgcagcatatcatggcgtgtaatatgagagacgccgtacgtttctttgtatgctttttggttatttttctttcgcgaaagcttgagtcgctcctccagctatcggcgagacaatgccgtcctgagcgtcgctaacccgttcacgattccagatgaccatgtctttcgggaccggcttgtcgaacgcatattcgttatgcgggtagtcagcgtggcagataacgattttacgttcagcggtaaccagctcgatgacgaatggcaggctggccgatttatgaaccagagccttagccagcacctctttttcataatcaagactgaagaaccacacgccgccgttttccagccagtggttaacgtttccatactccgatagcccatcaatcatcatctgctcatggttacctcgcacagcccggaaccaaggcatagtaatcagctccaggcactcgacgttttccgcgccgcggtcaacaaggtctccaaccgaaatcagcaaatcacacgcagggtcgaacgaaaccttttcgagttcattcatcagcagcgtgtagcacccatgcagatcgccgacgacgaanatattgcgccagtcagcgccattaatgcgttgatacatgctcatgcagattttctcctcgccgcgagtcgcagccat

SEQ ID NO: 4321 - DNA, 7326 bp, Homo sapiens
  SIMILAR (1)..(600): 981254mologous to Leishmania major probable levansucrase precursor,accession number AL160371,Smith-Waterman Score=1036.
  misc_feature (1)...(7326): n = a,t,c or g
atgacattgaacatcaaaaaaattgtaaaacaagccacagttctgacttttacgactgcacttctggcaggaggagcgactcaagccttcgcgaaagaaaataaccaaaaagcatacaaagaaacgtacggcgtctctcatattacacgccatgatatgctgcagatccctaaacagcagcaaaacgaaaaataccaagtgcctcaattcgatcaatcaacgattaaaaatattgagtctgcaaaaggacttgatgtgtgggacagctggccgctgcaaaacgctgacggaacagtagctgaatacaacggctatcacgttgtgtttgctcttgcgggaagcccgaaagacgctgatgacacatcaatctacatgttttatcaaaaggtcggcgacaactcaatcgacagctggaaaaacgcgggccgtgtctttaaagacagcgataagttcgacgccaacgatccgataaagaaagatcagacgcaagaatggtccggttctgcaacctttacatctgacggaaaaatccgtttattctacactgactattccggtaaacattacggcaaacaaagcctgacaacagcgcagaccaaccgaagagccaattcatgggtgaatttcccattccccattgctttcaaagagattaaaatccctggaatcccaacttccaggggaggtgaaggcctctcaaaggaaacttccaaaccccggttcaaggaaatcaaagaggatccaacccaatggaagaactttccatgctcatgggtaggaagaatcattatcgtgaaaagggccatactgcccaaggtaatttcaagattcaatgccatccccatcaagctaccaatgactttcttcacagaattggaaaaaactactttaaagttcatatggaaccaaaaaagagcccgcatcgccaagtcaatcctaagccaaaagaacaaagctggagtcatcacactacctgacttcaaactctactgcaaggctacagtaaccaaaacagcatgttacataagagtttacataacaggatttacattcctgtcactaaccagttacaatgctggctataagcatggatcggctgctggcccaaggaccacactttcagtagtacaggtcatgctgatgcaagaggtgggctcccatggctttgggcagctctgtccctgtggctttgcagggtacagcccccctcctggctgctttcctgggctggtgttgagtgtctgtggcttttccaggtgcacagtgcaagctgtcagtggatctaccattctgggtctggttgacagtggcccttttctcacagctccaccagtgagatgccttgctctccctttgccttctgccatgattgtaaccttcctgaggccttaccagaagcgcatgccggtgttatgcttcctgtacagcctgcagaacggtcatgctgatgcaagatgtgggttcctctggtcttgggcagctctgcccctgtggctttgcagggtacagcccccctcctggctgctttcatgggctggtgttgtgtgtctgtggcctttccaggtgcatggtgcaagctgtcggtggagctaccattctgtggtctggttgatggtggccctcttctcacagctccactaggcagtgccccagtgggtactctgtgtgggggctcagaccccacatttctcttctgcactgcgctgttgtcaggctttgtttgccgtaatgtttaccggaatagtcagtgtagaataaacggatttttccgtcagatgtaaaggttgcagaaccggaccattcttgcgtctgatctttcaggatcggatcgttggcgtcgaacttatcgctgtctttaaagacacggcccgcgtttttccagctgtcgattgagttgtcgccgaccttttgataaaacatgtagattgatgtgtcatcagcgtctttcgggcttcccgcaagagcaaacacaacgtgatagccgttgtattcagctactgttccgtcagcgttttgcagcggccagctgtcccacacatcaagtccttttgcagactcaatatttttaatcgttgattgatcgaattgaggcacttggtatttttcgttttgctgctgtttagggatctgcagcatatcatggcgtgtaatatgagagacgccgtacgtttctttgtatgctttttggttattttctttcgcgaaggcttgagtcgctcctcctgccagaagtgcagtcgtaaaagtcagaactgtggcttgttttacaatttttttgatgttcatgttcatgtctccttctgtatgtactgttttttgcgatctgccgtttcgatcctcccgaatgatagggtttttcctngtgaaaattttccgcatcagccagcgcagaaatatttccagcaaattcattctgcaatcggcttgcataacgctgaccacgttcataagcacttgttgagcgataatcgttacccaatctggataatgcagccatctgctcatcatgcagctcgccaaccagaaggcgataatcactttcggtaagtgcatcagctttacgacggcgactcccatcggcaatttctatgacaccagatactcttcgaccgaacgccggtgtctgttgaccagtcagtagaaaagaagggatgagatcatccagtgcgtcctcagtaagcagctcctggtcacgttcattacctgaccatacccgagaggtcttctcaacactatcacccaggagcacttcaagagtaaacttcacatcccgaccacatacaggcaaagtaatggcattaccgcgagccattactcctacgcgcgcaattaacgaatccaccatcggggcagctggtgtcgataacgaattatcttcaaccggttgagtattgagcgtatgtgccccgccctgccactcatcgcagggctgggggaattcattaaacattctgccgacatggaagccatcacaaacggcatgatgaacctgaatcgccagcggcatcagcaccttgtcgccttgcgtataatatttgcccatggtgaaaacgggggcgaagaagttgtccatattggccacgtttaagtgagaactggtgaaactcacccagggattggctgagacgaaaaacatattctcaataaaccctttagggaaataggccaggttttcaccgtaacacgccacatcttgcgaatatatgtgtagaaactgccggaaatcgtcgtggtattcactccagagcgatgaaaacgtttcagtttgctcatggaaaacggtgtaacaagggtgaacactatcccatatcaccagctcaccgtctttcattgccatacggaactccggatgagcattcatcaggcgggcaagaatgtgaataaaggccggataaaacttgtgcttatttttctttacggtctttaaaaaggccgtaatatccagctgaacggtctgcgctgttgtcaggctttgtttgccgtaatgtttaccggaatagtcagtgtagaataaacggatttttccgtcagatgtaaaggttgcagaaccggaccattcttgcgtctgatctttcaggatcggatcgttggcgtcgaacttatcgctgtctttaaagacacggccccgcgtttttccaagctgtcgattgagttgtcgccgaccttttgataaaacatgtagattgatgtgtcatcagcgtctttcgggcttcccgcaagagcaaacacaacgtgatagccgttgtattcagctactgttccgtcagcgttttgcagcggccagctgtcccacacatcaagtccttttgcagactcaatatttttaatcgttgattgatcgaattgaggcacttggtatttttcgttttgctgctgtttagggatctgcagcatatcatggcgtgtaatatgagagacgccgtacgtttctttgtatgctttttggttattttctttcgcgaaggcttgagtcgctcctcggaagaagttcgtgccgccgccgtagtacgctttgttaaataaagattcttcgccttggtatccgttttctgttcccgtgttggcttcgaatacaaggtatttatggcctttgtcttcaacgtagtgagggtctctcagcgtatggttgtcgccggatgtataattgccttcatcgataaactgctgaacgttctgatatgtttttccgtctccgtcaaaaatcgttttgtgatcttccactccgttgattttgagtgtgtcatcagattttgacacatttacctgcgctgttgtcaggctttgtttgccgtaatgtttaccggaatagtcagtgtagaataaacggatttttccgtcagatgtaaaggttgcagaaccggaccattcttgcgtctgatctttcaggatcggatcgttggcgtcgaacttatcgctgtctttaaagacacggcccgcgtttttccagctgtcgattgagttgtcgccgaccttttgataaaacatgtagattgatgtgtcatcagcgtctttcgggcttcccgcaagagcaaacacaacgtgatagccgttgtattcagctactgttccgtcagcgttttgcagcggccagctgtcccacacatcaagtccttttgcagactcaatatttttaatcgttgattgatcgaattgaggcacttggtatttttcgttttgctgctgtttagggatctgcagtatatcatttttgtatatttgagagacgccgtacgtttgatactgacacagggattcgtataaacgcatggcatacggattggtgatttcttttgtttcactaagccgaaactgcgtaaaccggttctgtaacccgataaagaagggaatgagatatgggttgatatgtacactgtaaagccctctggatggactgtgcgcacgtttgataaaccaaggaaaagattcatagcctttttcatcgccggcatcctcttcagggcgataaaaaaccacttccttccccgcgaaactcttcaatgcctgccgtatatccttactggcttccgcagaggtcaatccgaatatttcagcatatttagcaacatggatctcgcagataccgtcatgttcctgtagggtgccatcagattttctgatntgcgctgttgtcaggctttgtttgccgtaatgtttaccggaatagtcagtgtagaataaacggatttttccgtcagatgtaaaggttgcagaaccggaccattcttgcgtctgatctttcaggatcggatcgttggcgtcgaacttatcgctgtctttaaagacacggcccgcgtttttccagctgtcgattgagttgtcgccgaccttttgataaaacatgtagattgatgtgtcatcagcgtctttcgggcttcccgcaagagcaaacacaacgtgatagccgttgtattcagctactgttccgtcagcgttttgcagcggccagctgtcccacacatcaagtccttttgcagactcaatatttttaatcgttgattgatcgaattgaggcacttggtatttttcgttttgctgctgtttagggatctgcgctgttgtcaggctttgtttgccgtaatgtttaccggaatagtcagtgtagaataaacggatttttccgtcagatgtaaaggttgcagaaccggaccattcttgcgtctgatctttcaggatcggatcgttggcttcgaacttatcgctgtctttaaaaacacggcccgcgtttttccagctgtcgattgagttgtcgccgaccttttgataaaacatgtagattgatgtgtcatcagcgtctttcgggcttcccgcaagagcaaacacaacgtgatagccgttgtattcagctactgttccgtcagcgttttgcagcggccagctgtcccacacatcaagtccttttgcagactcaatatttttaatcgttgattgatcgaattgaggcacttggtatttttcgttttgctgctgtttagggatctgcagcatatcatggcgtgtaatatgagagacgccgtacgtttctttgtatgctttttggtccttttctttcgcgaaggcttgagtcgctcctcctgccagccctcccctcgtaaaagtcagaactttaccaacttcatccgtttcacgtacaacattttttagaaccatgcttccccaggcatcccgaatttgctcctccatccacggggactgagagccattactattgctgtatttggtaagcaaaatacgtacatcaggctcgaaccctttaagatcaacgttcttgagcagatcacgaagcatatcgaaaaactgcagtgcggaggtgtagtcaaacaactcagcaggcgtgggaacaatcagcacatcagcagcacatacgacattaatcgtgccgatacccaggttaggcgcgctgtcaataactatgacatcatagtcatgagcaacagtttcaatggccagtcggagcatcaggtgtggatcggggggcagtttaccttcatcaaatttgcccattaaatcgcacttttgataaaacatgtagattgatgtgtcatcagcgtctttctggcttcccgcaagagcaaacacgggggggtagccgttgtattcagctactgttccgtcagcgttttgcagcggccagctgtcccacacatcaagtccttttgcagactcaatatttttaatcgttgattgatcgaattgaggcacttggtatttttcgttttgctgctgtttagggatctgcagcatatcatggcgtgtaatatgagagacgccgtacgtttctttgtatgctttttggttattttctttcgcgaaggcttgagtcgctcctccggaccattcttgcgtctgatctttcaggatcggatcgttggcgtcgaacttatcgctgtctttaaagacacggcccgcgtttttgggggtgtcgattgagttgtcgccgaccttttgataaaacatgtagattgatgtgtcatcagcgtctttcgggcttcccgcangagcaaacacaacgtgatagccgttgtattcagctactgttccgtcagcgttttgcagcggccagctgtcccacacatcaagtccttttgcagactcaatatttttaatcgttgattgatcgaattgaggcacttggtatttttcgttttgctgctgtttagggatctgcatcatatcatggcgtgtcatatgagagacgccgtacgtttctttgtttgctttttggttattttctttcgcgaaggcttgagtcgctcctcctgccggaagtgcagtctttaaagtcagaactggggcttggtttacaatttttttggtgttcatgttcat

SEQ ID NO: 4322 - DNA, 6058 bp, Homo sapiens
  SIMILAR (462)..(1208): 821254mologous to Cloning vector pSacBII SacB,accession number U09128,Smith-Waterman Score=1035.
  misc_feature (1)...(6058): n = a,t,c or g
atgctagaggatccccggaagggactggagacacctagtcctgtttcccacaaccttcattttcagttccaccttggaccgctgctgcctgggtcacccatgaagaagtggcctgccctggtagtcacaggttccaagtcgcccaagctggagagctacaagcacttccagaaaatctgggacatgcatggtgaaccatccaaacgggaagaaggagcagggctcacagtcaaccagcatatccccaacggagcttcaacttgcaatgaaggcccacagcgcctggaggccttgggggcccgaattccgatggctgccgggttttcctcttccaagcccaccttggtgaccccccgaagggcctatcgggctgaccttcgacttgagggctactggggttgccagggcgtgcccggtggaccccttgtggcccaaggaggagcgactcaagcctttcgcgaaaagaaaataaccaaaaagcatacaaagaaacgtacggcgtctctcatattacacgccatgatatgctgcagatccctaaacagcagcaaaacgaaaaataccaagtgcctcaattcgatcaatcaacgattaaaaatattgagtctgcaaaaggacttgatgtgtgggacagctggccgctgcaaaacgctgacggaacagtagctgaatacaacggctatcacgttgtgtttgctcttgcgggaagcccgaaagacgctgatgacacatcaatctacatgttttatcaaaaggtcggcgacaactcaatcgacagctggaaaaacgcgggccgtgtctttaaagacagcgataagttcgacgccaacgatccgatcctgaaagatcagacgcaagaatggtccggttctgcaacctttacctttgaacggaaaaattcctttattctacactgactattccggtaaacattacggcaaacaaagcctgacaacagcgcaggtaaatgggtcaaaatctgatgaaccactcaaaatcaacggagggggaagatcaccaaacgaatgtttgagggagaccggaaaacatatcagaacgttcagcagtttatcgatgaaggcaattatacatccggcgacaaccatacgctgagagaccctcactacgttgaagacaaaggccataaataccttgtattcgaagccaacacgggaacagaaaacggataccaaggcgaagaaactttggctatcagagatgccgagaaagcagggcgactaccgcacccggatatggaaattcgaggacgggttgagcaacgtgttggttatacaattgaacaaattaatcatatgcgtgatgtgtttggtacgcgattgcgacgtgctgaagacgtatttccaccggtgatcggggttgctgcccataaaggtggcgtttacaaaacctcagtttctgttcatcttgctcaggatctggctctgaaggggctacgtgttttgctcgtggaaggtaacgacccccagggaacagcctcaatgtatcacggatgggtaccagatcttcatattcatgcagaagacactctcctgcctttctatcttggggaaaaggacgatgtcacttatgcaataaagcccacttgctggccggggcttgacattattccttcctgtctggctctgcaccgtattgaaactgagttaatgggcaaatttgatgaaggtaaactgcccaccgatccacacctgatgctccgactggccattgaaactgttgctcatgactatgatgtcatagttattgacagcgcgcctaacctgggtatcggcacgattaatgtcgtatgtgctgctgatgtgctgattgttcccacgcctgctgagttgtttgactacacctccgcactgcagtttttcgatatgcttcgtgatctgctcaagaacgttgatcttaaagggttcgagcctgattcaattcgggaggatcgaaacggcagatcgcaaaaaacagtacatacagaaggagacatgaacatgaacatcaaaaaaattgtaaaacaagccacagttctgacttttacgactgcacttctggcaggaggagcgactcaagccttcgcgaaagaaaataaccaaaaagcatacaaagaaacgtacggcgtctctcatattacacgccatgatatgctgcagatccctaaacagcagcaaaacgaaaaataccaagtgcctcaattcgatcaatcaacgattaaaaatattgagtctgcaaaaggacttgatgtgtgggacagctggccgctgcaaaacgctgacggaacagtagctgaatacaacggctatcacgttgtgtttgctcttgcgggaagcccgaaagacgctgatgacacatcaatctacatgttttatcaaaaggtcggcgacaactcaatcgacagctggaaaaacgcgggccgtgtctttaaagacagcgataagttcgacgccaacgatccgatcctgaaagatcagacgcaagaatggtccggttctgcaacctttacatctgacggaaaaaatccggttatttctacacttgactatttccggttaaacattacggccaaacaaagcctgacaacagcgcagtgtgacaatctaaaaacttgtcacacttcacatggatctgtcatggcggaaacagcggttatcaatcacaagaaacgtaaaaatagcccgcgaatcgtccagtcaaacgacctcactgaggcggcatatagtctctcccgggatcaaaaacgtatgctgtatctgttcgttgaccagatcagaaaatctgatggcaccctacaggaacatgacggtatctgcgagatccatgttgctaaatatgctgaaatattcggattgacctctgcggaagccagtaaggatatacggcaggcattgaagagtttcgcggggaaggaagtggttttttatcgccctgaagaggatgccggcgatgaaaaaggctatgaatcttttccttggtttatcaaacgtgcgcacagtccatccagagggctttacagtgtacatatcaacccatatctcattcccttctttatcgggttacagaaccggtttacgcagtttcggcttagtgaaacaaaagaaatcaccaatccgtatgccatgcgtttatacgaatccctgtgtcagtatcgtaagccggatggctcaggcatcgtctttctgaaaatgactggacaaaaacagcatatccactcagttccacatttccatataaaggccaaagcatttattctcaagatatttgtttcagcatcgcaaccgcatcagactccggcatcgcaaactggacccgggtccccggcagccacaatccagcgcaaaacctttcgggtagacatccggggtcaggcaccgtgtatgaaatctaacaatgcgctcatcgtcatcctcggcaccgtcaccctggatgctgtaggcataggcttggttatgccggtactgccgggcctcttgcgggatatcgtccattccgacagcatcgccagtcactatggcgtgctgctagcgctatatgcgttgatgcaatttctatgcgcacccgttctcggagcactgtccgaccgctttggccgccgcccagtcctgctcgcttcgctacttggagccactatcgactacgcgatcatggcgaccacaccctcaattcgggaggatcgaaacggcagatcgcaaaaaacagtacatacagaaggagacatgaacatgaacatcaaaaaaattgtaaaacaagccacagttctgacttttacgactgcacttctggcaggaggagcgactcaagccttcgcgaaagaaaataaccaaaaagcatacaaagaaacgtacggcgtctctcatattacacgccatgatatgctgcagatccctaaacagcagcaaaacgaaaaataccaagtgcctcaattcgatcaatcaacgattaaaaatattgagtctgcaaaaggacttgatgtgtgggacagctggccgctgcaaaacgctgacggaacagtagctgaatacaacggctatcacgttgtgtttgctcttgcgggaagcccgaaagacgctgatgacacatcaatctacatgttttatcaaaaggtcggcgacaactcaatcgacagctggaaaaacgcgggccgtgtctttaaagacagcgataagttcgacgccaacgatcgcggtggatctctagaaaaactgggtttcagccttagtgctggcggttggtggcaaggcatctgtcaggcaccgtgtatgaaatctaacaatgcgctcatcgtcatcctcggcaccgtcacctggaatgctgtaggcataggcttggttatgccggtactgccgggcctcttgcgggatatcgtccattcggacagcatcgccagtcactatggcgtgctgctagcgctatatgcgttgatgcaatttctatgcgcacccgttctcggagcactgtccgaccgctttggccgccgcccagtcctgctcgcttcgctacttggagccatgtcagctgtccttgctccaggatgctgtttttgacaacggatgttttattgcctttgatgttcattaagaagcttggcgcaaatgttgcctttttatcctcgaagaagcctctgtttgtcatgtagcttgtgataaccacattgttgcctttggcttgcggcacatnttgccgttcattttgaaaacattcgcgcgctcgattttcatcagttaccgtgtttgaagtgatcagcggcttcattacttttttcaatgtgtaatcattatttaactctatgataccgagggcgccgttcgctaactcagcatcgcgttttttagcgctctgctgaagcttctggctttctttacggaagaagttcgtgccgccgccgtagtacgctttgttaaataaagattcttcgccttggtatccgttttctgttcccgtgttggcttcgaatacaaggtatttatggcctttgtcttcaacgtagtgagggtctctcagcgtatggttgtcgccggatgtataattgccttcatcgataaactgctgaacgttctgatatgtttttccgtctccgtcaaaaatcgttttgtgatcttccactccgttgattttgagtgtgtcatcagattttgacacatttacctgcgctgttgtcaggctttgtttgccgtaatgtttaccggaatagtcagtgtagaataaacggatttttccgtcagatgtaaaggttgcagaaccggaccattcttgcgtctgatctttcaggatcggatcgttggcgtcgaacttatcgctgtctttaaagacacggcccgcgtttttccagctgtcgattgagttgtcgccgaccttttgataaaacatgtagattgatgtgtcatcagcgtctttcgggcttcccgcaagagcaaacacaacgtgatagccgttgtattcagctactgttccgtcagcgttttgcagcggccagctgtcccacacatcaagtccttttgcagactcaatatttttaatcgttgattgatcgaattgaggcacttggtatttttcgttttgctgctgtttagggatctgcagcatatcatggcgtgtaatatgagagacgccgtacgtttctttgtatgctttttggttattttctttcgcgaaggcttgagtcgctcctcctgccagaagtgcagtcgtaaaagtcagaactgtggcttgttttacaatttttttgatgttcatgttcatggcttcctctgtatgtactggttttttgcgatctgccggttccgatccttccgaattgactaatgggttaggccctggcggccggcctctgacttgctgttctagactaaggatgactgccacggcttgatgaagaataaggagttttgtttggggtttttcactcttcaagtgaagctgacacattcggccaagctctttgaatgcttcattaatatcccgcacgcgtaagcgttctctggcattgttagccatccgcctctccttctccctttctatcttctgttcagggttcaaatcctcatcttcattagtactg

SEQ ID NO: 4323 - DNA, 3688 bp, Homo sapiens
  SIMILAR (2801)..(3529): 971254mologous to Leishmania major probable levansucrase precursor,accession number AL160371,Smith-Waterman Score=1268.
  misc_feature (1)...(3688): n = a,t,c or g
atgaacatgaacatcaaaaaaattgtaaaacaagccacagttctgacttttacgactgcacttctggcaggaggagcgactcaagccttcgcgaaagaaaataaccaaaaagcatacaaagaaacgtacggcgtctctcatattacacgccatgatatgctgcagatccctaaacagcagcaaaacgaaaaataccaagtgcctcaattcgatcaatcaacgattaaaaatattgagtctgcaaaaggacttgatgtgtgggacagctggccgctgcaaaacgctgacggaacagtagctgaatacaacggctatcacgttgtgtttgctcttgcgggaagcccgaaagacgctgatgacacatcaatctacatgttttatcanaagtttaatgatgacagcccggaagcgaggaaaataacccggcgctggagaataggtgaagcagcggatttagttggggtttcttctcaggctatcagagatgccgagaaagcagggcgactaccgcacccggatatggaaattcgaggacgggttgagcaacgtgttggttatacaattgaacaaattaatcatatgcgtgatgtgtttggtacgcgattgcgacgtgctgaagacgtatttccaccggtgatcggggttgctgcccataaaggtggcgtttacaaaacctcagtttctgttcatcttgctcaggatctggctctgaaggggctacgtgttttgctcgtggaaggtgacgacccccagggaacagcctcaatgtatcacggatgggtaccagatcttcatattcatgcagaagacactctcctgcctttctatcttggggaaaaggacgatgtcacttatgcaataaagcccacttgctggccggggcttgacattattccttcctgtctggctctgcaccgtattgaaactgagttaatgggcaaatttgatgaaggtgaactgcccaccgatccacacctgatgctccgactgggcattgaaactgttgctcatgactatgatgtcatagttattgacagcgcgcctaacctgggtatcggcacgattaatgtcgtatgtgctgctgatgtgctgattgttccacgcctgctgagactgcagtgcgactctatagatccccttctggcaggaggagcgacttcaagccttcgcgaaaagaaaataaccaaaaagcatacaaagacacgtacggcgtctctcatattacacgccatgatatgctgcagatccctaaacagcagcaaaacgaaaaataccaagtgcctcaattcgatcaatcaacgattaaaaatattgagtctgcaaaaggacttgatgtgtgggacagctggccgctgcaaaacgctgacggaacagtagctgaatacaacggctatcacgttgtgtttgctcttgcgggaagcccgaaagacgctgatgacacatcaatctacatgttttatcaaaaggtcggcgacaactcaatcgacagctggaaaaacgcgggccgtgtctttaaagaacagcgataagttcgacgccaacgatcccgatcctggaaggatcagacgcaagaatggggccgggttctggaaccttttcatcttacgggaaaaataccgtttattctacactgacctatttccgggaaacattacgggaaaacaaaccctggcaaccaccgccaggaaaggtggcaaaaatttgatgacccacttcaaaatcaacggagtgggagaaccccaaaaccaatttttgacggagaccggaaagggagtctttagagtcccccaatggattaaagacttaaatgtaggggggtctttagagtcgccctacgagcatgcaagtctgagtccgaatgaaatggattccgtgagcatccttggtggtattttggcagaggagcctcaccacgtggccactgccaccacaagcccacaggtagtactgccagtctactgccagtgttcccttaaggcccaagaaatacaaactaccatcagagaatactacaaacacctctacgcaaataaactagaaaatctagaagaaatggataaattcctcgacacatacactctcccaagactaaaccaggaagaagttgaatctctgaatagaccaaaaacaggatctgaaattgtggcaataatcaatagtttaccaaccaaaaagagtccaggaccagatggattcacagccgaattctaccagagggattttgccgatttcggaaccaccatcaaacaggattttcgcctgctggggcaacaccagcgtggaccgcttgctgcaactctctcagggccaggcggtgaagggcaatcagctgttgcccgtctcactggtgaaaagaaaaaccaccctggcgcccaatacgcaaaccgcctctccccgcgcgttggccgattcattaatgcagctggcacgacaggtttcccgactggaaagcgggcaggattttgccgaattcggaaccaccatgatacaggattttcgcctgctgggcataaccagcgtggaccgcttacgacaactctctcagggccacacggtgaagggcaatcagctgttgcccgtctcactggtgaaaagaaaaaccaccctggcgcccgccggagttgacaccatgtccacatctgctcaggtgaacgtgtccttctcactctccctggagctgctctcctatcagaagctcccagctgaccagacactgcctggggtggacattcagcagagtgcgagtggagagagagagatgagtcgattacgactgcacttctggcagaggagcgactcaagcttcgcgaaagaaaatacccaaaaagcatacaaagaaacgtacggcgtctctcatattacacgccatgatatgctgcagatccctaaacagcagcaaaacgaaaaataccaagtgcctcaattcgatcaatcaacgattaaaaatattgagtctgcaaaaggacttgatgtgtgggacagctggccgctgcaaaacgctgacggaacagtagctgaatacaacggctatcacgttgtgtttgctcttgcgggaagcccgaaagacgctgatgacacatcaatctacatgttttatcaaaaggtcggcgacaactcaatcgacagctggaaaaacgcgggccgtgtctttaaagacagcgataagttcgacgccaacgatccgatcctgaaagatcagacgcaagaatggtccggttctgcaacctttacatctgacggaaaaatccgtttattctacactgactattccggtaaacattacggcaaacaaagcctgacaacagcgcaggtaaatgtgtcaaaatctgatgacacactcaaaatcaacggagtggaagatcacaaaacgatttttgacggagacggaaaaacatatcagaacgttcagcagtttatcgatgaaggcaattatacatccggcgacaaccatacgctgagagaccctcactacgttgaagacaaaggccataaataccttgtattcgaagccggggatcctctagagtcgacctgcaggcatgcaaagtttcaaagtggcctatttcacgtagctctggggcgtacttcagaatgtgactttccctccccagcccaccctgctagaacaagagagaatgatttttccaggtttcaccatgagaacctactgagcccccaggatttttag

SEQ ID NO: 4324 - DNA, 1404 bp, Homo sapiens
  SIMILAR (427)..(1401): 951254mologous to Homo sapiens putative p150,accession number U93567,Smith-Waterman Score=1568.
atggcacgagaactacgtgaagaatgcacaagcttcagtagccgattcgatcaacgggaagaaagggtatcagtgaaggaagatcaaatgaatgaaatgaagctagaagagaactttagagaaaaaagaataaaaagaaatgaacaaagcctccaaaaaatatgggactatgtgaaaagaccaaatctacgactgattggtgtacctgaaagtgacggggagaatggaaccaagttggaaaacactctgcaggatattatccaggagaacttccccaatctagcaaggcaggccaacattcaaattcaggaaatacagagaacgctacaaagatactcctcgagaagagcaactccaagacacataattgtcagattcaccaaagttgaaatgaagaaaaaaatgttaagggcagccagagagaaagaaatacaaactaccatcagagaatactataaacacctctacacaaataaactagaaaatctagaagaaatcgataaattccttgacacatacactctcccaagactaaaccaggaagaagttgaatctctgaatagaccaataacaggctctgaagttgaggcaataattaatagcctaccaaccaaaaaaagtccaggaccagacagattcacagccgaattctaccagaggtacaaggaggagctggtaccattccttctgaaactattccaatcaatagaaaaagagggaatcctccctaactcattttatgaagccagcatcatcctgataccaaagcctggcagagacacaacaaaaaaagagaattttagaccaatatcccggatgaacatcgatgcaaaaatcctcaataaaatactggcaaaccgaatccagcagcacatcaaaaagcttatccaccatgatcaagtgggcttcatccctgggatgcaaggctggttcaacatatgcaaatcaataaatgtaatccagcatataaacagaatcaaggacaaaaaccacatgattatctcaatagatgcagaaaaggcctttgacaaaattcaacagcccttcgtgctaaaaactctcaataaattaggtattgatgggacgtatctcaaaataataagagctatctatgacaaacccacagccagtatcatactgaatgggcaaaaactggaagcattccctttgaaaactggcacaagacagggatgccctctctcaccactcctattcaacatagcgttggaagttctggccagggcaatcaggcaggagaaagaaataaagggtattcaattaggaaaagaggaagtcaaattgtccctctttgcagatgacatgattgtatatctagaaaaccccattgtctcagcccaaaatctccttaagctgataagcaactgcagcaaagtcccaggataa

SEQ ID NO: 4325 - DNA, 1935 bp, Homo sapiens
  SIMILAR (1)..(1020): 951254mologous to Homo sapiens putative p150,accession number U93563,Smith-Waterman Score=1665.
atgggagactttaacaccctactgtcaacattagacagatcaatgagacagaaagttagcaaggatatccaggaattgaactcagctctgcaccaagtggacctaatagacatctgcagaactctccaccccaaatcaacagaatatacattgttttcagcaccacagcacacctattccaaaattgatcacatagttggaagtaaagctctcctcagcaaatgtgaaagaacagaaattataataaactatctctcagaccacagtgcaatcaaactagaactcaggattaagaatctcactcaaagccgctcaactacatggaaactgaacaacctgctcctgaatgactactgggtacataacgaaatgaaggcagaaataaagatgttctttgaaaccaatgagaacaaagacacgacataccagaatctctgggatgcattcaaagcagtgtgtagagggaaatttatagcactaaatgcccacaagagaaagcaggaaagatccaaaattgacaccctaacatcacaattaaaagaactagaaaagcaagagcaaacacagtcaaaagctagcagaaggcaagaaataactaaaattagagcagaactgaaggaaatagagacacaaaaaaccattcaaaaaatcaatgaatccaggagctggttttttgaaaggatcaacaaaattgatagaccgctagcaagactaataaagaaaaaaagagagaagaatcaaatagacacaataaaaaatgataaaggggatatcaccactgatcccacagaaatacaaactaccatcagagaatactacaaacacctctacgcaaataaactagaaaatctagaagaaatggataaattcctcgacacatacactctcccaagactaaaccaggaagaagttgaatctctgaatagaccaataacaggagctgaaattgtggcaataatcaatagtttaccaaccaaaaaaagtccaggaccagatggattcacagccgaattctaccagagtaaaatactggcaaaccgaaaccagcagcacatcagaaagcttatccaccatgatcaagtcggcttcatccctaggatgcaaggctggttcaacacacgcaaatcaataaacataatccatcatataaacagaaccaacgacaaaaaccacatgattatctcaatagatgcagaaaaggcctttgacaaaattcaacagcgcttcatgctaaaaactctcaataaattaggtattgatgggacgtatctcaaaataataagagctatctatgacaaacccaccaccaatatcatactgaatgggcaaaaactggaagcattccctttgaaaactggcacaggacagagatgccctctctcaccactcgtattcaacatagtattggaagttctggccagggcaatcagggcggagaaagaaataaagggtattcaattaggaaaagaggaagtcaaattgtccctgtttgcagatgacatgactgtatatttagaaaaccccatcacctcagcccaaaatctacttaagctgataagcaacttcagcaaagtctcaggatacaaactcaatgtgcaaaaatcacaagcattcttatacaccaataacagacaaacagagagccaaatcatgagtgaactcccattcacaattgcttcaaagagaataaaatacctaggaatccaacttacaagggatgtgaaggacctcttcaaggagaactataaaccactgctcaatgaaataaaagccacaaacaaatggaagaacattccatgctcatggataggaagaatcaacattgtgaaaatgaccatactgccgaaggtaatttatagattcaatgccattcccatcaagctaccaatgactttcttcacagaattggaaaaaactactttaaagttcatatga

SEQ ID NO: 4326 - DNA, 1410 bp, Homo sapiens
  SIMILAR (64)..(1398): 761254mologous to Homo sapiens putative p150,accession number U93572,Smith-Waterman Score=1655.
atggggaaaaaacagagcagaaaaactggaaactctaaaaagcagagtgcctctcctcctccaaaggaacgcagttcctcaccagcaatggaacaaagctggtcggagaatgactttgacgagttgagagaagaaggcttcagacgatcaaactactccaagctacaggaggaaattcaaaccaaaggcaaagaagttaaacactttgaaaaaaatttagacgaatgtataactagaataaccaatagagagaagtgcttaaaggagctgatggagctgaaagccaaggctcgagaactacgtgaagaatgcagaagcctcaggagccaatgtgatcaactggaagaaagggtatcagtgatggaagaaatacaaactaccatcagagaatactacaaacacctctatgaaaataaactgcaaaatctagaagaaatggataaattcctcgacacatacaccctacgaagactaaaccaggaagaagttgaatctctgaacagaccaataacaggatctgaaattgtggcaataatcaatagcttaccaaccaaaaagagtccaggaccagatggattcacagccaaattctaccagaggtacaaggaggaactgataccattccttctgaaactattccaatcaatagaaaaagagggaatcctccctaactcattttatgaggccagcatcatcctgataccaaagcaaggcagagacacaaccaaaaaagagaattttagaccaatattcttgatgaacattaatgcaaaaatcctcaataaaattctggcaaaccgaatccagcagcacatcaaaaagcttatccaccatgatcaagtgggcttcatccctgggatgcaaggctggttcaatatatgcaaatcaagaaatgtaatccatcatataaacagaaccaaagacaaaaaccacatgattatctcaatagatgcagaaaaggcctttgacaaaattcaacaacccttcatgctaaaaactctcaataaattaggtattgatgagacgtatctcaaaataataagagctatctatgacaaacccacagccaatatcatactgaatgggcaaaaactggaagcattccctttgaaaactggcacaagacagggatgccctctctcaccactcctattcaacatagtgttggaagttctggccagggcaatcaggcaggagaaggaaataaagggtattcaattaggaaaagaggaagtcaaattgtccctgtttgcagatgacatgattgtatatctagaaaatcccatcgtctcagcccaaaatctctttgagctgataagcaacttcagcaaagtctcaggatacaaaatcaatgtacaaatatcacaagcattcttatacaccaattacagacagagtgccaaatcatga

SEQ ID NO: 4327 - DNA, 1494 bp, Homo sapiens
  SIMILAR (1)..(1176): 961254mologous to Homo sapiens putative p150,accession number U93563,Smith-Waterman Score=1923.
atggataaattccttgacacatacactctcccaagactaaaccaggaagaagttgaatctctgaatagaccaataacaggagctgaaattgtggcaataatcaatagcttactaaccaaaaagagtccaggaccagatggactcacagccgaattctaccagaggtacaaggaggacctgataccattccttctgaaactattccaatcaatagaaaaagagggaatcctccctaactcattttatgaagccagcatcatcctgataccaaagccaggcagagacacaaccaaaaaagagaattttagaccaatatccttgatgaacattgatgcaaaaatcctcaataaaatgctggcaaaccgaatccagcagcacatcaaaaagcttatccaccgtgatcaagtgggcttcatcgctgggatgcaaggctggttcaacatacgcaaatcaataaacgtaatccagcatataaacagaaccaaagacaaaaaccacatgattatctcaatagatgcagaaaaggcctttgacaaaattcaacaacccttcatgctaaaaactctcaataaattaggtactgatgggacgtatctcaaaataataagagctatctatgacaaacccacagccaatatcatactgaatgggcaaaaactggaagcattccctttgaaaactggcacaagacagggatgccctctctcaccactcctattcaacatagtgttggaagttctggccagggcaattaggcaggagaaggaaataaaaggtattcaattaggaaaagaggaagtcaaattgtccctgtttgcagatgacatgattgtatatctagaaaaccccattgtctcagcccaaaatctccttaagctgataagcaacttcagcaaagtctcaggatacaaaatcaatgtacaaaaatcacaagcattcttatacaccaataacagacaaacagagagccaaatcatgagtgaactcccattcacaattgcttcaaagagaataaaatacttaggaatccaacttacaagggacgtgaaggatctcttcaaggagaactacaaaccactgctcagtgaaataaaagaggatacaaacaaatggaagaacattccatgctcatgggtaggaagaatcaatattgtgaaaatggccatagtacccaagaatgggattttaaacatcttgatcaagcaacaggattctgcctcatctcctgacactgataatcagctagcagggcaatattgttgctctaactggcatcctgatgctgttatgaaactgcatgaggcattactcaagaagtgggttgtgattgaaaatagccagcagaaatttaaagcaaaaacttgggatcaacccaaatgcccatcagtgatagactggataaagaaaatgtggcacctatatgccatggaacactatgcagccataaaaaagaatgagttcatgccctttgtagggacacggatgaagctgtaa

SEQ ID NO: 4328 - DNA, 855 bp, Homo sapiens
  SIMILAR (743)..(829): 821254mologous to Homo sapiens putative p150,accession number U93568,Smith-Waterman Score=128.
atgtgcaaaccaaaaagagggctctcaccaggaaatgaattggttggcagcttgagtttggacttccaacctacagaatggagtggcagcaagttttactttttttctgtggaaacttgttaccacttccaggggcagatcactttccagttacacttaagagtttcacatcctcctcctcttcgtcttctgactctgcatcttcctccacagatactaaatactgtctatgaatatgtacaggccctgaaccacacttcaactcagcacatcaaaaagcttatccgccacgatcaagtcagcttcatccccaggatgcaaggctggttcaacatacgcaaatcaataaacataatccatcacataaacagaaccaatgacaaaaaccacatgattctctcagtagatgcagaaaaggcctttgataaaattcaacagcccttcatgctaaaaactctcaataaactaggtattgatgaaacgtatcacaaaataataagagctatctatgacaaacccacagccaatatcatactgaatgggcaaaagctggaagcattccctttgaaaaccggcacaagacaaggatgccctctctccccactcctattcaacatagcattggaagttctggccagggcaatcgggcaagagaaagaaataaacggtattccaataggaagagaggaagtcaaattgtctctgtttgcagatgacatgattgtacatttagaaaaccccattgttggtaaagggatcgattcaccaagaagagctaattatcctaaatatatatgcacccaatacaggagcacccagattcgtaaagccttagagacctacaaagagacttag

SEQ ID NO: 4329 - DNA, 1014 bp, Homo sapiens
  SIMILAR (316)..(981): 831254mologous to Homo sapiens putative p150,accession number U93570,Smith-Waterman Score=939.
atggggataaaccagagaagaaaagctgaaaattctaaaaatcagagtgcctcttctcctacaaaggattgcagctcctcaccagcaaaggaacaaagctggacggagaatgactttgaagagttgacagaagtaggcttcagaaggcaagcaaatgctgagagattttgtcaccaccaggtctgccctaaaagagctcctgaagagagcactaaacatggcaagaaacaaccagtatcagccactgcaaaaacatgccaaattgtaaagaccatcgatgctatgaagaaactgcatcaactgacagcctggcagagacacaacaacaaaaaagagaattttagaccaatatccctgatgaacatcgatgcaaaaatcctcaataaaatactggcaaaccgaatccagcagcacatcaaaaagcttatccacaatgatcaagttggcttcatccctgggatgcaaggctggttcaatatacacaaatcaataaacataatccatcacataaagagaaccaacgacaaaaaccacatgattatctcaatagatgcagaaaaggccttcaacaaaattcaacagcccttcatgctaaaaactctcaataaactaggtattgatggaacttatctcaaaataataagagctatttatgacagacccacagccaatgtcatactgaatgggcaaaaactggaagcattccctttcaaaactggcacaagacaaggatgccctctctcaccactcctattcaacatagtgttgaaagttctggccagggcaatcaggcaagagacagaaataaagggtattcaattagcaaaagaggaagtcaaattgtctctgtttgcagatgacatgattgtatatttagaaaaccccatcatctcagcccaaaatctccttaagctgataagcaacttcagcaaatctcaggatacaaaatcaatgtgcaaaaatcacaagcattcttatacaccattaacagacaaacagagagccaaatcatga

SEQ ID NO: 4330 - DNA, 1235 bp, Homo sapiens
  SIMILAR (189)..(1220): 851254mologous to Homo sapiens NAG13,accession number AF194537,Smith-Waterman Score=1510.
atacaagtaggaaaagtcgccagaagacaagagctgtagggaaaaccaccaaccctatcttcaaccacactatggtgtatgatgggttcaggcctgaagatctgatggaagcctgtgtagagcttactgtctgggaccattacaaattaaccaaccaatttttgggaggtcttcgtattggctttggaacagaaatacaaaccaccatcagagaatactataaacacttctatgcaaacaaactagaaaatctagaagaaatggataaattcctggacacacacaccctcccaagactaaaccaggaagacgttgaatccctgaatagaccaataacaagttcagaaatggaggcagcaattaatagcctagcaaccaaaaaaagtccaggaccagatggattcacagccgaattctaccggaggtacaaagaggagctggtaccattcgttctgaaactatcccaaacaacagaaaaagagggactcctccctaactcattttgtggggccaacatcaacctgataccaaaccctggcagagacaacacaagaaaagaaaatttcagaccaatatccctgatgaacattgataccaacattctcaataaaatactggcaaacagaatccagcagcacatcaaaaagcttatcgactatgatcaagtcagcttcatccctgggatgaaaggctggtgcaacatatgcaaatcaataaacgtaatccatcacgtaaacagaaccaatgacaaaaaccacatgattatctcaatagatgcagaaaaggccttcgaaaaaattcaacagcccttcttgctaaaaaccctcaataaactaggtattgatggaacgtatctcaaaataataaaagctatttataacaaacccacagccaatatcatactgaatgggcaaaagctggaagcattctctttgaaaactggcacaagacaaggatgccctctctcaccactcctattcaacatagtattggaagttctggctaggacaatcaggcaagagaaaaaaaaaaatggtattcaaataggaagagaggaggtcaaattgtctctttttgcagatgacatgattgtatatttagaaaacctcatcgtctcagcccaaaatctccttaagctgataagcaacttcagcaaagtctcaggatacaaaatcaatgtgcaaaaatcacaagcattcctatacaccaataataaagagccaaatcatgagtga

SEQ ID NO: 4331 - DNA, 2853 bp, Homo sapiens
  SIMILAR (1714)..(2628): 931254mologous to Homo sapiens putative p150,accession number U93563,Smith-Waterman Score=1454.
atgggcatgggacctgccaagccaggcatgggagggaatctcctggtctgctggttgcaaagaccatgggaaaagcgcagtatttgggcagaagtgtaccgttcctccaggtatagtcactcatggcttcccttgtctaggaaaggttgtgattttagtggaacctgcaggcagactttaagtatcttaacccagccattgagacagtggggcttagaaggtatcaagaaaccaaacagctggattataagtgaagagtcagtcagtaatggagggcctccgctgctgatacccaggcaaacagcgtctggagtggacctccagcaaactccaacagacctgcagctgagggtcctgactgttagaaggaaaactaacaaacagaaaggaatagcatcaacatcaacaaaaaggacatccacaccaaaaccccatctgtacgtcaccatcatcaaagaccaaagttacataaaaccacaaagatggggaaaaaacatagcagaaaagctgaaaattctaaaaatcagagtggctctctccctccaaaggaatgcagctcctcaccagcagtggaacaaagctggacggagaatgagtttgatgagttcacagaagaaggcttcagaagtgattgaaagtcaaatgaatgaaataaagggagaagagaagtttagagaaaaaagagtaaaaagaaacgaacaaagcctacaagaaatatgggactatgtgaaaagaccagatctacgtctgattggtgtacctgatagtgacggggagaatggaaccaggttggaaaacactctgcaggatattatccgggagaatttccccaacctagcaaggcaggccagcattcaaattcaggaaatacagagaacgccacaaagatactcctcaagaagagcaactccaagacacataattgtcagattcaccaaagttgaaatgaaggaaaaaatgttaagggcagccagagagaaagaactcaagattaagaaactcactcaaaactgcttaactacatggaaactgaacaacctgctcctgaatgactactgggtacataatgaaatgaagggagaaataaagatgttctttgaaaccaatgagaacatagacacaacataccagaatctctggcatacatttaaggcagtgtgtagagggaaatttatagcactaaatgcgcacaagagaaagcaggaaagatctaagattgacaccctagcatcacaattaaaagaaatagagaagcaagagcaaacacattcaaaagctagcagaagacaagaaataactaagatcagagtagaactgaaggagatagagacacaaaaaagccttcaaaaaatcaatgaatccaggagctggttttttgaaaagatcaacaaaattgatagaccactaccaagactaataaagaagaaaagagagaagaatcaaatagacacaataaaaaatgataaaggggatatcaccaccaatcccacagaaatacaaactatcagcagagaatactataaacacctctatgcaaataaactagaaaatctagaagaaatggataaattcctggacacatacaccctctcaggactaaacaaggaagaagttgaatctctgaatacatcaataacaggctctgaagttgaggcaataattaatagcataccaaccaaaaaaaagtccaggaccagatggattcacagccgaattctaccagagcttagcagagacacaacaaaaaaagagaattttagaccaatatccctgatgaacatcgatgtgaaaatcctcaataaaatgctggcaaacggaatccagcagcacatcaaaaagcttatccaccatgatcaagtgggcttcatccctgggatgcaaggctggttcaacatacacaaatcaataaatgtaatccagcatataaacagaaccaaggacaaaaaccacatgattatctcaatagatgcagaaaaggcctttgacaaaattcaacagcccttcatgctaaaaactctcaataaattagatattgatgggacatatctcaaaataataagagctatttatgacaaacccacagccaatatcatactgaatgggcaaaaactggaagcattccctttgaaaagcagcacaagacagggatgccctctctcaccacacctattcaacatagtgttggaagttttggccagggcaatcaggcaagagaaagaaataaagggtattcaattaggaaaagaggaagtcaaattgtccctgtttgcagatgacatgattgtatatttagaaaaccccatcatctcagcccaaaatctccttaagctgataagcaacttcagcaaagtctcaggatacaaaatcaatgtgcaaaaatcacaagcattcctatacaccagtaacagacaaacagagagtcaaatcatgagtgaactcccattcacaattgcttcaaagagaataaaatacctagaaatacaacttacaagggatgtgaaggacctcttcaaggagaactacaaaccactgctcaacgaaataaaagaggacacaaacaaatggaagaacattccatgctcatggataggaagaatcaatattgtgaaaatggccatattgcccaaggatgacaaaaaatgtgtcagtgatgatcatgatgctgacaatgacagtgacaatgacggcgataactttctgcaagtctcagcagcaaaatcttacatctctcattactttcctgtgataaggctcctcacagcatactggaggagactctccaacagccttgaaaaggcaaagggccatgatgtggaagggccatgtggcaaggaattagtagttggcctttag

SEQ ID NO: 4332 - DNA, 748 bp, Homo sapiens
  SIMILAR (557)..(748): 891254mologous to Homo sapiens nucleophosmin,accession number M23613,Smith-Waterman Score=274.
gaagattcgatggacatggacatgagccccctgaggccccagaactatcttttcggttgtgaactaaaggccgacaaagattatcactttaaggtggataatgatgaaaatgagcaccagttatctttaagaacggtcagtttaggggctggtgcaaaggatgagttgcacattgttgaagcagaggcaatgaattacgaaggcagtccaattaaagtaacactggcaactttgaaaatgtctgtacagccaacggtttcccttgggggctttgaaataacaccaccagtggtcttaaggttgaagtgtggttcagggccagtgcatattagtggacagcacttagtagctgtggaggaagatgcagagtcagaagatgaagaggaggaggatgtgaaactcttaagtatatctggaaagcggtctgcccctggaggtggtagcaaggttccacagaaaaaagtaaaacttgctgctgatgaagatgatgacgatgatgatgaagaggatgatgatgaagatgatgatgatgatgattttgatgatgaggaagcttgaagaaaaagcgccagtgaagaaatcttattacgagatacttccagccaaaattgcacaaaagtcaaatcagaatggaaaagactcaaaaccatcatcaacaccaagatcaaaaggacaagaatccttcaagaaacaggaaaaaactcctaaaacaccaaaaggacctagttctgtagaagacattatagca

SEQ ID NO: 4333 - DNA, 3743 bp, Homo sapiens
  SIMILAR (1)..(1581): 791254mologous to Homo sapiens putative p150,accession number U93569,Smith-Waterman Score=2069.
atgggagaatttaacaccccactctcaacattagacagaccaatgagacagaagtttaacaaggatattcaggacttgaactcagctctgcaccaagcagacctaatagacatctacagaactctccaccccaaatcaacagaatatacattcttctcagcaccacatcacacttattccaaaactgaccacacagttgtaagtaaagcactcctcagcaaatgtaaaagaacagaaatcacaacaaagtgtctctcagaccacagtgcaatcaaattagaattcaggattaagaaactcactcaaaactgcacaattacatggaaactgaacaacctgctcctgaatgactatggggtaagtaacgaaatgaaggcagaaacaaagatgttgtttgaaaccaatgagaacaaagacacaacataccagaatctctgggacgcaattaaaggagtatgtagagggaaatttatagcactaaatgcccacaagagaaagcaggaaagacctaatatcaacaccttaacatcacaattaaaagaactagagaagcaagggcaaacaaattcaaaagctagcagaaggcaagaaataactaagatcagagcagaactgaaggagatagagacacaaaaaacccttcaaaaaatcagtgaatccaggagctggttttttgaaaagatcaacaaaattgatagactgctagcaagactaataaagaagaaaagagagaagaatcaaatagacgcaataaaaaatgatacaggggatatcgccaccgatcccacagaaatacaaactaccatcagagaatactataaacacctctatgcaaataaactggaaaatctagaagaaatggatgaattcctggacacatacaccctcccaagactaaaccaggaagaagttgaatctctgaatagaccaataacaggctctgaaattgaggcaataattaatagcttaccaaccaaaaaaagtccaggaccagatggattcacagccaaattctaccagaggtacaaagaggagctggtaccattccttctgaaactattccaatcaatagaaaaagagagaatcctacctaactcattttatgaggccagcatcatcctgataccaaatcctggcagagacagaacaaaaaaagagaattttagaccaatatccctgatgaacatcaatgcaaaaatcctcaaaaaaattattggtaaacagaatccagcagcacatcaaaaagcttattcaccatgaccaagttggcttcatccctgggatgcaaggctggttcaacatatgcaaatcaataaatgtaatccatcacataaacagaaccagtgacaaaaaccacatgattatctcaatagatgcagaaaaggcctttgaccaaaatttcagcagcccttcatgctaaaaactctcagtaaactcggtattgatacaatgtatctcaaaataataagagctatttacgacaaacccatagccagtatcatactgaatgggcaaaaactgaaagcattccctttgaaaactggcacaagacagggatgccctctctcaccactcctattccaacatagtgttggaagttctggccagggcaatcaggcaggagaaggaaataaagggtattcaattaggaaaagaggaagtcaaattgtccctgtttgcagatgacatgattgtatatctagaaaaccccactgtctcagcccaaaatctccttaagctgataagcaacttcagcaaagtctcaggatacaaaatcaatgtggaaaaatcacaagcattcttatacaccaataacacacaaacagagagccaaatcatgagtgaactcccattcacaattgcttcaaagagaataaaatacctaggaatccaacttacaagggacgtgaaggacctcttcaaggagaactacaaaccactgttcaatgaaataaaagaggatacaaacaaatggaagagaattccatgctcatgggtaggaagaatcaatattgtgaaaatgcccatactgcccaaggtaatttatagattcaatgccatccccatcaagctaccaatgagtttcttcacagaattggaaaaaaactacattaaagttcagatggaaccaaaaaagagcccacatagccaagacaatcctaaacaaaaagaacaaagctggaggcttcacgctacctcacttcaaactatactacaaggctacagtaaccaaaacagcatgcccgtctttcaaaacaaaagactataatttcatcaaagctgtttgctttgcccttggtcggcttctcagaataatcacctctacagtctgcaacgtgtcttggaaatgtgggctttcccggggttgtaaagcgttacagctactgctagaaggaggcttttcagggcatgccattctgcacatggtttctgagacttttaaatcggagagggagctcaaagaccacgaaatcatacctgttaactttacaggtgaggaaaggaaggctcagaggcactgtggggagccgctgaaagattttaaacagggatgggccaacggggctctctggtctgcggcttcattcctgaagtcagtgagaccacgaacctactggaaggaagaaactccagacacatctgaacatctgaagaaaccaactccagacacatcatctttaagaactgtaacactcactgtgaggttccgcggcttcattcttgaagtcagcgagaccaagaacccaccagaaggaaccaattccagacacattttggcaaccacaaagggactattgactatcgccaagtggaggaaaactagcgtttctgctgctgcgtcagtgagcgcaactattccgatcagcagggtccagggaccgttgcgggttcttgggcaagaggtgtttctgctgcttcatcgcctccctatagctccccttcctattaatgataagcctcctctaatcttccccacccagaaggaaataaacaaagacatctccaaaggaccacaaaaccctctgggctatcagttatgtccccttcatgctatagggggaggagaatttggcgcaacctggaattggaaaaaactacttaagttcatatggaaccaaaaaagagcctacattgccaagacaatcctaagccaaaagaacaaagctggaggcttcatgctacctgacttcaaactatactacaaggctacagtaaccaaaacagcattgtactggtaccaaaagagagatatagaccaatggaacagaacagagcccttagaaataataccacacatctacaaccttctgatctttgacaaacctgacaaaaacaagaaacggggaaaggattccctacttaataaatggtgctgggaaaactggctagccatatgtagaaagctgaaactggatcctttccttacaccttatacaaaaactaattcaagatggattaaagacttaaatgttagacttaaaaccataaaaaccctagaagaaaacctaggcaataccattcaggacataggcatgggcaaggacttcatgactaaaacaccaaaagcaatggcaccaaaagcaatggcaacaaaagccaaaattgacaaatgggatctaattaacctaaaaagcttctgcacagcaaaagaaactaccatcagagtgaacaggcaacctacagaatgggagaaaatttttaccatctacccatctgacaaagggctaatatccagaatctaa

SEQ ID NO: 4334 - DNA, 1092 bp, Homo sapiens
  SIMILAR (682)..(882): 671254mologous to Homo sapiens unnamed protein product,accession number AK024120,Smith-Waterman Score=227.
ttatgctgaccaccagatggcacagttgttccacaccagctggttgccttcgatagtggctatttctgaaggcaatgagcccttctgatgtgatgcatgctgtaactggagaatatgaaagcagtcatttaagcagttcatagttgccatggaagtagctttgagcattaagagatcctggtccaaggaacgatgcagtttgccaccatcaaatggcttggtatgaaaagtgatgctggctgaatatccagtttttgcacagttgacactgactttgccacccagttcggcttcctgggaacccagtcgagggcccgggcccaggggcataagaggaagttgtcccgagtggctcgcctctggccctgggagaggcggccccgggagccggcgtcccgcccccggcggcctcattccccgaccctcctccccggctgcgcgcgccggccctggctgtatctcgggggctgcggcgggaactgccgagcgggcttgactggacgcactgcctgaggaccttaccctcgctaatagtccagattctgcaacaggctgctcttctgggactgccaccggcttactctgatcagttgcaaagggctggtcagctccatttttatagtggtttgataaagatatctttggttctaaccactcgattgtcgttctggggtaccactgagtagagctgtgagaagagggccgctgtcctccaaaactcagaatgttagatccactgacagcttgtaccatgtgcctgcaaaagccgcagacactcaatgccagcccgtgaaagcagccaggagggaggctgtgccctgcaaagccacggggcggagctgcccaagaccatgggaacccacctcttccatcagggtgacctgcctcagcttgtttcggttccttgacattttcttcactgttgtgcagaaccacacagtctgggagttggaggagctttccaatagcttcagtatgatgctgtgtacatatctgaagtctgctaacccagtgctgtcgctcttttgcatctgtagctgaaatcacccagtttgtgggtgtcagtgtgaaaatgtagatacctaaggccat

SEQ ID NO: 4335 - DNA, 644 bp, Homo sapiens
  SIMILAR (288)..(539): 351254mologous to Homo sapiens Amino acid sequence of salivary protein CON-1,accession number W50192,Smith-Waterman Score =97.
ttttaagatttgatctgaatatgataccggttgctaaatcacacggcggctggggcgggactgtcaaatggtccagaaaaggaagatacacattcccacagaagttaaacttttaagagggcaggggaagcaacgaggacagatatccttcacatgtatctctctcctttccggcaaaagcaaggaggaaaaagcatccggcgaggaagacttaagtgacatactcaaaagagaaggagtgtggggaggtcgcagattctgtagccaagacggctttggaaaaggacggagcgccacggacaggggacccgcggcctaacctcggggctgacccgccgcgctccctcgtctcctccgcaggtcctcaggcagtgcgtccagtcaagcccgctcggcagttcccgccgcagcccccgagatacagccaggggccggcgcgcgcagccggggaggagggtcggggaatgaggccgccgggggcgggacgccggctcccggggccgcctctcccagggccagaggcgagccactcgggacaacttcctcttatgcccctggcccgggccctcgactgggttcccaggagccggtgagtctctcgcgctatctccagacccaagcgcgaatgccagggccgcggccgc

SEQ ID NO: 4336 - DNA, 1023 bp, Homo sapiens
  SIMILAR (654)..(986): 361254mologous to Mycobacterium tuberculosis proline-rich mucin homolog,accession number AF071081,Smith-Waterman Score=112.
atgcacgatgtccttagcaaatacaacacagcccgctggtatcgcctcttccttcactacctccacaaccacttgtggcagaggaggagcctccagttgcacttggccaaggcggcttttgcctgcgacaagcacttctcatcttcccatcctctgacggagccagtcccacccaccacgtggacgtgggtgttgtctgtggaccaagagacagcaaaaaatgtgcagaactacgtacacatccgtgggccggaaagcactttccctatagattctggtgccctgcggctctcggatggggagatgcgcgcactccagacccccacaggcccccagagcacggtggagggtcacacccatcttcagtctctgctcaccatgacagagtcacagccacacccgggacagaacctgggctccgggcagcaggtaataggaggatattctacccagggccggaacaagccaggtccagcctcaactgctctgtggctatggcaacgcttccagaaccccagctgctctaacaccaggcccagctcctccaacccaagcgtctctacccaactgtgggatctgtccgcacctccagatggggaggcccacgtctccgtgtcacctgagggcggccaccccagctcctcgctctacatctccctctccccaccgccaccttccgcccctgccctgcggctcccaccgcccctgccctgctgctcccaccgcccctgctctgctctgctgctccttccgcccctgccctgcggctcctacggcccctgccctgctgctccttccgcccccgccccgctgctccttccgcccccgccccgaggctccttccgcccctattggtctgctccttccgcccctgcccggcggctccttccgcccctgccggtctgctccttccacccctgctctgctgctctgggctttccccgaggctttgctgcccacactcttcttgctcgtcagacccaccaaggttgcagagaaaggcagacagcagcagatggctag

SEQ ID NO: 4337 - DNA, 984 bp, Homo sapiens
  SIMILAR (628)..(981): 371254mologous to Homo sapiens envelope protein,accession number M12140,Smith-Waterman Score=206.
atgtcgacatccctttctcacttccgcagttgcgacactcagagttttggagaggtcttccgggtcctgcaggagcagtctacttccttcagatgtgtctgtgaggttttgtctgcagctcatcctgctacatttcttgtttccctgatcaggaagcgaggcagcttaggcctgctctatggagcatccctgtgggagactctggcctgccttagtgacgtgatccaaagagtgatcccaggtaggcaattgccctggtggaatgccttgccagagcagcatgtgccaggcccacatggaggatcaacgcagtggctgaacacaagggaggaactggcacttggagtgcagacatctgaaacttgggatgtggtggctcaagacccccagaagtttcctgctaaagacctaggctgtgtcttgctccagtacgtgaatgaccttctgctaggactctccatgtcagtcggttgtgcaaaagggatggatgccctgcacctggaggactgtgggtataaggtgtccaagaagaaagctcagacctgcagacagcagtattgtgtggaaaagaatgtgggtactgctcttgtgtcatttgggctacttggaaaaaaagatgaaacagatcctgtttggctccaaaaagggaaaggaagcccctcctgcatgattggaagcagcaatcctttagaattagtaatcacaaacccctcagacccaaaatggaaaaaaggagaaaacgtatctctaggcattgatggaaaaggactagaccctaaggtaaacattttaataaaagaagagactcaaaaacgctctccagagccagtatttcagactttctatgatgaactaaatgtaccagtgcctgaaattccaggaaaaactagaaatttgtttttgcaattagccaagcatgtagcccagtctctaaaagtaacttcatgttatgtttgtggaggaactgtaacaggagatcgatga

SEQ ID NO: 4338 - DNA, 847 bp, Homo sapiens
  SIMILAR (523)..(846): 301254mologous to Mus musculus epithelial protein lost in neoplasm-a,accession number AF307844,Smith-Waterman Score=93.
ctgctctgaaaccaggtctctaagtgaacatttctcaggcatggatgcatttgagagtcaaattgttgagtcgaagatgaaaacctcttcatcacatagctcagaagctggcaaatctggctgtgacttcaagcatgccccaccaacctatgaggatgtcattgctggacatattttagatatctctgattcacctaaagaagtaagaaaaaattttcaaaagacgtggcaagagagtggaagagtttttaaaggcctgggatatgcaaccgcagactgcttctgcaacatgagatgagaaccaccttccaagaggaatctgcatttataagtgaagctgctgctccaagacaaggaaatatgtatactttgtcaaaagacagtttatccaatggagtgcctagtggcagacaagcagaattttcataagtcctgcttcccgatgccaccattgcaacagtaaactaagtttgggaaattatgcatcacttcatggacaaatatactgtaaacctcactttaaaccaacttttcaaaatcccaaaggaaattatgatgaaggttttggacataaagcagcataaagatagatggaactggcaaaaacccaaagcagattcagtggactttattcctaatgaagaaccaaatatgtgtaaaaatattgcagaaaacacccttgtacctggagatcgtaatgaacatttagatgctggtaacagtgaagggcaaaggaatgatttgagaaaattaggggaaaggggaaaattaaaagtcatttggcctccttccaaggagatccctaagaaaaccttaccctttgaggaagagctcaaaatgagtaaag

SEQ ID NO: 4339 - DNA, 870 bp, Homo sapiens
  SIMILAR (384)..(458): 401254mologous to Homo sapiens Human prostate cancer- associated protein 111,accession number Y48414,Smith-Waterman Score =53.
ggaatgtactagcaatggctctgaagaaacagactgacagagcagctgctggcagtcctgtgcagcctgctccaaaaccaagcctcagcagaggcgttatggtaacaggggggaagttcaatcatctctcctgatacaaatctcttaaacattaaaggaagccattcaaagagcaaaaatttacactttttcttttctaacaccgtgaaaatcactgcattttccaagaaaaatgagaacattttcaattgtgatttaatagattctgtagatcaaattaaaaatatgccatgcttggatttaagggaatttggaaaggatgttaaaccttggcatggtgaaacaacagaagctgcccgcaataatgaaaacacaggttttgatgctctgagccatcaatgtaccagctaagcccttgtttccccagagtggaggtgcagtcagaacaactcacggtgggaagagcagattaaaagaaacaggtgctaccagtgacactgagtaaaatatctatggccactgacagtccacacttaggcactgagagatattgatgttctgaaataagattttatgaatttggatacccttttgaggaacttgatgtaaacatggtgttcagaaatctcgtgtctatctcaatgggatatttcttgtattacaccttgtcatttttttcacaatttatttacatctacttttgtttgaactggaatgaagagatgaaacactatggatatgttttccattcaaatggcactttagcatattgttctgttttcctgtaaaacatcatgggtgtgatttttatactgctgatacttgtcacaattattataacttctctgtaatttcctctgaaataaaatt

SEQ ID NO: 4340 - DNA, 609 bp, Homo sapiens
  SIMILAR (135)..(179): 1001254mologous to Homo sapiens delta sarcoglycan,accession number U58331,Smith-Waterman Score=78.
atgaaatccaagaagtacataataattttcagcaacaatgaaggaactgaggtaaatcgtgaaaacacagagtatagatggaatggaaacctgaggatcacagaaaaaggtctaaagctagaaggagactctgattcttacaacctctctacgccaaagaaatccagtcccgaccaggtcttgggacccaagaacagagctgtcagactctcagcagctgctcgagtcgtggccagcagcagcatgctgaagctgcctgagatgaccaagtttccagaggggaaggggagctgccatcacttgccccagccgttttcccctgctggtgccctggagactaggtggtttggtgggaaagaagtccccacagtgcaacacagcagctgtagcagattgtggcagactgcttctttaggggttgccagatatttatgcaagagcattccagccagcatcaagtcactacccttctgggacgagctcccagaggaaggagcagacagccgtccttgctgttctgcagactcactggtgacacctccaggtgcaggaaaagacccaggagtggccccccacaaactgcagcagctgtacagaagaggggcctga

SEQ ID NO: 4341 - DNA, 922 bp, Homo sapiens
  SIMILAR (152)..(919): 1001254mologous to Homo sapiens delta sarcoglycan,accession number U58331,Smith-Waterman Score=1308.
cggacgcgtgggcaaccgtcccttttgtggtggcctgatgggattatcttaatcccaatgttgccctgaaatttatgtccaggattcaaaaagtttaggactgctaagagacattactgccgggagtgttgagtgaagggaccaggtggagatgatgcctcaggagcagtacactcaccaccggagcaccatgcctggctctgtggggccacaggtatacaaggtggggatttatggctggcggaaacgatgcctgtatttctttgtcctgctcctcatgattttaatactggtgaacttggccatgaccatctggattctcaaagtcatgaacttcacaattgatggaatgggaaacctgaggatcacagaaaaaggtctaaagctagaaggagactctgaattcttacaacctctctacgccaaagaaatccagtcccgaccaggtaatgccctgtacttcaagtctgccagaaatgttacagtgaacattctcaatgaccagactaaagtgctaactcagcttataacaggtccaaaagccgtagaagcttatggtaaaaaatttgaggtaaaaactgtttctggaaaattgctcttctctgcagacaataatgaagtggtagtaggagctgaaagattacgagttttaggagcggagggcacagtgttccctaaatctatagaaacacctaatgtcagggcagaccccttcaaagaactaaggttggagtccccaacccggtctctagtgatggaggccccaaaaggagtggaaatcaatgcagaagctggcaatatggaagccacctgcaggacagagctgagactggaatccaaagatggagaggtgagggatgagaaggacagaagttcaaagagctacagcttcaacaggccaacccttcccataactggttga

SEQ ID NO: 4342 - DNA, 1680 bp, Homo sapiens
  SIMILAR (1360)..(1635): 751254mologous to Homo sapiens Human follicle stimulating hormone GPR N-terminal sequence,accession number W03627,Smith- Waterman Score=367.
caaatgtcagtgtacacccgagacatcagtggctgaaagctacagtcttaggttgacttgcggactttttttaaaatacaaagtcaagcccccgggagccatttcttcagtgggtcagtgcagactggctccttgctgggggtctgacgctcgctgggaccagtcctctgtttctgtggttctttatctgttcactgactgtttggcagttgaagacttgctccccaaggccctcagtctttgccacttcattcagagcacttaattaaaagagaaaaggaatgcagttctgatgcagttataactagtaaaaagaaccaataaaaatgactataaagtgcctgacaaatagaaaatgtttagtaataccaaggtactttatgggggaagggtttacctcttggcacaggatggcagctccccccccccaccccaaccccaggcctttccctccatgatgcccttggcagggagctcttgcccagccagaacaggtgagtgaaaagattctgctgtcttggagtcacctgacttcttactacaagaacatccttcagaagtgaaaatcacagacatgtaggtcttttgctggtgatgacagataacacaagagataaagaatactttggtgatgagagtaaaagggaaaatgaggaaaagacagtagaaaaaagtataggagaaaagcaggccacactgaccactcatgccaacataatcacaataaggcactgcgtaaagccagagccagacttctctgaccacctcaacctgttgttaggtagggcagacatcacaggtgaggagatggcggcccagagaagcagtgtggagaagttggccaatggtaacatagcccttgtggattctctcagaagcaggagtttggaggaaggtgattctgaccctcataaacgactttcaggggctcaagacatcaagacaacagtggaggaagtaattgcagatgtagtggaaatagcaagagaactagaattagaagtggagcctgaagatgtgactgaattcctgcaagctcatgagaaaacgttaacagatgtggagttgtttcttataaatgagcaaataaagtggtttcttgagatgaaatctactcctagggaagatgctgtgatcattgctgaaacgataacaaaggttttagaatatgacataaatttagtgacaaagcagcagcagggtatgagacaactgacaccaattttgaaagaagtcctactgtgggtaaaatgccatcaaacagccttgcatgctacagagaaacctttcataaaaggaagaatcaatccatgtggcaaaattcatacttgtctcaatttaagaaattgtggccagcttctcataagggaggaggaggaggaagacaaggaggaggaggagcaatatgaggagaaggaagaggaggaggaagaggaggaggaagaggaggaagaggaggaggaggaagaggaggaggaggaagaggaggaggaagaagaggaggaggaagatgaggaggaggaagacaaggaggatgaggaggaagacaaggagaaggaggaggaagaagacaacaaggaggaggaggaggaggaagacaaggagaaggaggaggaagaagacaaggagggagaaggaagacaaggaggaggaggaagacaaggaggaggaggaagatga

SEQ ID NO: 4343 - DNA, 495 bp, Homo sapiens
  SIMILAR (390)..(494): 881254mologous to Mus musculus fragile-X-related protein 1 isoform g,accession number AF124394,Smith-Waterman Score=158.
atgaagacactggaacatttagaatctatagagagtgctggtgctgtaaaaaaggctagaggtttcttggaatttgtggaggattttattcaggtttctaagaatctcattggaaaagtaattggaaaaaatggcaaagttattcaagaaatagtggacaaatctgatatggttccggtgagaattgaaggggacagtgaaaataaactacccagagaagacaaagatgatcgagacagccgacatcagcgtgacagcaggagatgcccaggaggaagatgcagaagtgtttcagggcgtcgaggtcgtggtggaccacgtggtggcaaatcctccatcagttctgtgcccaaagatccagacagcaatccatacagcgtacttgataatcagaatcagatcagactgcagacactgatgccagcaaatctcatcacagtactaatcgtcatacgaggtctcgtagacgaaggactgatgaagatgctgttctga

SEQ ID NO: 4344 - DNA, 804 bp, Homo sapiens
  SIMILAR (443)..(547): 801254mologous to Homo sapiens FXR1,accession number U25165,Smith-Waterman Score=126.
acggaatctgagcgtaaagacgagctgagtgattggtcattggcaggagaagatgatcgagacagccgacatcagcgtgacagcaggagacgcccaggaggaagaggcagaagtgtttcagggggtcgaggtcgtggtggaccacgtggtggcaaatcctccatcagttctgtgctcaaagatccagacagcaatccatacagcttacttgataatacagaatcagatcagactgcagacactgatgccagcgaatctcatcacagtactaaccgtcgtaggcggtctcgtagacgaaggactgatgaagatgctgttctgatggatggaatgacctgaatctgatacagcttcagttaatgaaaatgggctaggcaaaagatgtgattgaagagcatggtccttcagaaaaggcaataaacggcccaacttagtgcttctgggcgatgacatttctaagctacagcgtactccaggagaaagaaaaagattaataccttaaaagaaggaaaacactcaagaagcagcagtcctgaatggtgtttcataaactgaagaagttcctagtttacagttcttttacattacatttacaatagtgcttgtacaagcttgccaaagatagaatatggatcgccagtctttacatcgcactttcagttcctccatttggaattcaaataaggggagggatcctgaagaaatcatatgttaaacatactttgacacctactgtgttataaaatatatcatcagatgtgccttgagaatagtatatgtaacattaaaaaaaagttgctggct

SEQ ID NO: 4345 - DNA, 2065 bp, Homo sapiens
  SIMILAR (1895)..(2062): 851254mologous to Mus musculus fragile-X-related protein 1 isoform e,accession number AF124394,Smith-Waterman Score=237.
atggcggagctgacggtggaggttcgcggctctaacggggctttctacaagggatttatcaaagatgttcatgaagactcccttacagttgtttttgaaaataattggcaaccagaacgccaggttccatttaatgaagttagattaccaccaccacctgatataaaaaaagaaattagtgaaggagatgaagtagaggtatattcaagagcaaatgaccaagagccatgtgggtggtggttggctaaagttcggatgatgaaaggagaattttatgtcattgaatatgctgcttgtgacgctacttacaatgaaatagtcacatttgaacgacttcggcctgtcaatcaaaataaaactgtcaaaaaaaataccttctttaaatgcacagtggatgttcctgaggatttgagagaggcgtgtgctaatgaaaatgcacataaagattttaagaaagcagtaggagcatgcagaattttttaccatccagaaacaacacagctaatgatactgtctgccagtgaagcaactgtgaagagagtaaacatcttaagtgacatgcatttgcgaagtattcgtacgaagttgatgcttatgtccagaaatgaagaggccactaagcatttagaatgcacaaaacaacttgcagcagcttttcatgaggaatttgttgtgagagaagatttaatgggcctggcaataggaacacatggtagtaacatccagcaagctaggaaggttcctggagttaccgccattgagctagatgaagatactggaacattcagaatctacggagagagtgctgatgctgtaaaaaaggctagaggtttcttggaatttgtggaggattttattcaggttcctaggaatctcgttggaaaagtaattggaaaaaatggcaaagttattcaagaaatagtggacaaatctggtgtggttcgagtgagaattgaaggggacaatgaaaataaattacccagagaagacggtatggttccatttgtatttgttggcactaaagaaagcattggaaatgtgcaggttcttctagagtatcatattgcctatctaaaggaagtagaacagctaagaatggaacgcctacagattgatgaacagctgcgacagattggtatgggtttcagaccttcttccaccagagggcctgaaaaagagaaaggatatgccactgatgaaagtaccgtctcttctgtacaaggttctaggtcttatagcggaagaggcagaggtcgtcggggacctaattacacctccggttatggtacaaattctgagctgtctaacccctctgaaacggaatctgagcgtaaagacgagctgagtgattggtcattggcaggagaagatgatcgagacagccgacatcagcgtgacagcaggagacgcccaggaggaagaggcagaagtgtttcagggggtcgaggtcgtggtggaccacgtggtggcaaatcctccatcagttctgttcaatatagatcaaacattcataattgcagtactcttaaacgaatatttcttgcctctgacatgaatatagtgctcaaagatccagacagcaatccatacagcttacttgataatacagaatcagatcagactgcagacactgatgccagcgaatctcatcacagtactaaccgtcgtaggcggtctcgtagacgaaggactgatgaagatgctgttctgatggatggaatgactgaatctgatacagcttcagttaatgaaaatgggctagatgatagtgaaaaaaaaccccagcgacgcaatcgtagccgcaggcgtcgcttcaggggtcaggcagaacgatagacagccagctatagatttcatttataaagaagttgaaaaagttgtctccctttggcaggcaaaagatgtgattgaagagcatggtccttcagaaaaggcaataaacggcccaactagtgcttctggcgatgacatttctaagctacagcgtactccaggagaagaaaagattaataccttaaaagaagaaaacactcaagaagcagcagtcctgaatggtgtttcataa

SEQ ID NO: 4346 - DNA, 2144 bp, Homo sapiens
  SIMILAR (1391)..(1462): 1001254mologous to Homo sapiens FXR1,accession number U25165,Smith-Waterman Score=122.
tgcggttccaacatggcggacgtgacggtggaggttcgcggctctaacggggctttctacaagggatttatcaaagatgttcatgaagactcccttacagttgtttttgaaaataattggcaaccagaacgccaggttccatttaatgaagttagattaccaccaccacctgatataaaaaaagaaattagtgaaggagatgaagtagaggtatattcaagagcaaatgaccaagagccatgtgggtggtggttggctaaagttcggatgatgaaaggagaattttatgtcattgaatatgctgcttgtgacgctacttacaatgaaatagtcacatttgaacgacttcggcctgtcaatcaaaataaaactgtcaaaaaaaataccttctttaaatgcacagtggatgttcctgaggatttgagagaggcgtgtgctaatgaaaatgcacataaagattttaagaaagcagtaggagcatgcagaattttttaccatccagaaacaacacagctaatgatactgtctgccagtgaagcaactgtgaagagagtaaacatcttaagtgacatgcatttgcgaagtattcgtacgaagttgatgcttatgtccagaaatgaagaggccactaagcatttagaatgcacaaaacaacttgcagcagcttttcatgaggaatttgttgtgagagaagatttaatgggcctggcaataggaacacatggtagtaacatccagcaagctaggaaggttcctggagttaccgccattgagctagatgaagatactggaacattcagaatctacggagagagtgctgatgctgtaaaaaaggctagaggtttcttggaatttgtggaggattttattcaggttcctaggaatctcgttggaaaagtaattggaaaaaatggcaaagttattcaagaaatagtggacaaatctggtgtggttcgagtgagaattgaaggggacaatgaaaataaattacccagagaagacggtatggttccatttgtatttgttggcactaaagaaagcattggaaatgtgcaggttcttctagagtatcatattgcctatctaaaggaagtagaacagctaagaatggaacgcctacagattgatgaacagctgcgacagattggttctaggtcttatagcggaagaggcagaggtcgtcggggacctaattacacctccggttatggtacaaattctgagctgtctaacccctctgaaacggaatctgagcgtaaagacgagctgagtgattggtcattggcaggagaagataatcgagacagccgacatcagcgtgacagcaggagacgcccaggaggaagaggcagaagtgtttcagggggtcgaggtcgtggtggaccacgtcggtggcaaatcctccatcagttctgtgctcaaagatccagacagcaatccatacagcttacttgataatacctgaatcagatcagactgcagacactgatgccagcgaatctcatcacagtactaaccgtcgtaggcggtcatccgtagacgaaggactgattgaagatgctgttctgatgaatggaatgactgaatctgatacagcttcagttaatgaaaatgggctagtcacagttgcagattatatttctagagctgagtctcagagcagacaaagaaacctcccaagggaaactttggctaaaaacaagaaagaaatggcaaaagatgtgattgaagagcatggtccttcagaaaaggcaataaacggcccaactagtgcttctggcgatgacatttctaagctacagcgtactccaggagaagaaaagattaataccttaaaagaagaaaacactcaagaagcagcagtcctgaatggtgtttcataaactgaagaagttcctagtttacagttcttttacattacatttacaatagtgcttgtacaagcttgccaaagatagaatatggatcgccagtctttacatcgcactttcagttcctccatttggaattcaaaaaggggagggatcctgaagaaatcatatgttaaacatactttgacacctactgtgttataaaatatatcatcagatgtgccttgagaatagtatatgtaacattaaaaaaaagtaactggctaaaaaaaa

SEQ ID NO: 4347 - DNA, 421 bp, Homo sapiens
  SIMILAR (189)..(419): 961254mologous to Homo sapiens HERC2,accession number AF071172,Smith-Waterman Score=380.
tccacgcgtccgggattcggacacagaggacgactctgaagccgaacattttgaaagtttcattcaccccactgcaatgatgtttaccagcactattaacttactgcagactctttgtctgtctgctggagttcatgctgagatcatgcagagtgaagccaccaagactttatgcggactgctgcaaatcttctccaaacaggctggtgtacagggagcaacaccggagctggtgcacgctggggtttgtgcagagcatcgctctcacgctgcaggtgtgcggcgccctcagctccctgcagtggatcacgctgctcatgaaggtcgtggaagggcacgcacccttcactgccacctcgctgcagaggcagatcttagctgtgcatttgttgcaagcagtccttccgtcatgggacaagag

SEQ ID NO: 4348 - DNA, 417 bp, Homo sapiens
  SIMILAR (125)..(6): 411254mologous to Drosophila melanogaster CG9812 gene product,accession number AE003460,Smith-Waterman Score=70.
ggcacgaggggcgcttcacaggcgcagcgacagcgacagcgacagctcgaacctgagtcccaggattccggggactggagggcagcgccggcagccaagatgcaacttctccaggagtgcttatgttacccaaagagaaacagatgcacaaagagaaggaatgagatgctcggggatattttatcaaggaaaccagcaaaccgtctttttcctgaagaccttttaagattaggacaagcagctgtttataaaagcagaacagtgttaagatttgaactgtaaagtaggatcatgctttgaagtatattctagctaaaagcaggggataaactagataaaacttggagactctaagacctgaccctgattaagtgggcctacaagtgagaatctgaagaacagctctctggctgaaca

SEQ ID NO: 4349 - DNA, 516 bp, Homo sapiens
  SIMILAR (1)..(516): 981254mologous to Homo sapiens HERC2,accession number AF071172,Smith-Waterman Score=876.
ctgggagaggacgggtggataagagtccagtgggacacaggcagcaccaactcctacaggatggggaaagaaggaaaatacgacctcaagctggcagagctgccagcccctgcacagccctcagcagaggattcggacacagaggacgactctgaagccgaacaaactgaaaggaacattcaccccactgcaatgatgtttaccagcactattaacttactgcagactctttgtctgtctgctggagttcatgctgagatcatgcagagtgaagccaccaagactttatgcggactgctgcgaatgttagtggaaagcggaacgacggacaagacatcttctccaaacaggctggtgtacagggagcaacaccggagctggtgcacgctggggtttgtgcagagcatcgctctcacgctgcaggtgtgcggcgccctcagctccccgcagtggatcacgctgctcatgaaggttgtggaagggcacgcacccttcactgccacctcgctgcagagg

SEQ ID NO: 4350 - DNA, 1527 bp, Homo sapiens
  SIMILAR (899)..(759): 651254mologous to Volvox carteri f. nagariensis hydroxyproline-rich glycoprotein DZ-HRGP,accession number AJ242540,Smith-Waterman Score=185.
atggcaggggaggcctcggaatcatggcgagaggcaaaaggcacttcttatgtagcagcagcaagagaaaatgaggaagatgcaaaagcagaaccccccacccccggaataaaaccatcagatctcgtgagacttattcactaccaagagaacagtatgggggaaaccgcccccatgattcaaattatctcccactgggtccctcccacaacacatgggatttatgggagtacaattcaagatgaaattcgggtggggaccgcaagcggtgcccagcggccgccccgctgtccaccccgacctcagaggctccagggagacgcccggggctcaggaatcctaccttggctgccggcgctgccctccagtccccggaatcctgggactcaggttcgagctgtcgctgtcgctgtcgctgcgcctgtgaagcgcccactagagcgcaggcgccacctagtgggcgcggggcggctgcgcagggaccgcgctggcaggcgggagcgcagtccagggcggaaatgcagccagggcttcttcccacgtgggcggttttccagcgcgccgccagccctgtggccagatccggcctggggcgggaccaccttcacccgctgcggggcactgggatctaaacttggtgaactttctcttggggcacggagggacccctcggcctgggcagaggaggacaaggaggagcaggaggagaaggaggatgaggagcaggaggaggagcaggaggaggaggagcaggagaaaggaggagaagcaggagcaggaggaagaggagcaggagaagaaggagcagaaggaggaggagcaggaggaggagaaggaggaggagcaggtggaggaggaggagcaggaggaggagaagcaggaggagcagaaggagaggaggagcaggaagaggaggagaaagagcaggaggaagaagaggaggagaagcaggaggaggaggaggaagagcaggaggaggaggaagagcttgaggaggagcatgaggaggaggagaaggagcaggaggaagaggaggagaagcaggagcagggggaggaggaggaggcagagcaggaggaggagcaggaggaggaggaggaggtgtcatctgtggacaatacctggaagggcaaggggtggtgggtgtcactaaaaggaaccagccccagctacttcactgcaggctggtgccctggtgaaggtgaatcagtcagaggagtgctgactgcccatgctgatattctgcgcatccttctaggtccagctcaaatgtggcctgctctaggaagccctcccctgtcccctatttccagtgtgacatcttccatattaaaggacttattgatgctgctaaatagtataatttgctgcaagaatgtggcctcctccagcagattctatgcccctgaatcaggagtaagatcctccagtggaaatttaccttgcaaaacaggactgtgcatggtgagagctgcttgcaatgtccacactcaggactctatggaaagagttcgcagctggtggtga

SEQ ID NO: 4351 - DNA, 1620 bp, Homo sapiens
  SIMILAR (758)..(1063): 451254mologous to Volvox carteri f. nagariensis hydroxyproline-rich glycoprotein DZ-HRGP,accession number AJ242540,Smith-Waterman Score=194.
tcatccttctgaggtggttcctttcacaaagttgtggttagtgttgtgtgtggccttgctaccttgtccacactgctgattgtagcaggcaggatataggacagaccaatgacctttaaaaaggccacttacaaccagatagatggtgggtggtttcttgatcactccctcatcactacgaatcagcagctcacgataaacctttagtaaggcctctaggggtggcaacccacacagtatgaccaaggcgccttctgacttcaggaaagccaggcagacggggatccctggatgctcacagcttggcagccgatattcactggagccagaacagtctgctctgaggcttgtctgcatccagaagttgcaggaaagttccacaacgtgtgaagacttcttttgtcctctctgtgggagagcatgggcagtcagcactcctctgactgattcaccttcaccagggcaccagcctgcagtgaagtagctggggctggttccttttagtgacacccaccaccccttgcccttccaggtattgtccacagatgacacctcctcctcctcctcctgctcctcctcctgctctgcctcctcctcctccccctgctcctgcttctcctcctcttcctcctgctccttctcctcctcctcatgctcctcctcaagctcttcctcctcctcctgctcttcctcctcctcctcctgcttctcctcctcttcttcctcctgctctttctcctcctcttcctgctcctcctctccttctgctcctcctgcttctcctcctcctgctcctcctcctccacctgctcctcctccttctcctcctcctgctcctcctccttctgctccttcttctcctgctcctcttcctcctgctcctgcttctcctcctttctcctgctcctcctcctcctgctcctcctcctgctcctcatcctccttctcctcctgctcctccttgtcctcctctgcccaggccgaggggtccctccgtgccccaagagaaagttcaccaagtttagatcccagtgccccgcagcgggtgaaggtggtcccgccccaggccggatctggccacagggctggcggcgcgctggaaaaccgcccacgtgggaagaagccctggctgcatttccgccctggactgcgctcccgcctgccagcgcggtccctgcgcagccgccccgcgcccactaggtggcgcctgcgctctagtgggcgcttcacaggcgcagcgacagcgacagcgacagctcgaacctgagtcccaggattccggggactggagggcagcgccggcagccaaggtaggattcctgagccccgggcgtctccctggagcctctgaggtcggggtggacagcggggcggccgctgggcaccgcttgcggtctgcagagataaccggaggagtcggggcggcagcacgtgttgtagccgtgggggggacccagagacccgcagcctcggagctgggcatatgtctttatcagcagcatgaaaatggactaatacatatggtaatttcatttttaatcttttgaggacctgacgtactgttttccccacaggtatagcttttttacattcccaccagcagtgcacaaggattcccat

SEQ ID NO: 4352 - DNA, 2610 bp, Homo sapiens
  SIMILAR (1303)..(1854): 891254mologous to Mus musculus Herc2,accession number AF071173,Smith-Waterman Score=870.
atgatgggtcacagcagtgccataccactcacagccacaccaggagagctgaaggggcagtcaccaacgaagatgcccgacccagaacttggctgccagggagccaaaagccagggatgttcacggaacgccagacaccaaaaggccagaagcatgcccctgcaggaccagcacttggctctggccatcctgctggagctggctgtgcagagaggcacgctgagccaaatgttgtctgccatcctgttgttgcttcagctgtgggacagcagggcacaggaaactgacaatgagcgttctgcccagggcaccagcaccttgcttttgtccttgctgcaaacgttccagagcatcatttgcagtaaggatacgcccccctccgagggcaacatgcaccttttgtctggccctctgagccccagtgagagtttcctgagagagtcattttttacagttcagaactgtagaaataatgaggaagtgacacttatatgcaaagctgatttggagaaccataataaagatggaggcttctggattgtgattgatgagaaagtgtatgatataaaggacttccagacacagtcgttaacaggaaatagtattcttgctcagtttgcaggggaaaacccagtggtagctttggaagctgctttcgagtttgaagtcacccgggaatccatgcacgcattttgtgttggccaatatttggaggtgaggctgtatgccttgagtgatgcagaggatggcaggggacaccctctaatggcttcagtcatccatcttctctggaggctgcagaccagccagatccactacagctacaacgaggagaaagatgaggaccactgcagctcccagtgggcacacctgccagcaaatcgcgactgctcccacagatgggccctgggggaccattctcaggcatttctgcaagccattgcagacaataacattcaggatcacaacgtgaagactcatcaagaacagggccgttcttacaaggaggtctgcactcctgtcatcgaacgtttgagattcctctctaatgaattgagacctgctgttggtaatgacctctctataatctctgagtttaaattgttaagttctttgccccgttggaggaggatagctcagaagataattcgggaacggaggaaaaagagaattcctaagaagccagaatctacggctgatgaagaaaaaattggaaacgaagagagtgatttagaagaagcctgcattttgcctcatagtccaataaatgtggacaagagacccattgcaattaaatcacccaagaccatcaccagtgagaacccattgggaccgagcctggggagcatcccgcaagcccgcttcctcctgatgatgctcagcatgctcaccctgcagcacagcgcaaacaacctcgacctcctgctcaattccggcacgctggccctcactcagacggcactgcgcctgattggccccagttgtgacaatgttgaggaagatatgaatgcttctgctcaaggtgtttctgccacagttttggaagcaacaaggaaggaaacggctcctgtgcatctccctgtttcagggccagaactggctgccacgatgaagattggaacgagggtcatgagaggtgtggactggaaatggggcgatcaggatgggcctcctccaggcctaggccgagtgattggtgagctgggagaggacgggtggataagagtccagtggggcacgggcagcaccaactcctacaggatggggaaagaaggaaaatacgacctcaagctggcagagctgccggccgctgcacagccctcagcagaggattcggacacagaggacgactctgcttctccaaacaggctggtgtacagggagcaacaccggagctggtgcatgctggggtttgtgcggagcatcgctctcacgccgcaggtgtgcggcgccctcagctccccgcagtggatcacgctgctcatgaaggtcatgaaagggcacgcacccttccctgccgcctcgctgcagaggcagaggtgggtggccgtctcccttccccatgccctggtgaagagcggcacagtgccatcactcagagagtccatgccgaggtggcgcagggtgcgcccgcaggccttgctgactgccacccatagcagcacactggtggaggtggtggtggcactgctgtgcacgctgcactccctgactcagtggaatgggctcatcaacaagtacatcaactcccagctccgctccatcacccacagctttgcgggaaggccttctgaaggggcccagttagaggactacttccccgactccgagaaccctgaagtggggggcctcatggcggtcctggctgtgattggaggcatcgatggtcgcctgtgcctgggcggccaaattgtgcacgatgagtttggagaaggcactgtgactggcatcaccccgaagggcaaaatcaccgtgcagttctctgacatgcggacgtgtcacatttgcccattgaatcagctgaaaccagtaggtgaacttgtgctcagttactgtatgataagggaaattggctttacactaggacccagcaccaacattagcacttga

SEQ ID NO: 4353 - DNA, 1113 bp, Homo sapiens
  SIMILAR (353)..(535): 901254mologous to Homo sapiens HERC2,accession number AF071172,Smith-Waterman Score=296.
atggaagaggaagaattttcctcccaacagagtcatcagaacacagcggcagctaaagcccttgttaccgcaagcggtgcccagcggccgccccgctgtccaccccgacctcaaaggctccagggagacgcccggggctcaggaatcctaccttggctgccggcgctgccctccaatccccggaatcctgggactcaggttcgagctgtccctgtcgctgtcgctgcgcctgtgaagcgcccactaaaacgcaggccccacctaatgggcgcggggcggctgcgcaaggaacgcgcttgcaagcgggaacgcaattcaaggcggaaaatgcaacccagggctttttcccccttctccaaacaggctggtgtacagggagcaacaccggagctggtgcatgctggggtttgtgcggagcatcgctctcacgccgcaggtgtgcggcgccctcagctccccgcagtggatcacgctgctcatgaaggtcatgaaagggcacgcacccttccctgccgcctcgctgcagaggcagctttgtccagagacacatcctgtcctgtccttaaggacttctgcaaatcagtaatcacagatgttgcgtgcagttcactgatatctactctcctcgtattttggggtggcttactgcatacccacaaggaggcctctgaatcatggcgagaggcaaaaagcacttcttacgtagcagcagcaagagaaaatgaggaagatgcaaaagcagaaccccccacccccggaataaaaccatcagatctcgtgagacttattcactaccaagagaacagtatgggggaaaccgcccccatgattcaaattatctcccactgggtccctcccacaacacatgggatttatgggagtacaattcaagatgaaattcgggtgggggtctcatatccaggtcacactgatgcaagaggattccagctgttgctggtttctggagacttcagcatcccttattggtccctcagctctgcctacacctctgtaaatagttccttcgttgaatctcttcagtcaaatcttttgaagggaattctgcttcctgccacgatcatgactgatccaagaactacagggcatcagtaa

SEQ ID NO: 4354 - DNA, 736 bp, Homo sapiens
  SIMILAR (341)..(472): 1001254mologous to Mus musculus red-1,accession number X92750,Smith-Waterman Score=227.
atggttcagttgagcgggaagcgtattctcaactccccctacctggagcttaggtgtcatcagaacatggaccatctgggctgggtcatcaagaagagtcttaaccgctctgaagtctcctgggtcccaggtctggagttcccctggggaccgaaacccttcagggaagtcattgcagggcccttgcttagaaacaatgggcagtctctggagagcagcagcctggaggggtctcacgtgggcgtctatttctccgcacattggtgtccgccctgccgaagcctcacccgggtcctggtggaatcctaccggaagatcaaggaggcaggccagaacttcggagatcatcttcgttagtgcagacaggtcggaggagtccttcaaacagtacttcagtgagatgccctggctcgccgtcccctacacggatgaggcccggcggtcgcgcctcaaccggctgtacggaatccaagcccacctctttcttacagccaatgcagaggattttgacaccacggttcaagtcaacaaaatcatcctgatcacttacagacagaacgagaactctcttagctctttaaagactggggaaactgaggcccagggcagactgcagggatctcccagcaacgtgagagggcacgaccctgacagacacgccattcctctttctgtcaaccggtggaatccaagcaagagcagcccctcaccggccgtgtggtcacggctgccttag

SEQ ID NO: 4355 - DNA, 1074 bp, Homo sapiens
  SIMILAR (379)..(675): 861254mologous to Homo sapiens fibulin-2,accession number X82494,Smith-Waterman Score=455.
atggaaaagctgtggctccaccccactggaattgtggaagaggcaagaaactcagaaaataacaactgtggacaaagaagggaaaccactggaatgtttatccgccagcgggagtttcggatggcgcgaccattgtgggaaaccgtttggcagaagggaccaaaacagaacatatccaccattctactttctgactccatgaatttgactcctctagggatctcacctcaggactcgggggcgctcggacgcaccgacggctcggcggaccctcggacgcgcctcgcgggctgcccgcgcctccacccgcgccgccggtccgaccgggtctcgctctcccggtcccagcgcggggacggcccgcgagcgccgcgacccagtgtacagatgcgggcacagaggccggcgcggggctccaccaaggacctgatcgagacttgctgcgcagccggacagcagtgggccattgacaatgacgagtgcctggagatccctgagagtggcactgaggacaacgtctgcaggacagcccagaggcactgctgtgtctcctacttgcaggagaagagctgcatggccggcgtcctgggagccaaggagggtgagacctgtggggctgaggacaacgacagctgcggcatctccctgtacaaggcaagcctgacctgtggccttcaaggcaggtgtctcaacccccagcaggctagcatgggcctgttcagttatgatgtgcagagttccaagaaaataaatagaagcattcaagagaagctcgggggccacggcgtgtgtgcagcgacacctggcggtggcatgcggaactgcggacggctgcgcaggagcggacagcgaagaggcggtactgaccggtgcgaggcggtgctgaccggcctcttcaccagggccctgataagggagcagatgggagacccacatcctctggaccacactggccagctggccaagcccctggaagtagagaagacccccgcaaggtggaaatacctggatacaaatggagaaaaggaggaaccggagctgaggactcagtgtccttctctgtatgaggactga

SEQ ID NO: 4356 - DNA, 520 bp, Homo sapiens
  SIMILAR (306)..(332): 881254mologous to Homo sapiens TAXREB107,accession number D17554,Smith-Waterman Score=42.
atgatgggtgagaaagctgagaagccagatactaaagagaagaaacctaaggccaagaaagctgatgctggtggcaagaggaattgcagatattcccgatctgctatgtattccagaaagaccacgtccaggaagaagtattcagctgctaaatccaaggttgaaaagaaaaagaagtttcttgcaactgttacaaaaccagttggtgttgacaagaacagtggtacccaggtggttaaacttcacaaaatgcctagatattaccctactgaagatgtgcctctaaagctgttgagccatggcaaaagaaacccttcagtcagcataggcgagggtggttttcctgaagcagctggtcttgggactggacctctggtcctcaatcaagttcctctacgaagaacacaccagaaatttgtcattgctacctcaaccaaaattggtagcagcaatgtaaaaattgcaaaacgtcttactggtgcttactttaagaaggtgtggaagcctaaacaccaggaag

SEQ ID NO: 4357 - DNA, 518 bp, Homo sapiens
  SIMILAR (1)..(270): 791254mologous to Homo sapiens ribosomal protein L6,accession number X69391,Smith-Waterman Score=356.
  misc_feature (1)...(518): n = a,t,c or g
gcaactgttacaaaaccagttggtggtgacaagaacggcggtacccgggtggttaaacttcgcaaaatgcctagatattatcctactgaagatgtgcctcgaaagctgttgagccacggcaaaaaacccttcagtcagcacgtgagaaaactgcgagccagcattacccccgggaccatgctgatcatcctcactggaccgccacaggggcaagagggtggttttcctgaagcagctggctagtggcttattacttgtgactggacctctggtcctcaatcgagttcctctaccgaagaacacaccagaaatttgtcattggccaccttcaaccaaaatccgatatcagcaatgtaaaaatcccaaaacatcttactgatgcttacttcaagaagaagaagctgcggaanccagacaccaggaaggtgagatcttcgacacagaaaaagagaaatatgagatttacggagcagcgcnagattgttnagaaagctgttggnctccncaattttttccaa

SEQ ID NO: 4358 - DNA, 333 bp, Homo sapiens
  SIMILAR (1)..(216): 761254mologous to Homo sapiens myo-inositol 1-phosphate synthase A1,accession number AF220530,Smith-Waterman Score=287.
cagcgcagctgcatcgagaacatcctcagggcctgcgtgggctcccgccacagaaccacatgctcctggaacacaaaatggagcgccaagcgagttggacccgtggctgccacctaccctatgttgaacaagaaaggaccggtacccgctgccaccaatggctgcaccggtgatgccaatgggcatctgcaagaggagcccccaatgcccaccacctgaggccccggtcacacagtttctcggctcttcctccccgctgccccccacgaccctaccttgaaggcccccacaaataacagcgctgccactcagccctcaaaaaataaaaaaaaa

SEQ ID NO: 4359 - DNA, 1104 bp, Homo sapiens
  SIMILAR (901)..(1101): 521254mologous to Homo sapiens myo-inositol 1-phosphate synthase A1,accession number AF220530,Smith-Waterman Score=157.
atggggagccagggatgggactgcctggtaggtgctgctgcccacgaagggggagtaggcgggagaggcggggaagggggcggggcgggggaggggccgcagcgctttctccggaggtcgcgcgcccgagagcccgcgctgtccgccgccgctgccgagtcgactctgcgccgcccgccgcgatggaggccgccgcccagtcttcgtcgagagcccggacgtggtctacggccccgaggccatcgaggcgaatacgagtaccggacgacgcgcgtcagccgcgagggtggcgttctcaagtggaccagggggctgaggaaggaggcgtgctggggagagcggggcggccggggagaagggcacgggacccgggattcactgcgcggcctgtcttcagtgcaccccacgtccacgcgcttcaccttccggaccgcccggcaggaggccaactactacggctcgctgactcaggcgggcaccgtgagccgggcctggacgccgagggccaggaggtgttcgtacccttcagcgcggtgtgcccatggtggcgcccaacgacctcgtgttcgatggtgcgtgggcctagggagctgcgagtgcaggaagggggcctgggccgcgagcacctggcttgtggggccgcgggcctgcagctgctggggcttcccttgtacccacagaccatgtccatctgagttacaaccacctgggcaacaacgatggggagaacctatcggcgccttgcagttccgctctaaggaggtgtccaagagcaacgtggtggacgacaggtgcagagcaacccagtgctctatacgcccggcgaagagcctgaccacgcgactcgctgctggccgcacccatctgctggacctagcgctgctgaccgagctgtgccagcgcggcctgcgggggctcccgccacagaaccacatgctcctggaacacaaaatggagcgccagggcccagcctcaagcgagttggacccgtggctgccacctaccctatttgaacaagaaaggaccggtacccgctgccaccaatggctgcaccggtgtgccaatgggcatctgcaagaggagcccccaatgcccaccacctga

SEQ ID NO: 4360 - DNA, 334 bp, Homo sapiens
  SIMILAR (58)..(108): 641254mologous to Mus musculus myo-inositol 1-phosphate synthase A1,accession number AF288525,Smith-Waterman Score=62.
ccgcgctgtccgccgccgctgcctgagtcgactctgcgccgcccgccgcgatggaggccgcgcgcccagttcttcgtcgagagcccggacgtggtctacggccccgaggcccatcgaggcgcaatacgagtaccggacgacgcgcgtcagccgcgagggtggcgttctcaaggtgcaccccacgtccacgcgcttcaccttccggaccgcccggcaggtgccccggctcggggtcatgcttgtcggctggggcgggaacaacggctccacactcaccgccgcggtgctggccaatcgactgcgtttgtcctggcccacgcgcagcggccgcaag

SEQ ID NO: 4361 - DNA, 1271 bp, Homo sapiens
  SIMILAR (966)..(421): 471254mologous to Homo sapiens myo-inositol 1-phosphate synthase A1,accession number AF220530,Smith-Waterman Score=317.
ttctgccaccacactctccaccctgtgttcttgttccgtccccgcccccatctagccccacctttgagaactggggcagagcgaggctccaggttctgggcttctcccctgggaagttggggtgaatgaccatgggcagaggggatgggactgaaaactgggcgctcaagagtcggggaagtagagggaggcagagtcaggtcacaggccccaagaaccccaggtggaaggagggctgagtggcagcgccctttatttgtgggggccttcaaaggtagggtccgtggggggcaagcggggaggaagagccgaagaaactgtgtgaccggggccgtcaggtggtgggcattgggggctcctcttgcagatgcccattggcatcactcggtgcagccattggtggcagcgggtaccggtcctttcttgttcaacatagggtagggtgggagccacggggtccaactcgcttgaggctgggccctgggcgctccattttgtgttccaggagcatgtggttctgtggcgggagccccacgcaggccctgaggatggactccgatgcatcttgtactgctggaaaatcgcattgacccaccgggcctgccgggcggcaactagtggcgcccttgaaagaggaagctgagcagggacagcacggggtggaagggtctgcggctcggggtccatgtcagtgcagaagctcacgcgctggcaacagctcggtcaagcagcgcctaggtcccagcatgatgggtgcggcccagcagcgagtcctcacacgtgttgtgcagcaccagtgtgttggttccgcccagcatcagctccgaggtatactcatcccagcgcgcgcttgctgtcacccacgtacggcacatacttgatgaccacgcagtggtcaggctcttcgccgggcgtatagagcactgggttgctctgcaccatgtcgtccaccacgttgctcctggaccacctccttagagcggaaccgcaatggcgccgacaggttctccccatcgttgtatgcccaggtggttgtaactcacgatggacatggtcttgaggccggagccaatgaggaagtccacaagcacggacttgactttggtctggcctgacttgaagtcatctccgcccacaaaaacccggtgctgccacgcgagctcaagagctccgggcaccagggtgttctgcggagacccattgaggaaggcacagccctccaggatgctggccacggcgaagagcgtggagggcgacacctccagaccgag

SEQ ID NO: 4362 - DNA, 365 bp, Homo sapiens; identical to SEQ ID NO: 4244
  SIMILAR (259)..(363): 1001254mologous to Homo sapiens L7a protein,accession number X52138,Smith-Waterman Score=189.

SEQ ID NO: 4363 - DNA, 376 bp, Homo sapiens; identical to SEQ ID NO: 4246
  SIMILAR (201)..(230): 1001254mologous to Mus musculus surfeit 3 protein,accession number M14689,Smith-Waterman Score=49.
  misc_feature (1)...(376): n = a,t,c or g

SEQ ID NO: 4364 - DNA, 380 bp, Homo sapiens
  SIMILAR (2)..(67): 1001254mologous to Homo sapiens Human secreted protein, SEQ ID NO: 5505,accession number G01424,Smith-Waterman Score=112.
ggcaagactgggacgtctagtccacaggaagacctgcaccactgtcgccttcacacaggtgaactcgtaagtacacagcctggccccaaacttccccccagttcatttaatccatgcctcacagttgtttccttttgccttaaaggccaatcttttagtttaagaaatatatttatctgaacttttgccaatgatggttaagaatttcttcacctgaataaaccatgtggtcagcattgcatctgaggcaaaagactgtcttgagctaaaaggtatttttgcattctaaaagggaaactaaggcaaaaaacccacttttgtttcccctcctgccttttagggaagacaaaggcgctttggctaagctggtggaagctatc

SEQ ID NO: 4365 - DNA, 1026 bp, Homo sapiens
  SIMILAR (27)..(689): 411254mologous to Homo sapiens L7a protein,accession number X52138,Smith-Waterman Score=222.
  misc_feature (1)...(1026): n = a,t,c or g
ggcacgaggcccaagatgccgaaaggaaagaaggccaagggaaagaaggtggctccggccccagctgtcgtgaagaagcaggagggctttagaaaaaagtggtgaatcccctggtttgagaaaaggccttaagaattttggcattggacaggacatccagccccaaaagagacctcccccccttttgtgaaaatggccccgccagtatcaggcgtgcagcgggcagagagccatcctctataagcgggctgaaagtgcctcctgcgatgaaaccagtttcacccagggccctggacccgccaaaccagctactcagcttgcttaagctgtggcccacaaagtacagacccagagacaaaagcaagagaagaagcagagactgtttggcccgggccgacgaagaaggctgcttggcaaagggtgacgtccccaacgaaagagacccacctgtcccttcgagccaggagtttaaccccgtttcaccacccttggtgaaggaacaagaaaagctcaagctggtggtgaattggcacacggacgtgggatccccatncgagcttggtttgtcttccttgccttgccctgcccctgtgtcgtgaaaaatggggggtccctttacttgcattattcaagggaaaagggcaagactttgggaccgtctagtcccacaggaaagaccttgcaccacttgtccgcctttcacaccaggtgaacttcggaagacaaagtgcggcttttggctaaagctgggttggaagctattcagggaccaatttacaattgaccagatacgatggagatccggccgtcacttggggttggcaatgtcctggggtcctaagtctgtggctcgtattcgccaaagctcgcaacaggcacaaggctaaagaaacagccactcatactgggttaaatgttacactgttgagttttctgtactataaaaataattgaaataatacaaattttcctttcaaaaaaaaaaaaaaaaaaaaaaaaaaaaaaaaaaaaaaaagggcggccgct

SEQ ID NO: 4366 - DNA, 1392 bp, Homo sapiens
  SIMILAR (286)..(1350): 931254mologous to Homo sapiens putative p150,accession number U93564,Smith-Waterman Score=1707.
atgcctgatgtttctgaagagcagaaggaaagtgtgtgtactggaagcatgatgagggaggaggaaagtagcagaaagggcaaggtcaggactgcaggagccaagtcctccagtagtgacagggtgccaagactaaaccaggaagaagttgaatctctgaatagaccaataacaggagctgaaattgtggcaataatcaatagcttaccaaccaaaaagagtccagcaccagatggattcacagccgaattctaccaaaggatccgaatccagcagcccatcatccgaatccagcagcccatcaaaaagcttatccaacatgataaagtggggttcatccctgggatgcaaggctggttcaatatatgcaaatcaataaatgtaatccagcatataaacagaaccaaagaaaaaaaccacatgattatctcaatagatgcagaaaagccctttgacaaaattcaacaatgcttcatgctaaaaactctcaataaattaggtattgatgggacgtatctcaaaataataagagctatctatcacaagcccacagccaatatcatactgaatgggcaaaaactggaagcattccctttgaaaactggcacaagacagggatgccctctctcaccactcctattcaacatagtgttggaagttctggccagggcaattaggcaggagaaggaaataaagggtattcaattaggaaaagaggaagtcaaattgtccctgtttgcagacgacatgattatatatctagaaaaccccactgtctcagcccaaaatctccttaagctgataagcaacttcagcaaagtctcaggatacaaaatcaatgtacaaaaatcacaagcattcttatacaccaataacagacaaacagagagccaaatcatgagtgaactcccattcacaattgcttcaaagagaataaaacacctaggaatccaacttacaagggatgtgaaggacctcttcaaggagaactacaaaccactgctcaatgaaataaaagaggatacaaagaaatggaagaacattccatgctcatgggcaggaagaatcagtatcatgaaaatggccatactgcccaaggtaatttatagattcaatgccatccccatcaagctaccaatgactttcttcacagaattggaaaaaactactttaaagttcatacggaaccaaaaaagagcccacatcgccaagtcaatcctaagccaaaagaacaaagctggaggcatcacgctacctgacttcaaactatactacaaggctacagtaaccaaaacagcatggtactggtaccaaaacagagatatagatcaatgcaccagaacacagcccctcagaaataacgccacatatctacaactatctgatctttga

SEQ ID NO: 4367 - DNA, 1950 bp, Homo sapiens
  SIMILAR (295)..(1527): 831254mologous to Homo sapiens MEK kinase 1,accession number AF042838,Smith-Waterman Score=1685.
atggccctcaggcgtctttcccatgatgtcagtggggccctgctgttggcaaatggggagagcactggaaattctgggggcagcagtggaagcagcccgagtgggggagccaccagtgggtcttcccagaccagtatctcaggagatgtggtggaggcatgctgcagcgttctgtcaatggtctgtgctgaccctgtctacaaagtgtacgttgctgctttagcagtgcatgctgttggtgactctagaggatccctccagtcacttcaccaggatgcgtcgccgtttgatggctatgcagatgaggtggaaattgccgaagccatccagttgggcgtagaagacactttggatggtcaacaggacagcttcttgcaggcatctgttcccaacaactatctggaaaccacagagaacagttcccctgagtgcacaatccatttagagaaaactggaaaaggattatgtgctacaaaattgagtgccagttcagaggacatttctgagagactggccagcatttcagtaggaccttctagttcaacaacaacaacaacaacaacagagcaaccaaagccaatggttcaaacaaaaggcagaccccacagtcagtgtttgaactcctctcctttatctcatcattcccaattaatgtttccagccttgtcaaccccttcttcttctaccccatctgtaccagctggcactgcaacagatgtctctaagcatagacttcagggattcattccctgcagaataccttctgcatctcctcaaacacagcgcaagttttctctacaattccacagaaactgtcctgaaaacaaagactcagataaactttccccagtctttactcagtcaagacccttgccctccagtaacatacacaggccaaagccatctcgacctaccccaggtaatacaagtaaacagggagatccctcaaaaaatagcatgacacttgatctgaacagtagttccaaatgtgatgacagctttggctgtagcagcaatagtagtaatgctgttatacccagtgacgagacagtgttcaccccagtagaggagaaatgcagattagatgtcaatacagagctcaactccagtattgaggaccttcttgaagcatctatgccttcaagtgatacaacagtaacttttaagtcagaagttgctgtcctgtctcctgaaaaggctgaaaatgatgatacctacaaagatgatgtgaatcataatcaaaagtgcaaagagaagatggaagctgaagaagaagaagctttagcaattgccatggcaatgtcagcgtctcaggatgccctccccatagttcctcagctgcaggttgaaaatggagaagatatcatcattattcaacaggatatgacttttttccgacatatcataccaccaatacaatggatctacaaaaaggaaagtgccaatttgctaattgacagcactggtcagagactaagaattgcagattttggagctgcagccaggttggcatcaaaaggaactggtgcaggagagtttcagggacaattactggggacaattgcatttatggcacctgaggtactaagaggtcaacagtatggaaggagctgtgatgtatggagtgttggctgtgctattatagaaatggcttgtgcaaaaccaccatggaatgcagaaaaacactccaatcatcttgctttgatatttaagaaactactggattttgcaaatactgcatgtgatggtgataaggaatcagaggttgaagatgttgaaacagacagtggtaattcacctgaagatttgaggaaggaaataatgattggtttacaatatcaggcagagattcccccttatcttggagagtacgatggtaatgagaaagacagccctcaacccaagaagatgactggagtacaaaatgcaaaagaggtgctttctacctga

SEQ ID NO: 4368 - DNA, 4488 bp, Homo sapiens
  SIMILAR (1)..(4485): 1001254mologous to Homo sapiens MEK kinase 1,accession number AF042838,Smith-Waterman Score=7767.
ccgagccctgaggcaggcggcggcggaggagccctcaaggcgagcagcgcgcgcgcggctgccgcgggactgctgcgggaggcgggcagcgggggccgcgagcgggcggactggcggcggcggcagctgcgcaaagtgcggagtgtggagctggaccagctgcctgagcagccgctcttccttgccgcctcaccgccggcctcctcgacttccccgtcgccggagcccgcggacgcagcggggagtgggaccggcttccagcctgtggcggtgccgccgccccacggagccgccagccggcgcggcgcccaccttaccgagtcggtggcggcgccggacagcggcgcctcgagtcccgcagcggccgagcccggggagaagcgggcgcccgccgccgagccgtctcctgcagcggcccccgccggtcgtgagatggagaataaagaaactctcaaagggttgcacaagatggatgatcgtccagaggaacgaatgatcagggagaaactgaaggcaacctgtatgccagcctggaagcacgaatggttggaaaggagaaataggcgagggcctgtggtggtaaaaccaatcccagttaaaggagatggatctgaaatgaatcacttagcagctgagtctccaggagaggtccaggcaagtgcggcttcaccagcttccaaaggccgacgcagtccttctcctggcaactccccatcaggtcgcacagtgaaatcagaatctccaggagtaaggagaaaaagagtttccccagtgccttttcagagtggcagaatcacaccaccccgaagagccccttcaccagatggcttctcaccatatagccctgaggaaacaaaccgccgtgttaacaaagtgatgcgggccagactgtacttactgcagcagatagggcctaactctttcctgattggaggagacagcccagacaataaataccgggtgtttattgggcctcagaactgcagctgtgcacatggaacattctgtattcatctgctatttgtgatgctccgggtgtttcaactagaaccttcagacccaatgttatggagaaaaactttaaagaattttgaggttgagagtttgttccagaaatatcacagtaggcgtagctcaaggatcaaagctccatctcgtaacaccatccagaagtttgtttcacgcatgtcaaattctcatacattgtcatcatctagtacttctacatctagttcagaaaacagcataaaggatgaagaggaacagatgtgtcctatttgcttgttgggcatgcttgatgaagaaagtcttacagtgtgtgaagacggctgcaggaacaagctgcaccaccactgcatgtcaatttgggcagaagagtgtagaagaaatagagaacctttaatatgtcccctttgtagatctaagtggagatctcatgatttctacagccacgagttgtcaagtcctgtggattccccttcttccctcagagctgcacagcagcaaaccgtacagcagcagcctttggctggatcacgaaggaatcaagagagcaattttaaccttactcattatggaactcagcaaatccctcctgcttacaaagatttagctgagccatggattcaggtgtttggaatggaactcgttggctgcttattttctagaaactggaatgtgagagagatggccctcaggcgtctttcccatgatgtcagtggggccctgctgttggcaaatggggagagcactggaaattctgggggcagcagtggaagcagcccgagtgggggagccaccagtgggtcttcccagaccagtatctcaggagatgtggtggaggcatgctgcagcgttctgtcaatggtctgtgctgaccctgtctacaaagtgtacgttgctgctttaaaaacattgagagccatgctggtatatactccttgccacagtttagcggaaagaatcaaacttcagagacttctccagccagttgtagacaccatcctagtcaaatgtgcagatgccaatagccgcacaagtcagctgtccatatcaacactgttggaactgtgcaaaggccaagcaggagagttggcagttggcagagaaatactaaaagctggatccattggtattggtggtgttgattatgtcttaaattgtattcttggaaaccaaactgaatcaaacaattggcaagaacttcttggccgcctttgtcttatagatagactgttgttggaatttcctgctgaattttatcctcatattgtcagtactgatgtttcacaagctgagcctgttgaaatcaggtataagaagctgctgtccctcttaacctttgctttgcagtccattgataattcccactcaatggttggcaaactttccagaaggatctacttgagttctgcaagaatggttactacagtaccccatgtgttttcaaaactgttagaaatgctgagtgtttccagtgtttccactcacttcaccaggatgcgtcgccgtttgatggcttatgcagatgaggtggaaattgccgaagccatccagttgggcgtagaagacactttacaacgacaacaacacaacagcttttgcaggcatctgttcccaacaactatctggaaaccacagagaacagttccccttgagtgcacagtccatttagagaaaactggaaaaggattatgtgctacaaaattgagtgccagttcagaggacatttctgagagactggccaggatttcagtaggaccttctagttcaacaacaacaacaacaacaacaacagagcaaccaaagccaatggttcaaacaaaaggcagaccccacagtcagtgtttgaactcctctcctttatctcatcattcccaattaatgtttccagccttgtcaaccccttcttcttctaccccatctgtaccagctggcactgcaacagatgtctctaagcatagacttcagggattcattccctgcagaataccttctgcatctcctcaaacacagcgcaagttttctctacaattccacagaaactgtcctgaaaacaaagactcagataaactttccccagtctttactcagtcaagacccttgccctccagtaacatacacaggccaaagccatctcgacctaccccaggtaatacaagtaaacagggagatccctcaaaaaatagcatgacacttgatctgaacagtagttccaaatgtgatgacagctttggcttgagcagcaatagtagtaattgctgttataccagtgacgagacagtgttcaccccagtagaggagaaatgcagattagatgtcaatacagagctcaactccagtattgaggaccttcttgaagcatctatgccttcaagtgatacaacagtaacttttaagtcagaagttgctgtcctgtctcctgaaaaggctgaaaatgatgatacctacaaagatgatgtgaatcataatcaaaagtgcaaagagaagatggaagctgaagaagaagaagctttagcaattgccatggcaatgtcagcgtctcaggtagccctccccatagttcctcagctgcaggttgaaaatggagaagatatcatcattattcaacaggatacaccagagactctaccaggacataccaaagcaaaacaaccgtatagagaagacactgaatggctgaaaggtcaacagataggccttggagcattttcttcttgttatcaggctcaagatgtgggaactggaactttaatggctgttaaacaggtgacttatgtcagaaacacatcttctgagcaagaagaagtagtagaagcactaagagaagagataagaatgatgagccatctgaatcatccaaacatcattaggatgttgggagccacgtgtgagaagagcaattacaatctcttcattgaatggatggcagggggatcggtggctcatttgctgagtaaatatggagccttcaaagaatcagtagttattaactacactgaacagttactccgtggactttcgtatctccatgaaaaccaaatcattcacagagatgtcaaaggtgccaatttgctaattgacagcactggtcagagactaagaattgcagattttggagctgcagccaggttggcatcaaaaggaactggtgcaggagagtttcagggacaattactggggacaattgcatttatggcacctgaggtactaagaggtcaacagtatggaaggagctgtgatgtatggagtgttggctgtgctattatagaaatggcttgtgcaaaaccaccatggaatgcagaaaaacactccaatcatcttgctttgatatttaagattgctagtgcaactactgctccatcgatcccttcacatttgtctcctggtttacgagatgtggctcttcgttgtttagaacttcaacctcaggacagacctccatcaagagagctactgaagcatccagtctttcgtactacatggtag

SEQ ID NO: 4369 - DNA, 927 bp, Homo sapiens
  SIMILAR (2)..(145): 471254mologous to Homo sapiens putative p150,accession number U93570,Smith-Waterman Score=108.
gatagaccatatgataggccataaagcgagcctcaataaatttaagaaaattgaaattatatcaagcactctctctggccacaatggaataaaactggaaatcaactccaaaagggaccttcaaaaccatgcaaatacaagaaaatttgaataacctgctcctgaatgagcattgggtcaaaaatgaaatcaagatggaaattttaaaattctttgaactgaatgaccataatgacacaacctatcaaaacctctgggatacagcaaaggccacctttcctcctaagaggaaagttcacagccctaaatgcatacatcaaaaagactgaaagagcacaaactgacattctaaggtcacacgtcaaggaactagagaaacaagaacaaaccaaacccaaacccagtagaagaaaggaaataaccaagatcagagaagaactaaatgaaatggaaacaaacaaaaaaaaaatacaaaagataaatgaaacaaaaagcaggttctttgaacagataaataaaattgatagatcattggcaagattagccaagaaaagaagagaaaaaatccaaataacctcaataagaaacaaaacaggagatactacaactgacaccacagaaatacaaaagatcattcaaggctactatgagcacctttatgcacataaactagaaaacctagaggagatggataaattcctggaaaaatacaaccctcctagcttaaatcaggaagaattagataccctgaacagaacaataacaagcaacaagattgaaatggtaattaaaaagttaccaacaaaaaaaaaaagtccaggaccaaatggattcacagctgaattctaccagacatttaaaggaagaattggtaccaatcctttcgatactagtccacaagacagagaaagagggaaccctccctaa

SEQ ID NO: 4370 - DNA, 539 bp, Homo sapiens
  SIMILAR (300)..(386): 441254mologous to Chrysodidymus synuroideus ribosomal protein S10,accession number AF222718,Smith-Waterman Score=70.
ttctctaatgttgtatcatactcttctaaaacttgagtggctgtcttaaaagatataaggggaaagataatattgtctgtctctatattgcttagtaagtatttccatagtcaatgatggtttaataggtaaaccaaaccctataaacctgacctcctttatggttaatactattaagcaagaatgcagtacagaattggatacagtacggatttgtccaaataaattcaataaaaaccttaaagctgacttcgtttgttatgtaggctgtatgcatatattgaaaacagaagtgaaactttcgattgcttttaaataaataccaactaatgaatttactgctaagctcaaaaccgtctacgcttaaggtgagaatctttgccaacagaaaggcgttgctctaaatcgcgaatggtattacgaagaattgcaatctccttgtttttttcttcttgaaaatgctgaagtttctaaacgaaacaaaaaatttgttattagaattcagaaataaaatttagtacaaggaacaacaaaataac

SEQ ID NO: 4371 - DNA, 1200 bp, Homo sapiens
  SIMILAR (823)..(1191): 501254mologous to Homo sapiens putative p150,accession number U93568,Smith-Waterman Score=290.
atggaaatttcagagttaaatgcaaagctaagaagtcaagaaaaagaaaaacaaaatgaaataatcaagctacaactagaaaaacttcagcattttcaagaagaaaaaaacaaggagattgcaattcttcgtaataccattcgcgatttagagcaacgcctttctgttggcaaagattctcaccttaagcgtgaaaatgaacaactaaaaataagtgctgatcttataaaagagaagttaaagtctcatgaacaggaatataagaataatattgccaaacttgtaagtgaaatgaaaatcaaagaggagggatataagaaagaaataagcaaactttatcaggacatgcagagaaaaggacgcatcaaagttacttgtgaatggacatgttctgaaaggaaaactgagggaagagagccaggacctgtcagagagcccacaggaagaagccaaagtgcagaaaatgaaggcagcaagactctagcagagatcaacaccaaaggaactcagagccctgcagaaaggataaataaaattgatagattattagcaagattaaccaataaaagaagagagaaggtccaaataagctcaattagaaacaaaacgggagatattagaactgataccacagaaaaacaaaagtttatgcaaggctaccatgaacacctttacatgcataaactggaaaacctaaaggagatggataaattcctggaaatatacagccctcctcgattaaaacgggaagacatagaaactctgagcagaccaataacaatcagcgacattgaaatgaaaaatctaaagattcccccaaaactcccagaactgataaataaattcagcaaagtttcaagatacaaaattaatgtacacaaattagtagctctgctatatgccaacagcgaccaaactgataatcaaatcaagaactcaacccattttacaatagttgcaaaaaaattacttaggaatatatctaaccaaggacatgaaagacctccacaaggaaaactcaaaacactgctgaaggaaatcatagatgacacaatcaaatggaaacacatcccatgctcatggatgagtacaaccaatattgtgaaaatgaccatactgccaaaaacaatctacaaattcaatgcaattatcatcaaaataccaccatcattcttcgcagaaagaaaaaaacagtcctaa

SEQ ID NO: 4372 - DNA, 666 bp, Homo sapiens
  SIMILAR (169)..(663): 951254mologous to Homo sapiens diubiquitin,accession number Y12653,Smith-Waterman Score=795.
atgattcagaggaaacgtgccagcattggtgctccctgtgcctgggtccgaaaaaaagaagaagaagaagaagaagaagaagaagaagaagaagaggaagaggaagaggaagaggaagaggaagaggaagaagaagaagaagaagaagaaggagagaacaacttggctatggggaaatcctttaacgtgattactgtgcatgtccgttccgaggaatgggatttaatgacctttgatgccaacccatatgacagcgtgaaaaaaatcaaagaacatgtccggtctaagaccaaggttcctgtgcaggaccaggttcttttgctgggctccaagatcttaaagccacggagaagcctctcatcttatggcattgacaaagagaagaccatccaccttaccctgaaagtggtgaagcccagtgatgaggagctgcccttgtttcttgtggagtcaggtgatgaggcaaagaggcacctcctccaggtgcgaaggtccagctcagtggcacaagtgaaagcaatgatcgagactaagacgggtataatccctgagacccagattgtgacttgcaatggaaagagactggaagatgggaagatgatggcagattacggcatcagaaagggcaacttactcttcctggcatcttattgtattggagggtga

SEQ ID NO: 4373 - DNA, 429 bp, Homo sapiens; identical to SEQ ID NO: 3963
  SIMILAR (196)..(411): 551254mologous to Homo sapiens Human secreted protein HCHPF68, SEQ ID NO:163,accession number Y86248,Smith-Waterman Score =162.

SEQ ID NO: 4374 - DNA, 252 bp, Homo sapiens; identical to SEQ ID NO: 3917
  SIMILAR (100)..(219): 851254mologous to Homo sapiens Human secreted protein HCHPF68, SEQ ID NO:163,accession number Y86248,Smith-Waterman Score =171.

SEQ ID NO: 4375 - DNA, 159 bp, Homo sapiens; identical to SEQ ID NO: 2961
  SIMILAR (54)..(113): 601254mologous to Oryza sativa similar to RING-H2 finger protein RHA1a (AF078683),accession number AP000616,Smith-Waterman Score=62.

SEQ ID NO: 4376 - DNA, 354 bp, Homo sapiens
  SIMILAR (88)..(168): 701254mologous to Homo sapiens KIAA0383,accession number AB002381,Smith-Waterman Score=98.
aagaagaagaagaagaagaagaagaagaagaagaagaagaagaagaagaagaagaagaagaagaagaagaagaagaagaagaagaagaagaagaagaagaagaagaagaaggaggaggaggaggaggaggaggaggaggaagaagagggagaagaagaagagttgggtagactgcacggaggaagtggcaaagtacgtgggcttggcttcactgagaatcagcagggttccaccaacagacagcaccaaagagaagacaatagaaaaagtaaacagaagaaaataaacaacacgaagcctgaggccacagaaagcctcattgttaatggaataacaatcacagcacctgcctga

SEQ ID NO: 4377 - DNA, 195 bp, Homo sapiens
  SIMILAR (4)..(192): 691254mologous to Arabidopsis thaliana putative protein,accession number AL162506,Smith-Waterman Score=217.
atgaagaagaagaaagaagaagaagaagaagaagaagaagaagaggaagaggaagaggaagaagaagaagaagaagaagaagaagaagaagaagaagaagaagaagaagaagaagaagaagaagaagaacaggccattgtttctgttcactgtaaaaagaaacacaagcgagaggaggaggaggatgatgagtaa

SEQ ID NO: 4378 - DNA, 259 bp, Homo sapiens
  SIMILAR (9)..(218): 711254mologous to Homo sapiens Human follicle stimulating hormone GPR N-terminal sequence,accession number W03627,Smith- Waterman Score=238.
ttccacacgaagaagaagaagaagaagaagaacaagaagaagaagaagaagaagaagaagaggaagaggaagaggaagaggaagaagaagaagaagaagaagaagaagaagaagaagaagaagaagaagaagaagaagaagaagaagaaagcctttctgacaagcaccacccaactactagttccatggaggcctggtttcaggtggctgtcatgacagcaccccctgagagcaggcacttgccatgggtgcctttcag

SEQ ID NO: 4379 - DNA, 282 bp, Homo sapiens; identical to SEQ ID NO: 2959
  SIMILAR (116)..(232): 841254mologous to Homo sapiens Human secreted protein HCHPF68, SEQ ID NO:163,accession number Y86248,Smith-Waterman Score =168.

SEQ ID NO: 4380 - DNA, 708 bp, Homo sapiens; identical to SEQ ID NO: 3967
  SIMILAR (7)..(189): 1001254mologous to Homo sapiens steroid receptor TR2- 9,accession number M29959,Smith-Waterman Score=304.

SEQ ID NO: 4381 - DNA, 269 bp, Homo sapiens
  SIMILAR (127)..(249): 851254mologous to Homo sapiens Human secreted protein HCHPF68, SEQ ID NO:163,accession number Y86248,Smith-Waterman Score =187.
atgggccccatccacaagatatctcattatgtatatgcaaatatttcaaaatccgaaaaggtcttaaagtcagaacacttccgctctcaggcatttcagcctgggcaacagagcaagactctgtctcaaaaaaaaaaaaagagaagaagaaagaagaagaagaagaagaagaagaagaagaagaagaagaagaagaagaagaagaagaagaagaagaagaagaagaagaagaagaagaaaagaagaggaagaaaagaaaaatgccaaag

SEQ ID NO: 4382 - DNA, 495 bp, Homo sapiens; identical to SEQ ID NO: 2966
  SIMILAR (124)..(303): 911254mologous to Arabidopsis thaliana putative protein,accession number AL162506,Smith-Waterman Score=279.

SEQ ID NO: 4383 - DNA, 715 bp, Homo sapiens
  SIMILAR (327)..(713): 991254mologous to Homo sapiens Glycosyltransferase,accession number AJ271711,Smith-Waterman Score=645.
attggccttggggctctccagccctttgggacttccaatgggatcttagaagcagccgaagcagcgtgagggcggcagcccagggccagccacgatttgaacgctctgccttgcagctcttctggaccgaggagcccaaagccctaccctcaccattcaccaggtcctgtgggaagagcagcgtggaggtgggctgaggttagaaggtgcagagcgtggaagaagattgtgagctgagtattggacatctgttcttgaatagtccctgggcctgccataggaaaggaagttctccagggttacagttcttatccgcatgaatacacatggctctgttacgaaaaattaatcaggtgctgctgttccttctgatcgtgaccctctgtgtgattctgtataagaaagttcataaggggactgtgcccaagaatgacgcacatgatgaatccgagactcctgaagaactggaagaagagattcctgtggtgatttgtgctgcagcagggaggatgggtgccactatggctgccatcaatagcatctacagcaacactgacgccaacatcttgttctatgtagtgggactccggaatactctgactcgaatacgaaaatggattgaacattccaaactgagagaaataaactttaaaatcgtggaattcaacccgatggtcctcaaagggaagatcagaccagactcatcgaggcctgg

SEQ ID NO: 4384 - DNA, 963 bp, Homo sapiens
  SIMILAR (679)..(954): 821254mologous to Homo sapiens precursor polypeptide (AA -21 to 782),accession number X15187,Smith-Waterman Score=386.
  misc_feature (1)...(963): n = a,t,c or g
atggctgctgcactccagctgggagacagagcaaaaccctgttttaaaaaagaaaaagaaagaagacagagaagaaagaaaagaaaagaaagagagaaaggaaggaaggagaaggagaaggagaagaagaaagaagaagaagaagaagaagaagaagaagaagaagaagaagaagaagaagaagaagaagaagaagaagaagaagaagaagaagaagaggaagaagaggaagaagaagaggaagaggaagaagaagaagaagaagaagaagaagaagaagaagaanaagaagaagaagaagaagaagaagaagaagaagggaaagacactgagttaacagggctgccccagggctcagacaggaccagaatagacctggaggatccacaagctggccaagttaatcaggtgctgctgttccttctgatcgtgaccctctgtgtgattctgtataagaaagttcataaggggactgtgcccaagaatgacgcanacccgcttttacgaccacgctctccacctgattcacagaaagggttctacgaccgtcaggtcaccgccgcctttgtactttattggggagtcgaaggcctcagcgctgctcgcgatttccctaaggtggtcgggaaggtcccaaccacgttcttctgtaaaccagataaggaaggcctggggattccggccgcggaaaggcacagaggaggtgaacgctccggctgcccaagtgacgcacttgaaagtgatgaccccatggcttatattcactttactgctgaaggggaagttaccttcaaatcaattttatttgtacccacatctgctccacgtggtctgtttgacgaatatggatctaaaaagagcgattacattaagctctatgtgcgccgtgtattcatcacagacgacttccatgatatgatgcctaaatacctcaattttgtcaagggtgtggtaagtatctga

SEQ ID NO: 4385 - DNA, 2802 bp, Homo sapiens
  SIMILAR (106)..(1080): 991254mologous to Homo sapiens precursor polypeptide (AA -21 to 782),accession number X15187,Smith-Waterman Score=1625.
gtgggcggaccgcgcggctggaggtgtgaggatccgaacccaggggtggggggtggaggcggctcctgcgatcgaaggggacttgagactcaccggccgcacgccatgagggccctgtgggtgctgggcctctgctgcgtcctgctgaccttcgggtcggtcagagctgacgatgaagttgatgtggatggtacagtagaagaggatctgggtaaaagtagagaaggatcaaggacggatgatgaagtagtacagagagaggaagaagctattcagttggatggattaaatgcatcacaaataagagaacttagagagaagtcggaaaagtttgccttccaagccgaagttaacagaatgatgaaacttatcatcaattcattgtataaaaataaagagattttcctgagagaactgatttcaaatgcttctgatgctttagataagataaggctaatatcactgactgatgaaaatgctctttctggaaatgaggaactaacagtcaaaattaagtgtgataaggagaagaacctgctgcatgtcacagacaccggtgtaggaatgaccagagaagagttggttaaaaaccttggtaccatagccaaatctgggacaagcgagtttttaaacaaaatgactgaagcacaggaagatggccagtcaacttctgaattgattggccagtttggtgtcggtttctattccgccttccttgtagcagataaggttattgtcacttcaaaacacaacaacgatacccagcacatctgggagtctgactccaatgaattttctgtaattgctgacccaagaggaaacactctaggacggggaacgacaattacccttgtcttaaaagaagaagcatctgattaccttgaattggatacaattaaaaatctcgtcaaaaaatattcacagttcataaactttcctatttatgtatggagcagcaagactgaaactgttgaggagcccatggaggaagaagaagcagccaaagaagagaaagaagaatctgatgatgaagctgcagtagaggaagaagaagaagaaaagaaaccaaagacctaaaaaagttgaaaaaactgtctgggactgggaacttatgaatgatatcaaaccaatatggcagagaccatcaaaagaagtagaagaagatgaatacaaagctttctacaaatcattttcaaaggaaagtgatgaccccatggcttatattcactttactgctgaaggggaagttaccttcaaaatcaattttatttgtacccacatctgctccacgtgggtctgtttgacggattatggatctaaaaaagagcgattacattaagctctatgtgccgccgtggtattcatcacagaccgacttccatgatatgatgcctaaatacctcaattttgtcaagggtgtggtggactcagatgatctccccttgaatgtttcccgcgagactcttcagcaacataaactgcttaaggtgattaggaagaagcttgttccgtaaaaccgctgggacatgatcaagaagatttgctggatgataaatacaatgatactttttgggaaagaatttgggtaccaacattcaagcttggttgtgattgaaggaccacttcgaattcgaacacgtcttgctaaacttcttagggttccagtcttctcatcatcccactgaccattactagcctagaccagtatgtggaaagaatgaaggaaaaacaagacaaaatctacttcatggctgggtccagcaaaaaagaggctgaatcttctccatttgttgagcgacttctgaaaaagggctatgaagttatttacctcacagaacctgtggatgaatactgtattcaggcccttcccgaatttgatgggaagaggttccagaatgttgccaaggaaggagtgaagttcgatgaaagtgagaaaactaaggagagtcgtgaagcagttgagaaagaatttgagcctctgctgaattggatgaaagataaagcccttaaggacaagattgaaaaggctgtggtgtctcagcgcctgacagaatctccgtgtgctttggtggccagccagtacggatggtctggcaacatggagagaatcatgaaagcacaagcgtaccaaacgggcaaggacatctctacaaattactatgcgagtcagaagaaaacatttgaaattaatcccagacacccgctgatcagagacatgcttcgacgaattaaggaagatgaagatgataaaacagttttggatcttgctgtggttttgtttgaaacagcaacgcttcggtcagggtatcttttaccagacactaaagcatatggagatagaatagaaagaatgcttcgcctcagtttgaacattgaccctgatgcaaaggtggaagaagagcccgaagaagaacctgaagagacagcagaagacacaacagaagacacagagcaagacgaagatgaagaaatggatgtgggaacagatgaagaagaagaaacagcaaaggaatctacagctgaaaaagatgaattgtaaattatactctcaccatttggatcctgtgtggagagggaatgtgaaatttacatcatttctttttgggagagacttgttttggatgccccctaatccccttctcccctgcactgtaaaatgtgggattatgggtcacaggaaaaagtgggttttttagttgaattttttttaacattcctcatgaatgtaaatttgtactatttaactgactattcttgatgtaaaatcttgtcatgtgtataaaaataaaaaagatcccaaat

SEQ ID NO: 4386 - DNA, 622 bp, Homo sapiens
  SIMILAR (14)..(76): 1001254mologous to Homo sapiens F-box protein Fbl5,accession number AF174591,Smith-Waterman Score=101.
cccggctcgagcagctcttggaattctgacatctcatcaaagtggctttttgaaaacatctacaagcaaaattaccttcaactgcgtggaaaaatataagacattaccatgcagtccaccaagcagtatgcctgtttgcacgatttaactaacaagggcattggagaagaaatagataatgaacacccctggactaagcctgtttcttctgagaatttcactttctccattatgtgtggatgttagatgctgaagatttggctgatattgaagatactgtggaatggagacatagaaatgttgaaagtctttgtgtaatggaaacagcatccaactttagttgttcccacctctggttgttttagtaaggacattgttggacctaaggactagtggcctgttggcagcagcattgtgcttctccagcctttgcgtattgtgggtcactcattttgttgtacaggaacagctttaagaactatgtcatcactcccagaatcttctgcaatgtggtagaaaaagccagcaaggactagattgcctaggggaaaagacttaatttactttgggagtgaaaaatctgatcaagaaactgggacgttgttacttcctgtttcctcca

SEQ ID NO: 4387 - DNA, 1421 bp, Homo sapiens
  SIMILAR (504)..(1106): 971254mologous to Homo sapiens F-box protein FBL5,accession number AF176700,Smith-Waterman Score=1021.
acaacactgctctcagaaggatactgcagaactccttagaggtcttagcctatggaatcatgctgaagagcgacagaagttttttaaatattccgtggatgaaaagtcagataaagaagcagaagtgtcagaacactccacaggtataacccatcttcctcctgaggtaatgctgtcaattttcagctatcttaatcctcaagagttatgtcgatgcagtcaagtaagcatgaaatggtctcagctgacaaaaacgggatcgctttggaaacatctttaccctgttcattgggccagaggtgactggtatagtggtcccgcaactgaacttggatacttgaacctgatgatgaatgggtgaaaaatagggaaagatgaaagtcgtgcttttcatgagtgggatgaagatgctgacattgatgaatctgaagagtctgcggaggaatcaattgctatcagcattgcacaaatggaaaaacgtttactccatggcttaattcatgaacgttctaccatatgttggtacttctgtaaaaaccttagtattagcatacagctctgcagtttccagcaaaatggttaggcagattttagagctttgtcctaacctggagcatctggatcttacccagactgacatttcagattctgcatttgacagttggtcttggcttggttgctgccagagtcttcggcatcttgatctgtctggttgtgagaaaatcacagatgtggccctagagaagatttccagagctcttgggaattctggacatcttcatcaaagtggctttttgaaaacatctacaagcaaaattacttcaactgcgtggaaaaataaagacattaccatgcagtccaccaagcagtatgcctgtttgcacgatttaactaacaagggcattggagaagaaatagataatgaacacccctggactaagcctgtttcttctgagaatttcacttctccttatgtgtggatgttagatgctgaagatttggctgatattgaagatactgtggaatggagacatagaaatgttgaaagtctttgtgtaatggaaacagcatccaactttagttgttccacctctggttgttttaatcacagaccatggtctcagaatgaatatgaacagttaaattatgcaaaacaactgaaagagagattggaggcttttacaagagattttcttcctcacatgaaagaggaagaggaggtttttcagcccatgttaatggaatattttacctatgaagagcttaaggatattaaaaagaaagtgattgcacaacactgctctcagaaggatactgcagaactccttagaggtcttagcctatggaatcatgctgaagagcgacagaagttttttaaatattccgtggatgaaaagtcagataaagaagcagaagtgtca

SEQ ID NO: 4388 - DNA, 386 bp, Homo sapiens
  SIMILAR (133)..(375): 421254mologous to Mus musculus protein phosphatase,accession number AB027003,Smith-Waterman Score=181.
aacctcccgacgcggccaggccccggcacacccagctgcagaaaggagagaaaatcccttggctctaaaatgacatctggagaagtgaagacaagcctcaagaatgcctactcatctgccaagaggctgtcgccgaagatggaggaggaaggggaggaggaggactactgcacccctggagcctttgagctggagcggctcttctggaagggcagtccccagtacacccacgtcaacgaggtctggcccaagctctacattggcgatgaggcgacggcgctggaccgctataggctgcagaaggcggggttcacgcacgtgctgaacgcggcccacggccgctggaacgtggacactgggcccgactactaccgcgacatggacac

SEQ ID NO: 4389 - DNA, 371 bp, Homo sapiens
  SIMILAR (2)..(370): 991254mologous to Homo sapiens KIAA0383,accession number AB002381,Smith-Waterman Score=659.
ccttttttatgtccttacaaaaaatgatgaaaagggctgtcatctggttggatacttctctaaggaaaagctttgccagcagaagtataatgtctcctgcataatgatcatgccccagcaccaaaggcaaggatttggacggtttctcattgatttcagctatttgctttctagaagagaaggccaagcagggtctcctgaaaagcctctctccgatctgggccgtctctcctacctggcatattggaagagcgtcatcttggagtatctctaccaccaccatgagaggcacatcagcatcaaggcaattagcagagcgacgggcatgtgcccacatgacattgccaccactctgcagcacctccacatgg

SEQ ID NO: 4390 - DNA, 2241 bp, Homo sapiens
  SIMILAR (85)..(555): 591254mologous to Homo sapiens KIAA0383,accession number AB002381,Smith-Waterman Score=432.
atgggacatagaattaacattgtatgtaagattgatgcgccgtgcgcgcgccagacgcgtaccttccaccccgtggtgaagacggtggaagactgtggccggtacccttctgtgattgaatttggtaaatatgaaatccaaacctggtactcctcgccttacccacaggaatatgcaagaaatttagcaaaagaaggaaaaatgggagaaagagaaatgagctttgttcagcagctccagccaatgtctggcaggtgctcactcttccagggaattgagcagctgtacatatctcctcaatacacaaccacctgtgtttccatccacttcttggcagtgtggataatccttttggttgatgggaatatgagcaaaatttattgccaaaacctttgcttgttagccaagctcttcctggaccacaaaacgttgtattatgatgtcgagccattccttttttatgtccttacaaaaaatgatgaaaagggctgtcatctggttggatacttctctaagtggacagttttacaaggacagtggcaggtgcagggaattgcccacttcagcagggctctgacatacttgatctgtttctccttccctcaggaaaagctttgccagcagaagtataatgtctcctgcataatgatcatgccccagcaccaaaggcaaggatttggacggtttctcattgatttcatctcctttcccaggctgaccataggtgcatcatttactcagctcaggaaacaatcaatgtccaattccactgcaaattcctctccttggggacaatggaaagtcctctcccacattccactggcagagcctaacaagctctccaaatgcacatttcagtctcgaggcacagctttctatcttggggcatctcttccaatccccttgacactgagagggccacaggcctggaatgtcaggaatcttctgggccttcctattttgggtcccaaatggcccaaaccagtaggtttcagtcagataaaggaaaaagtaggaaccaaaggagtaaagtctaaagaaagctgcagaaaggagagaaaatcccttggctctaaaatgacatctggagaagtgaagacaagcctcaagaatgcctactcatctgccaagaggctgtcgccgaagatggaggaggaaggggaggaggaggactactgcacccctggagcctttgagctggagcggctcttctggaagggcagtccccagtacacccacgtcaacgaggtctggcccaagctctacattggcgatgagggtctgaatctgccacaagtggaactgcaggctcagcgtggagcggagggctcaggcatgactcggcacagcgtcccagtccccactacccacagcctcagaagccagaggcatcgccacagctggcctggcgttgagagcctgggaagtgaagtgaaggcaagtcagtcagctgagacagctccttctccccgaaaaggaggaactaattccgccttaaggcaccgagcacgaatgaaattaacctgcttcttcgaggtgtgcctcaacacggaggagcttcaccctcaagtaacaagaacacccaagacaccggaaggccggttcatttcactttcccatcaggcacaaccaacgtcagcctgggcgacggcgctggaccgctataggctgcagaaggcggggttcacgcacgtgctgaacgcggcccacggccgctggaacgtggacactgggcccgactactaccgcgacatggacatccagtaccacggcgtggaggccgacgacctgcccaccttcgacctcagtgtcttcttctacccggcggcagccttcatcgacagagcgctaagcgacgaccacagtaagatcctggttcactgcgtcatgggccgcagccggtcagccaccctggtcctggcctacctgatgatccacaaggacatgaccctggtggacgccatccagcaagtggccaagaaccgctgcgtcctcccgaaccggggctttttgaagcagctccgggagctggacaagcagctggtgcagcagaggcgacggtcccagcgccaggacggagaaaacggcagcagacatgaagcgggtagtgacagcttccagggccaggaatcccaaaccagacagaaaccaaagagagttgctgctgttggagatgccggccgtcaaggaccaggcatggaaatggcctggagaaaccagaatgtgataaaggccttctag

SEQ ID NO: 4391 - DNA, 3471 bp, Homo sapiens
  SIMILAR (1141)..(2517): 971254mologous to Homo sapiens putative p150,accession number U93563,Smith-Waterman Score=2349.
atggggaaaaaacagaacagaaaaactggaaactctaaaaatcagagcgcctctcctcctccaaaggaacgcagctcctcaccagcaacggaacaaagctggatggagaatgactttgacgagctgagagaagaaggcttcagactatcaaattactctgagctaccggaggacattcaaaccaaaggcaaagaagttgaaaactttgaaaaaaatttagaagaatgtataactagaataaccaataagagaaactttaaaccaacaaagatcaaaagagacaaagaaggccattacataatggtaaagggatcaattcaacaagaagagctaactatcctaaatatatatgcacctacaggagcacccagattcataaagcaagtcctgagtgaccgacaaagagacttagacttccacacattaataatgggagactttaacaccccactgtcaacattagacagatctacaagacagaaagtcaacaaggatacccaggaattgaactcagctctgcaccaagcggacctaatagacatctacagaactctccactccaaatcaacagaatatagatttttttcagcaccacaccacacctattccaaaattgaccacttacttggaagtaaagctttcctcagcaaatgcaaaagaacagaaattataacaaactatctctcagaccacagtgcaatcaaactagaactcaggattaagaatctcactcaaaaccgctcaactacatggaaactgaacaacctgctcctgaatgactactgggtacataacgaaatgaaggcagaaatgaagatgttctttgaaaccaacgagaacaaagacacaacataccagaatctctgggacgcattcaaagcagtgtgtagagggaaatttatagcactaaatgcccacaagagaaagcaggaaagatccaaaattgacaccctaacatcacaattaaaagaactagaaaagcaagagcaaacacattcaaaagctagcagaagactaaaccaggaagaagttgaatctctgaatagaccaataacaggatctgaaattgtggcaataatcaatagcttaccaacaaaaagagtccaggaccagatggattcacagccaaattctaccagagtgttggaagttctggccagggcaattaggcaggagaaggaaatcaggggtattcaattaggaaaagaggaagtcaaattgtccctgtttgcagatgacatgattgtatatctagaaaaccccattgtctcagcccaaaatctccttaagctgataagcaacttcagcaaagtctcaggatacaaaatcaatgtacaaaaatcacaagcattcttatacaccaacaacagacaaacagagagccaaatcatgagtgaactcccattcacaattgcttcaaagagaataaaatacctaggaatccaacttacaagggatgtgaaggacctcttcaaggagaactacaaaccactgctcaaggaaataaaagaggatacaaacaaatggaagaacattccatgctcatgggtaggaagaatcaatatcgtgaaaatggccatactgcccaaggtaatttacagattcaatgccatccccatcaagctaccaatgactttcttcacagaattggaaaaaactactttaaagttcatatggaaccaaaaaagagcccgcatcgccaagtcaatcctaagccaaaagaacaaagctggaggcatcacgctacctgacttcaaactatactacaaggctacagtaaccaaaacagcatggtactggtaccaaaacagagaaatagatcaatggaacagaacagagccctcagaaataacgccgcatatctacaactatctgatctttgacaaacctgagaaaaacaagcaatggggaaaggattccctatttaataaatggtgctgggaaaactggctagccatatgtagaaagctgaaactggatcccttccttacaccttatacaaaaatcaattcaagatggattaaagacttaaacgttagacctaaaaccataaaaaccctagaagaaaacctaggcattaccattcaggacataggcatgggcaaggacttcatgtctaaaacaccaaaagcaatggcaacaaaatccaaaattgataaatgggatctaattaaactaaagagcttctgcacagcaaaaaaaactaacatcagagtgaacagacaacctacaaaatgggagaaaattttcgcaacctacttatctgacaaagggctaatatccagaatctacaatgaactcaaacaaatttacaagaaaaaaacaaacaaccccatcaaaaagtgggcgaaggacatgaacagacacttctcaaaagaagacatttatgcagccaaaaaacacatgaaaaaatgctcaccatcactggccatcagagaaatgcaaatcaaaaccacaatgagataccatctcacaccagttagaatggtgatcattcaaaagtcaggaaacaacaggtccctcatgtatccaaggagattacgcattcagccacgacaatgtactgacaataatgaaaaaagcacatggaacaaccacaggcagaaagattacaaactctgcaataaatataaaggtattggttttataaggtggcctgcaggctacggaccagcacagagctctggcaaatgtggaatgccaggagatgtacaaaaaaatcaagtttcttggtataaagttcaaaatgctttgagtagagttgttcaggaggtcctcagtggcactgccactcactggttgggacgtttttgttctctgtcctcctgtgtggaagatgacaaggacggctttgtgcaacttctgttgtatgcgctgcttttcaaccccttggatgagatactcatacaaggaacgaaaaacctaaaaaagttctcagatgaccccaaaaggctcatagagggcttccccaaattggctcttacatttagattaatttggaaggacataaatgtactcctgggacaagcccttttacaagaggaaagacagaccatctgcggagcagcaatccactgtcgaaatgacttacacctggaaaatgccaactaccctggaggggctacagctgttccccagctggaccccaatcaggactacaatgccaaagcgggaatatgggccaggaaccataggctcttgtgtctaatagagatgttcaccagagtggcagaggcaatgcagcttacagaggtgggcaggaggcccttgctggagcctgtgtgcacagtcacactggaggtggtgttggctggggatggtcctggcaccgtggctcccagaggatcccaaacaaaagccatttttaaggacgatgccaagatccccaggaaccacgagaagtcagagctggtgcggggctctggggccctgaggccccgcacggagcaggaggcacttgtagctgagtga

SEQ ID NO: 4392 - DNA, 1900 bp, Homo sapiens
  SIMILAR (861)..(1898): 961254mologous to Homo sapiens putative p150,accession number U93563,Smith-Waterman Score=1793.
atttcaataagtgtatgactcttaaattccggttaaaaaatttttcaaggatcaacaaaattgatacaccgctagcaagactaataaagaagaaaagagagaagaatcgaatagacacaataaaaaatgataaaggggatatcaccagtaatcccacagaaatacaaagtaccatcagagaatactacaaacacctctacacaaataaactagaaaatctagaagaaatggataaattcctcgacacatacaccctcccaagactaaaccaggaagaagttgaatctctgaatagaccaataacaggctctgaaattatggcaataatcaatagcttaccaaccaaaaagagtccaggaccagatggattcacagccaaattctaccagaggtacaaggaggaactggtaccattccttctgaaactattccaatcaatagaaaaagagggaatcctccctaactcattttatgaggccagcatcatcctgataccaaagccgggcagagacacaaccaaaaatgagaattttagaccaatatctttgatgaacattgatgcaaaaatcctcaataaaatactggcaaaccgaatccagcaacacatcaaaaagcttatccaccatgatcaagtgggcttcatccctgggatgcaaggctggttcaatatacgcaaatcaataaatgtaatccagcatataagcagaaccaaagacaaaaaccacatgattatctcaatagatgcagaaaaggcctttgacaaaattcaacaacccttcatgctaaaaactctcaataaattagggaataaaatacctaggaatccaacttacaagggatgtgaaggacctcttcaaggagaggtccttgaaccactgctcaatgaaataaaagaggatacaaacaaatggaagaacattccatgctcatgggtaggaagaatcaatatcgtgaaaatggccatactgcccaaggtaatttatagattcaatgccatccccatcaagctaccaatgactttcttcacagaattggaaaaaactactttaaagttcatatggaaccaaaaaagagccctcatcgccaagtcaatcctaagccaaaagaacaaagctggaggcatcacgctacctgacttcaaactatactacaaggctacagtaaccaaaacagcatggtactggtaccaaaacagagatatagatcaatggaacagaacagagccctcagaaataacgctgcatatctacaactatctcatctttgacaaacctgagaaaaacaagcaatggggaaaggattccctatttaataaatggtgctgggaaaactggctagccatatgtagaaagctgaaactggatcccttccttacaccttatacaaaaattaattcgagatggattaaagacttaaacgttagacctaaaaccataaaaaccctagaagaaaacctaggcattaccattcaggacataggcatgggcaaggactacatgtctaaaacaccaaaagcaatggcaacaaaagccaaaattgacaaatgggatctaattaaactcaagagcttctgcacagcaaaagaaactaccatcagagtgaacaggcaacctacaaaatgggagaaaattttcgcaacctactcatctgacaaagggctaatatccagaatctacaatgaactcaaacaaatttacaagaaaaaaacaaacaaccccatcaaaaagtgggtgaaggacatgaacagacacttctcaaaagaagacatttatgcagccaaaaaacacatgaaaaaatgctcaccatcactggccatcagagaaatgcaaatcaaaaccacaatgagataccatctcacaccagttagaatggcaatcattaaaaagtcaggaaacaacag

SEQ ID NO: 4393 - DNA, 1932 bp, Homo sapiens
  SIMILAR (380)..(1930): 751254mologous to Homo sapiens putative p150,accession number U93563,Smith-Waterman Score=1971.
gagctggttttttgaaaagatcaacaaaattgatagactgctagcaagactaataaagaagaaaagagagaagaatcaaatagatgcaataaaaaatggtaaaggggatatcaccactgatcccacagaaatacaaactaccatcagagaatactataaacacctctatgcaaataaactagaaaatctagaagaaatggataaattcctcgacacatacaccctcccaagactaaaccaggaagaagctgaatctctgaatagaccaataacaggctctgaaattgaggcaataattaatagcttatcaaccaaaaaaagtccaggaccagatggattcacagccgaattctaccagaggtacaaggaggagctggtaccattccttctgaaactattccaatcaacagaaaaagagggaatcctccctaactcattttatgaggccagcatcatcctgataccaaagcctggcagagacacaacaaaaaaagagaattttagaccaatatccttgatgaacattgatgcaaaaatcctcaataaaatactggcaaaccgaatccagcagcacatcaaaaagcttatccaccatgatcaagtgggcttcatccctgggatgcaaggctggttcaacatacgaaaatcaataaacgtaatccagcatataaacagaaccaaacacaaaaaccacatgattatctcaatagatgcagaaaaggcctctgacaaaattcaacaacccttcatgctaaaaactctccgtaaattaggtattgatgagacacaaacagagagccaaatcatgagtgaactcccattcacaattgcttcaaagagaataaaatacctaggaatccaacttacaagggacgtgaaggacctcttcaaggagaactacaaaccactgctcaatgaaataaaagaggatacaaacaaatggaagaactttccatgctcatgggtaggaagaatcaatattgtgaaaatggccatagtgcccaaggtaatttatagattcaatgccagccccatcaagctaccaatgactttcttcacagaattggaaaaaactactttaaagttcatatggaaccaaaaaagagcctgcattgccaagtcaatcctaagccaaaagaacaaagctggaggcatcatgctacctgacttcaaactatactacaaggctacagtaaccaaaacagcatggtactggtaccaaaacagagatatagaccaatggaacagaacagagccctcagaaataacgccgcatatctacaactatctgttctttgacaaacctgacaaaaacaagcaatggggaaaggattccctatttaataaatggtgctgggaaaactggctagccatatgtagaaagctgaaattggatcctgtacttacaccttatacaaaaattaattcaagatggattaaagacttacatgttagacctaaaaccataaaaaccctagaagaaaacctaggcattaccattcaggacataggcatgggcaaggacttcatgtctaaaacaccaaaagcaatggcaacaaaagccaaaattgacaaatgggatctaattaaactaaagagcttctgcacagcaaaagaaactaccatcagagtgaacaggcaacctacagaatgggagaaaatttttgcaacctactcatctgacaaagggctaatatccagaatctacaatgaactcaaacaaatttacaagaaaaaaacaaacaaccccatcaaaaagtgggcgaaggacatgaacagacacttctcaaaagaagacatttatgcagacaaaaagcacatgaaaaaatgctcatcatcactgatcatcagagaaatgcaagtcaaaaccacaatgagataccatctcacaccagttagaatggcgatcattaaaaagtcaggaaacaacag

SEQ ID NO: 4394 - DNA, 2574 bp, Homo sapiens
  SIMILAR (652)..(2571): 951254mologous to Homo sapiens putative p150,accession number U93574,Smith-Waterman Score=3211.
atgaaggcagaaataaagatgttctttgaaaccaatgagaacaaagacacaacataccagaatctctggaacacattcaaagcaatgtgtagagggaaatttatagcactaaatgcccacaagagaaagcaggaaagatctaatacggacaccctaacatcacaattaaaagaactgaagaagcaagagcaaacacattcaaaacctagcagaaggcaagaaataactaagatcagagcagaaatgaaggaaatagagacacaaaaaacccttcaaaaaatcaaggaatccaggacctggttttttgaaaagatcaacaaaattgatagactgctagcaagactaacaaagaagaaaagagagaagaatcaaatagacgcaataaaaaatgataaaggggatatcaccaccgatcccacagaaatacaaactaccatcagagaatactataaacacctctatgcaaataaactagaaaatctagaagaaatggataaattcctcgacacatacaccctcccaagactaaaccaggaagaagttgaatctctgaatagaccaataacaggatctgaaattgaggcaataattaatagcttaccaaccaaaaatgtccaggaccagatggattcacagccgaattctaccggagaaaaagggggaatcctccctaactcattttatgaggccagcatcatcctgataccaaagcctggtacagacacaacaaaaaaagagaattttagaccaatatccttgatgaacattgatgtaaaaatccttaataaaatactggcaaaccgaatccagcagcacatcaaaaagcttattcaccatgatcaagtgggcttcatccctgggatgcaaggctggttcaacatacgaaaatcaataaacatcatccagcatataaacagagccaaagacaaaaaccacatgattatctcaatagatgcagaaaaggcctttgacaaaattcaacaatgcttcatgctaaaaactctcaataaattaggtattgatgggacatatctcaaaataataagagctatctatgacaaacccacagccaatatcatactgaatggacaaaaactggaagtgttccctttgaaaactggcacaagacagggatgccctctctcaccactcctattcaacatagtgttggaagttctggccagggcaatcaggcaggagaaggaaataaagggcattcaattaggaaatgaggaagtcaaattgtccctgtttgcagatgacatgattgtatatctagaaaaccccatcatctcagccccaaatctccttaagctgataaacaacttcagcaaaggctcagcatataaaatcaaagtgcaaaaatcacaagcattcttatacactaataacagacaaacagaaagccaaatcatgagtgaactcccattcacaattgcttcaaagagaataaaatacctaggaatccaacttacaagggatgtgaaggacctcttcaaggagaactacaaaccactgctcaaggaaataaaagaggatacaaacaaatggaagaacattccatgctcatgggtaggaagaatcaatatcatgaaaatggccatactgcccaaggtaatttatagattcaatgccatcctcatcaagctaccaatgacttttttcacagaattggaaaaatctactttaaagttcatatggaaccaaaaaagagcccgcattgccaagtcaatcctaagtcaaaagaacaaagctggaggcatcacgctacctgacttcaaactatactacaaggctacagtaaccaaaacagcatggtactggtaccaaaacagagatatagaccaatggaatggaacagagccctcagaaataatgccacatatctacaactatctgatctttgacaaacctgagaaaaacaagcaatggggaaaggattccctatttaataaatggtgctgggaaaactggctagccatatgtagaaagctgaaactggatcccttccttacaccttacacaaaaattaattcaagatggattaaagacttacatgttagacctaaaaccataaaaaccctagaaaacctaggcaataccattcaggacataggcatgggcaaggacttcatgtctaaaacaccaaaagcaatggcaacaaaagccaaaattgacaaatgggatctaataaaactaaagagcttctgcacagcaaaagaaactaccatcagagtgaacaggcaacctacaaaatgggagaaaatttttgcaacctactcatctgacaaagggctaatatccagaatctacaatgaactcaaacaaatttacaagaaaaaaacaaacaaccccatcaaaaagtgggcaaaggatatgaacagacacttctcaaaagaagacatttatgcagccaaaaaacacatgaaaaaatgctcaacatcactggccatcagagaaatgcaaatcaaaaccacaatgagataccatctcacaccagttagaatggcgatcattaaaaagtcagggaacaacaagtgctggagaggatgtggagaaataggaacactttaa

SEQ ID NO: 4395 - DNA, 1965 bp, Homo sapiens
  SIMILAR (1884)..(1964): 1001254mologous to Homo sapiens putative p150,accession number U93564,Smith-Waterman Score=154.
atgaccttagagagtgagcagacatttgtgtatgctgtaactgcaacacagactggggctaaagaggggacgaggatgagcaagagcaatgtggcaggacagcagggtgatagtggggagaaggcacttcaaaaaacgtatcagaagatacttcgagaaaaagaaagtgctttagaagcgaaataccaagcaatggagagagcagcaacatttgaacatgacagagataaagttaaaaggcaattcaagatttttagggagaccaaagaaaatgaaattcaggacttactgagggccaagagggagttggagagcaaacttcagaggctacaggctcagggtatccaagtatttgatcctggggagtctgattcagatgacaactgtacagatgtcactgctgctggaacccaatgtgaatattggactggcggagccttgggaagtgaaccttccataggaagcatgatccagcttcagcagtccttcagaggccctgagtttgcccatagttctatagatgtggaaggaccctttgcaaatgttaatagagatgactgggatattgctgtagctagtttattacaagttactcctctgttttcacattctctgtggagtaacactgtcagatgttacctcatttatacagatgaaacccagcctgagatggatcttttccttaaggactattcacctaaacttaagagaatgtgcgagacaatgggatattttttccatgctgtttattttccaatagatgttgaaaatcaatacctcactgtaagaaaatgggaaattgagaaaagttctttagttattttatttattcacttaacattaccaagaataaaatacctaggaatccaacttacaagggatgtgaaggacctcttcaaggagaactacaaaccactgctcaacgaaataaaagaggacacaaacaaatggaagaacattctatgctcatggacaggaagaaacaacgtcatgaaaatggccacactgcccaaggtaatttatagattcaatgccatccccatcaagctaccaatgactttcttcacagaattggagaaaactactttgaagttcatatggaaccaaaaaagagcccacattgccaagacaatcctaagcgaaaagaacaaagctggaggcatcatgctacctgacttcaaactatactttaaggctacagtaaccaaagcagcatggtactggtgccaaaacagagatatagaccaatggaacagaacagaggcctcagaaataacaccacacatctacaaccatctgatctttgacaaacctgacaaaaacaagaaatggggaaaggattccctctttaataaatggtgctgggaaaactggctagccatatgtagaaagctgaaactggatcccttccttacaccttacacaaaaattaattcaagatggattaaagacttaaatgttagacctaaaaccataaaaaccctagaagaaaacctaggcaatgccattcaggacataggcatgggcaaggacttcatgactaaaacaccaaaagcaatggcaacaaaagccaaaattgacaaatgggatctaattaaactaaagagcttctgcatggcaaaagaaactcccatcggagtgaacaggcaacttacagaatgggagaaaatttttgcaatctacccatctgacaaagggctaatatccagaatctacaaagaacttaaacaaacgtacaagaaaaaaacaaacaaccccatcgaaaagttggcaaaggaaatgaacagacacctctcaaaagaagacatttatgcagccaacagacacaagaaaaaatgctcatcatcactggtcatcagagaaatgcaaatcaaaaccacaagagatatcatctcacaccagtcagaatggcaatcattaaaaagtcaggaaacaacagatgctggagaggatgtggagaaatag

SEQ ID NO: 4396 - DNA, 636 bp, Homo sapiens
  SIMILAR (636)..(4): 871254mologous to Homo sapiens p40,accession number U93569,Smith-Waterman Score=928.
ttacaatttgccatgtttttgtagtggctggtaccggttgttcctttccatgtttactgtttccttcaaggtctcttgtagggcaggccttgtggtgacacaatctctcagcatttgcttgtctgtaaaggattttatttctccttcacttatgaagcttagtttggctggatatgaaattctgggttgaaaattcttttctttaagaatgttgaatattggcccccactctcttctggcttgtagagtttcttctgagagatccgctgttagtctgatgggtttccctttgtgggtaacctgacctttctctctggctgcccttaacattttttccttcatttcaactttggtgaatctgacaattatgtgtcttggagttgctcttctcaaggagtatctttgtggcattctctgtatttcctgaatttgaaagttggcctgccttgctaggttggggaagttctcctggataataccctgaatagtgttttccaacttggttccattctccccgtcactttcagttacaatgatcagacacagatttgatattttcacatagtcccatatttcttggaggctttgttcattactttttactcttttttctctaaacttctcttctcgcttcat

SEQ ID NO: 4397 - DNA, 1692 bp, Homo sapiens
  SIMILAR (499)..(1686): 851254mologous to Homo sapiens putative p150,accession number U93563,Smith-Waterman Score=1824.
atggggagaaaccagagcagaaaagctgaaaattctaaaaaccagagcacctcttctcttccaaaggatcgcagctcctcaccagcaacggaacaaagctggacgaagaatgactttgacgagctgacagaagtaggcttcagaagtgacaaggagaatggaaccaagttggaaaacactcttcagggtattatccaagagaacttccccaacctagcaaggcaggccaacattcaaattcaggaaatacaaagaacaccacaaagatactccttgagaagagcaatcccaggacacataaatgtcagattcaccaaggttgaaatgaaggaaaaaatgttaagggcagccagagagaaaggtcgggttacccataaagggaagcccatcagactaacagcagatctcttagcagaaactctacaagccagaaagaataaaatacctgggaatccaacttacaagggatgtgaaggacctcttcaaggagaactacaactcaacgaaataaaagaggacacaaacaaaaggaagaacattccatgctcatgggtaggaagaatcaatatcttgaaaatggccatactgcaaaaagtaatttatagattcaatgccatacccatcgagctaccaattactttcttcacaaaattggaaaaaactactttaaggttcatatggaacaaaaaaagagtccacattgccaagtcaatcccaagcaaaaagaacaaagctggaggcatcatgctacctgacttcaaactatactacaaggctacaataaccaaaacagcatggtacttgtaccaaaacagagatatagaccaatggaacagaacagaagccttaggaataacaccacacatctacaaccatctgatctttgacaaacctgacaaaaacaagcaacggggaaaggattccctatttaataaatggtgctgggaaaactggctagtcatatgtagaaagctgaaactggatgccttccttacaccttatacaaaaattaattcaagatggattaaagacttaaatattagacctaaaaccataaaaaccctagaagaaaacctaggcaataccatccagggcataggcatgggcaaggacttcatgactaaaacaccaaaagcaatggcaacaaaagccaaaatagacaaacgggatctaattaaactgaagagcttctgcacagcaaaagaaactaacatcagagtgaacaggcaacctatagaatgggagaaaatttttgcaatctaccgatctgacaaagggctaatatccagaatctacaaagaacttaaacaaatttacaagaaaaaaacaaacaactccatcaaaaagtgggcaaaggatatgaacagacacttctcaaaagaagacatttatgcagccaacagacatgagaaaaaatggtcaccatcactggtcaccagagaaatgcaaatcaaaaccataatgagataccatctcacaccagttagaattatgaccattaaaatgtcagggaacaacagatgctggagaggatatggagaaataggaatgcttttacactgttggtgggaatgtaaactagttcaagcattatggaagacagtgtggcgattcctcaaggatctagagctagaaataccatttgacccagtgatcccattactgggtatatacccaaaggattatacataa

SEQ ID NO: 4398 - DNA, 2405 bp, Homo sapiens
  SIMILAR (618)..(2168): 931254mologous to Homo sapiens putative p150,accession number U93563,Smith-Waterman Score=2604.
agtttatgtggatcaggaatctgaatgcagcttacctgggtgcctctggctcagagtctctcatgagcctcaatcaaggtgtcagctgtggccacagtcatctcaaggctctactggaggaagagccaattccaaattcacacatgtggttgctgtcaggactcagttccaggaaaaccacacgctaccccagaaggaaagatctatctggttctgtgttaggcacagagatatacccgctagattctccttcaaggaaggatttattacccagctgtgagaagtatagtcagcaggcagtttccggctgtcagtccttcagaatctgcctcatctgcagagagcagccctgttggaggttgagtccttccaagcaggggctatccatcaacaagtggcttatggttgctgctggcctgttggaccaagtgagttcctccctggtgccttcagctgccaggacaggctctggtcaactgattccaaactggaataagcagctgcgttcccttggcctctacaaaggtgatttctggctggatttgaccaataggagacaagggtcagagatcagattggagggtggggagaagttaggatctctctccatcgccttcttagccttaggaaaagaggaagtcaaattgtccctgtttgcagacgacatgattgtatatctagaaaaccccatcatctcagcccaaaatctcctcaagctgataagcaacttcagcaaagtctcaggacacaaaatcaatgtgcaaaaatcacaagaattcttatacaacaataacagacaaacagagagccaaatcatgagtgaactcccattcacaattgcttcaaagagaataaaatacctaggaatccaacttacaagggatgtgagggacctcttcaaggagaactacaaaccactgctcaacaaaataaaagaggatacaaacaaatggaagaacattccatgctcatgggtagaaagaatcaatatcgtgaaaatggccatactgcccaaggtaatttatagattcaatgccatccccatcaagctaccaatgactttcttcacagaactggaaaaaactactttaaagttcatatggaaccaaaaaagagcccgcattgccaagtcaatcctaagccaaaagaacaaagctggaggcatcacgctacctgacttcaaactatactacaaggctacagtaaccaaaacagcatggtactggtaccaaaacagagatatagaccaatggaacagaacagagccctcagaaataacgccacatatctacaactatctgatctttgacaaacctgacaaaaacaagcaatggggaaaggattccctatttaataaatggtgctgggaaaactggctagccatatgtagaaagctgaaactggatcccttctttaccccttatacaaaaattaattcaagatggattaaagacttaaatgttagacctaaaaccataaaaaccctagaagaaaacctaggcaatatcattcaggacataggcatgggcaaggatttcatgtctaaaacaccaaaagcaatggcaacaaaagccaaaattgacaaatgggatctaattaaactaaagagcttctgcacagcaaaagaaactaccgtcagagtgaacaggcaacctacagaatgggagaaaatttttgcaacctactcatctgacaaagggctaatatccagaatctacaatgaactcaaacaaatttacaagaaaaaaacaaacaaccccatcaaaaagtgggcaaaggatatgaacaaacacttctcaaaagaagacatttatgcagccaacagacacatgaataaatgctcttcatcactggccatcagagaaatgcaaatcaaaaccacaatgagataccatctcacaccagttagaatggcaatcattaaaaagtcaggaaacaacgggtgctggagaggatgtggagaaataggaacacttttatactgttggtgggactgtaaactagctcaaccattgtggaagtcagtgtggcgattcctcagggatctagaactagaaataccatttgacccagccatcccattactgggtatatacccaaaggaatataaatcatgctgctacaaagacacatgcacacgtaatgcatcatttctctctggctgctttcaagactttctcttcgcctttaggtttcaagagtttaattataatgtatcttggtgtttcactgggtttatcctgtaccaagttcgcatagcttcttgggtccttaggtttgtttcttttgccaaaggtggagagaaaaggctcaggcccacatggccaaagatctctcagaccaggccatttgctgtggctatgtcctttttgcaagcagtgcccaccctggtgtctctgggctga

SEQ ID NO: 4399 - DNA, 1572 bp, Homo sapiens
  SIMILAR (1497)..(1571): 921254mologous to Homo sapiens putative p150,accession number U93563,Smith-Waterman Score=153.
atgctggtgagctttgtctctctgggttccctgtgccttcaaccaggtagccagactctgctggagaaaaatcgcacagtcaagccgcatgtctccttcacactgctgccagctttatctcatgtttctgagaaaaatgaagccgaaagcatgaactcccttatccctcccccgccaaatctacacacccctgcacaggcgcctttccctctgcccacaaaggagcaagatcgcagctcctcaccagcaacggaacaaagctggacagagaatgactttgatgagttgacagaagtaggcttcagaaggtcggtaataacaaactcctccaagctaaaggaggatgttcgaacccattgcaaggaagctaaaaatcttgaaaaaagattacatgaatggctaactagaatcaacagtgtagagaagaccttaaatgacctgaagctgaaatccatggcacgagaacttcatgacacatgcacaagcttcaatagccgatttgatcaagtggaagaaagggtgtcagcgattgaggatcaaaccaatgaaataaataatggggagaatggaaccaagttggaaaacactctgcaggatattatccaggagaacttccccaacctagcaaggcaggccaacattcaaattcaggaaatacggagaacaccacaaagatactcctcgagaaaagcaaccccaagacacataattgtcagattcaccaaggttgaaatgaaggaaaaagtgttaagggcagccagagagaaagtattggaagttctggccagggccatcagtcaagagaaagaaataaaatgtactcagttaggaaaagaggaagtcaaattgtccttgtttgcagatgacatgattgtatgtttagaaaaccctgttgtctcagaccataatgtccttaagctgataagcaacttcagcaaagtctcagtatacaaaatcaacgtgcaaaaatcacatgcattcctatacaccaataacagacaaacagagagccaaatcatgagtgaactcccgttcacaattactacaaagagaataaaatacctaggaatccaacttacaagggctgtgaaggacttcttcaaggagaaatacaaaccactgctcaacgaaataaaaaaggacacaaacaaatggaagaacattccatgttcatgcataggaagaatcaatatcatgaaaatggccatagtgcccaaggtaatttatggattcaatgccatccccatcaagctaccaaggactttcttcacagaattggaaaaaactactctaaagttcatatggaagaaaaaaggagccaaaacaatcctaagcataaagaacaaagctggaggcatcatgctacctgacttcaaactatactacaaggctacagtaaccaaaatagcatggtactggtaccaaaacagatatataaaccaacggaacagaacagagacctcagaaataacatcacacatctacaaccatctgattttgacaaacctgacaaaaacaagaaatggggaaaggattccctatttaataaatggtgctgggaaaactggctag

SEQ ID NO: 4400 - DNA, 1730 bp, Homo sapiens
  SIMILAR (231)..(281): 821254mologous to Homo sapiens putative p150,accession number U93563,Smith-Waterman Score=70.
atgtctgctgttaccactcttactcaacagagtactgaaatttctagccaatgcaaaatacaaactaccatcagagaatactgtaaacacctctacacaaataaactagaaaatctagaagaaacggataaattcctgaacacatacaccctcccaagactaaaccaggaagaagttcaatccctgaatagaccaataacaggttctgaaattgaggcaataattaatagcctaccaaccaaaaaagtccaggaccagacagattcacagctgaattctactagagtattagaagttctggccagggcaatcaggcaagagaaagaaataaagggtattcaattaggaaaagaggaagtcaaattgtccctgtttgcagatgacatcattgtatatttagaaaaccccatcatctcagcccaaaatcttcttaagctgataagcaacttcagcaaagtctcaggatacaaaatcaatctgcaaaaatcacaagcattcctatacaccaataacaaacaaacagggagccaaatcatgagtgaactcccattcacaattgcttcaaagagaataaaatgcctaggaatccaacttacaagggatgtgaaggatctcttcaaggagaactacaaaccactgctcaatgaaataaaagaggacacaaacgaatggaagaacattccatgctcatggataggaagaatcagtatcgtgaaaatggccatactgcccaaggtaatttatagattcaatgccatccccatcaagctaccaatgacttttttcacagaattggaaaaaactactttaaagttcatatggaaccaaaaaagagcccacatcgccaagtcaatcctaagccaaaagaacaaagctggaggcatcacactacctgacttcaaactatactacaaggctacagtaaccaaaacagcatggtactggtaccaaaacagagacatagaccaatggaacagaatagagcccctggaaataataccatacatctacaactatctgatctttgacaaatctgacaaaaacaagaaatggggaaaggattccctatttaataaatggtgctgggaaaactggctaaccatatgtagaaagctgaaactggatcccttcctcacatcttatacaaaaattaattcaagatggattaaagacttaaatgttagacctaaaaccataaaaaccccagaagaaaacctaggcaataccattcaggacataggcatgggcaaggacttcatgactaaatcagcaaaaaggaatggcaacaaaagccaaaattgataaatgggatctaattcaactaaagagcttctgcacagcaaaagaaactaccatcagagtgaataggcaacctacagaatgggagaaaatttttggaatctactcatctgacaaagggctcatatacagaatctacaaagaacttaaacaaatttacaagaaaaaaacaaacaaccccatcaaaaagtgggcgaaggacatgaacagacacttctcaaaagaagacatttatgcagccaaaaaacacatgaaaaaatgctcaccatcactggccatcagagaaatgcaaatcaaaaccacaatgagataccatctcacaccagttagaatggcgatcattgaatcaagtcaggaaacaacaggtccctcatgtatccaaggagattacgcattcagccacgacaatgtactgacaataatgaaaaaag

SEQ ID NO: 4401 - DNA, 4329 bp, Homo sapiens
  SIMILAR (950)..(3724): 811254mologous to Homo sapiens putative p150,accession number U93563,Smith-Waterman Score=3671.
atggaccatctggccggggagggcgtcaaggccaagtacctcatgccgccccttgtcacaatgacctccccgttccacttcactgccatgccagagaagtccttaaaggacctgatggagctgaaaaccaaggcacgagaactacgtgacaaatgcacaagcctcagtagccgattcgatcaactggaagaaagggtatcagtgatggaagatgaaatcaatgaaatgaagcaagaagagaagtttagagaaaaaggaataaaaagaaatgaacaaagcctccaagaaatatgggactatgtgaaaagaccaaatctatgtctaattggtgtacctcaaagtgacagagagaatggaaccaagttggaaaacactctgcaggatattatgcaggagaacttccccaatctagcaaggcaggccaacattcaaattcaggaaatacagagaacaccacaaagatactcctcaagaagagcaactccaagacacataattgtcagattcaccaaagttaaaatgaaggaaaaaaatgttaagggcagccagagagaaaggtcgggttaccctcaaagggaagcccatcagactaacagcagatctctcggcagaaaccctacaagccagaagagagtgggggccaatattcaacattcttaaagaaaataattttcaaccatcagctagaattttcaacaatcagaatctcatatccagcccaaactaagcttcataagcgaaggagaaataaaatactttatagacaagcaaatgctgagagattttatgaggcgccaggcctgccttacaagagctcctgaaggaagaagcactaaacatggaaaggaacaaccgacagatcaacgagacagaaagtcaacaaggatacccaggaattgaattcagctctgcaccaagcggacctaatagacatctacagaactctccaccccaaatcaacagaatatacattttttcagcaccacaccacacctattccaaaattgaccacatagttggaagtaaagctctcctcagcaaatgtaaaagaacagaaattataacaaactatctctcagaccacagtgcaatcaaactagaactcaggattaagaatttcactcaaagccgctcaactacatggaaactgaacaacctgctcctgaatgactactgggtacataacgaaatgaatgcagaaataaagatgttctttgaaaccaacgagaacaaagacacaacataccagaatctctgggacgcattcaaagcagtgtgtagagggaaatttatagcactaaatgcccacaagagaaagcaggaaagatccaaaattgacaccctaacatcacaattaaaagaactagaaaagcaagagcaaacacattcaaaagctagcagaaggcaagaaataactaaaatcagagcagaactgaaggaaatagagacacaaaaaacccttcaaaaaattaatgaatccaggagctggttttttgaaaggatcaccaaaagtgataggccgctagcaagactaataaagaaaaaaagagagaagaatcaaatagacacaataaaaaatgataaaggggatatcaccactgatcccacagaaatacaaactaccatcagagaatactacaaacaactctatgcaaataaactagaaaatctagaagaaatgaataaattcctcgacacatacactctcccaagactaaaccaggaagaagttgaatctctgaatagaccaataacaggatctgaaattgtggcaataatcaatagtttaccaaccaaaaagagtccaggaccagatggattcacagccgaattctaccagaggtacaaggaggaactggtaccattccttctgaaactattccaatcaatagaaaaagagggaatcctccctaactcattttatgaggccagcatcattctgataccaaagccgggcagagacacaaccaaaaaagagaattttagaccaatatccttgatgaacattgatgcaaaaatcctcaataaaatactggcaaaccgaatccagcagcacatcaaaaagcttatccaccatgatcaagtgggcttcatccctgggatgcaaggctggttcaatatacgcaaatcaataaatgtaatccagcatataaacagagccaaagacaaaaaccacatgattatctcaatagatgcagaaaaagcctttgacaaaattcaacaacccttcatgctaaaaactctcaataaattaggtactgatgggacatatctcaaaataataagagctatctatgacaaacccacagccaatatcatactgaatgggcaaaaactggaagcattccctttgaaaactggcacaagacagggatgccctctctcaccgctcctattcaacatagtgttggaagttctggccagggcaatcaggcaggagaaggaaataaagggtattcaattaggaaaagaggaagtcaaattgtccctgtttgcagacgacatgattgtttatctagaaaaccccattgtctcagcccaaaatctccttaagctgataagcaacttcagcaaagtctcaggatacaaaatcaatgtacaaaaatcacaagcattcttatacaccaataacacagacaaacaagagagccaaatcatgagtgaactcccattcacaactgcttcaaagagaataaaatacctaggaatccaacttacaagggatgtgaaggacctcttcaaggagaactacaaaccactgctcaatgaaataaaagaggatacaaacaaatggaagaacgttccatgttcatgggtaggaagaatcagtatcgtgaaaatggccatactgcccaaggtaatttatagattcaatgccatccccatcaagctaccaatgactttcttcacagaattggaaaaaactactttaaagttcatatggaaccaaaaaagagcccccacattgccccaagtccaatccctaagcccaaaagaacaaagctgggaggcatcacggctacctgacttcaaactatacctacaaggcctacagtaacccaaaacagcatggtactggtacccaaaacagagatatatagaccaatggaacagaatagagccctcagaaataatgccacatatatctacaactatctaatctttgacaaaccctgggaaaaaccaagcaatgggggaaaggattcccatatttaataaatgggtgctgggaaaactgggctagccatatgtagaaagctgaaactggatccccttcccttacaccttatacaaaaaatcaaattcaagatggattaaagactttaaatgttaagcctaaaccccataaaaaactctagaaggaaaacctaggcaatacccatttcaggacataggcatgggcaaggacttcatgtctaataaaacaccaaaagccaatggccaacaaaagacaaaattgacaaatgggatctaattaaactaaagagcttcctgcacagcaaaagagaaactaccatcagagtgaacaggccaacctacaaaatgggagaaaaaatttttgcaagctacttatctgacaaagggctaatatccagaatctacaaagaactcaaacaaatttacaagaaaaaaacaaacaacccccatcaagaagtgggcgaaggatatgaacagatgcttctcaaaagaagacatttatgcagccaaaaaaacacatgaaaaaatgctcaaccatcactggccatcagagtaatgcaaatcaaaaccacaatgagataccgtctcacaccagttagaatggcgatcattaaaaagtcaggaaacaacaggtgctggagaggatgtggagaaataggaacacttttacactgttggtgggactgtaaactagttcaaccattgtggaagtcagtgtggcgattcctcagggatctagaactagaaataccatttgacccagccatcccattactgggtatatacccaaaggattataaatcatgctgctataaggacacatgcacaccttctaaactgaggcagagagccaccggaaatgttgcagcggcagctctcaagtccaaggggacctccacaagccttggaccctggaacagaggcaccagtgccatctccccagtagagactgcagtcacagtgcccaggagcagcaggattgttcccctccctccagccgccagccgcccctccaccctacacatgcacagggttcagcgccagcttccaggccagcagccccacgtatgcctgaacttagctggtgggcgcaaccacttgttccaggaaacatccctcagagagcagaca

SEQ ID NO: 4402 - DNA, 819 bp, Homo sapiens
  SIMILAR (199)..(651): 391254mologous to Rattus norvegicus unknown protein,accession number M13100,Smith-Waterman Score=233.
atgaggagggattacccagtgaaggcttttacttctaggaagagagaacagcatgtacaaaaagtcccaagcaagaagagcaggcaggttcaaagaactgaacgaagatttttggagaccactccagatttactgtatcaaaaggaaaaagatctgttgttaatctcttcttctaaaaagcagcccagaccaggaatagagagacattacatgatgacacaagggtcaatccaccaagaagacgtagctatactgaaggttatacatcaaataaaagagcttcaaaatacattcagcaaaactgttagaaataaaaggaaaaatagacatccacaaatagttggagactttaatactcctacctcaacaattgataggactattagacagcaaatcagcatagaattttatgacaccatcaagcaatgggatctaactgacacttgtaggacaggccacccaataacagaatacatcttctgttcaggtgcccacttaacattcaccaagataaaccatatccagggccctaaaaggatcctcaagagatttaaaagaattgaaatcatagagtgtgttctagtcctaaaaggatgtcaagctaagaacaggaaaaaagaggaagatttgcagacctattggatgctaaatatttacggaccacattacagatctgggtcatatgctgcgatccacagacaagagaccatctgctctgggcagctttcccaagccttgagggaccgatttgcaatgaatgctaagcttctcctgtcccttgctgcccatctgtgggtaataaaactggacttcatgtaa

SEQ ID NO: 4403 - DNA, 497 bp, Homo sapiens
  SIMILAR (11)..(493): 311254mologous to Homo sapiens Human organic cation transporter-like protein (OCTlp),accession number Y44633,Smith- Waterman Score=201.
atgaatcactattccagagaggcggaattcctccactgagaacactcgggctgccctggccactctggagcgcgttgccaagatgaaccgctcggtcatgccggaggggaagctggtggagcccgtcctggaaaaaagaggaagatttgcagacctattggatgctaaatatttacggaccacattacagatctgggtcatatggcttggaatctcttttgcctactatggggttatcctggccagtgctgagctgctggagcgggacttggtctgtggttcaaagtcagactctgcggtggtggtgactgggggggactcaggggagagccagagcccctgctactgccacatgtttgcaccctctgactatcggaccatgatcatcagcaccatcggtgaaattgctttgaatcctttaaatatactgggcatcaatttcctgggaagacggctgagcctttctattaccatgggatgcacggctttattctgcc

SEQ ID NO: 4404 - DNA, 534 bp, Homo sapiens
  SIMILAR (205)..(534): 901254mologous to Homo sapiens PeptideA JJ503-KS comprising domains VIA to XI of a protein kinase,accession number Y69157,Smith -Waterman Score=516.
atggaagaaagccggggcgcgaagccgccgcccgctcttctgcctggggacgcgactctgccgccaggctccctcgggtcagctcggcacccgcccgagcccccccagttccaggccctctcctcatcagacgtgccctgggccctcagcctgttcctctcgccgcccggaaccccgcagcagccccgggtccccagcccgcgcccctccggcgccgcctccgccagctgcccctgccccccgatgcgagccacccctctggctgctcctgcgggttccctgtccaggaagaagcggttggagttggatgacaacttagataccgagcgtcccgtccagaaacgagctcgaagtgggccccagcccagactgcccccctgcctgttgcccctgagcccacctactgctccagatcgtgcaactgctgtggccactgcctcccgtcttgggccctatgtcctcctggagcccgaggagggcgggcgggcctaccaggccctgcactgccctacaggcactgagtatacctgcaag

SEQ ID NO: 4405 - DNA, 660 bp, Homo sapiens
  SIMILAR (248)..(646): 381254mologous to Chlamydomonas reinhardtii vegetative cell wall protein gp1,accession number AF309494,Smith-Waterman Score= 166.
atgatggaacgaatgaccgtcctacagctggctgcaaaatataagactgctataaataaatccctgatgcctgaaaagaagaactgtgtggtaattacatcggcggtacgcgggcagcgcgtcaatcaagccggcgacggtgaatgcagttcgggagagctgatacccctcggggaggcggctccgggagcctgcggacgtggcggacgcctgggacgggatggaagaaagccggggcgcgaagccgccgcccgctcttctgcctggggacgcgactctgccgccaggctccctcgggtcagctcggcacccgcccgagcccccccagttccaggccctctcctcatcagacgtgccctgggccctcagcctgttcctctcgccgcccggaaccccgcagcagccccgggtccccagcccgcgcccctccggcgccgcctccgccagctgcccctgccccccgggccgccctcgcaggccgctcccggcgccccggtcggcttccgtacctgccttctccgcgccgccgtcccagtggccggaggtggggccgtcgccctgcgcactccggagggccatgccccggggccccgggcccccacccgagccccggctggtggcggagccgggagaagacgcggctccgaccgcgggacgtag

SEQ ID NO: 4406 - DNA, 585 bp, Homo sapiens
  SIMILAR (34)..(381): 921254mologous to Homo sapiens bA508N22.1 (HSPC025),accession number AL117339,Smith-Waterman Score=556.
ggaaatatgatcgcctgtggaatatcgcacgacgatgaacttttcagttactcctgccccaagttcctgtcgcctgtagtgcccaactatgataatgtgcaccccaactaccacaaagagcccttcctgcagcagctgaaggtgttttctgatgaagtacagcagcaggcccagctttcaaccatccgcagcttcctgaagctctacaccaccatgcctgtggccaagctggctggcttcctggacctcacagagcaggagttccggatccagcttcttgtcttcaaacacaagatgaagaacctcgtgtggaccagcggtatctcagccctggatggtgaatttcagtcagcctcagaggttgacttctacattgataagcttaatcgaaccctgaagaagatgggacagagaccttgatgatattcacacacattcaggaacctgttttgatgtattataggcaggaagtgtttttgctaccgtgaaacctttacctagatcagccatcagcctgtcaactcagttaacaagttaaggaccgaagtgtttcaagtggatctcagtaaaggatctttggagcca

SEQ ID NO: 4407 - DNA, 1936 bp, Homo sapiens
  SIMILAR (1184)..(1729): 441254mologous to Homo sapiens HSPC021,accession number AF077207,Smith-Waterman Score=214.
atgtcttatcccgctgatgattatgagtctgaggcggcttatgacccctacgcttatcccagcgactatgatatgcacacaggagatccaaagcaggaccttgcttatgaacgtcagtatgaacagcaaacctatcaggtgatccctgaggtgatcaaaaacttcatccagtatttccacaaaactgtctcagatttgattgaccagaaagtgtatgagctacaggccagtcgtgtctccagtgatgtcattgaccagaaggtgtatgagatccaggacatctatgagaacagctggaccaagctgactgaaagattcttcaagaatacaccttggcccgaggctgaagccattgctccacaggttggcaatgatgctgtcttcctgattttatacaaagaattatactacaggcacatatatgccaaagtcagtgggggaccttccttggagcagaggtttgaatcctattacaactactgcaatctcttcaactacattcttaatgccgatggtcctgctccccttgaactacccaaccagtggctctgggatattatcgatgagttcatctaccagtttcagtcattcagtcagtaccgctgtaagactgccaagaagtcagaggaggagattgactttcttcgttccaatcccaaaatctggaatgttcatagtgtcctcaatgtccttcattccctggtagacaaatccaacatcaaccgacagttggaggtatacacaagcggaggtgaccctgagagtgtggctggggagtatgggcggcactccctctacaaaatgcttggttacttcagcctggtcgggcttctccgcctgcactccctgttaggagattactaccaggccatcaaggtgctggagaacatcgaactgaacaagaagagtatgtattcccgtgtgccagagtgccaggtcaccacatactattatgttgggtttgcatatttgatgatgcgtcgttaccaggatgccatccgggtcttcgccaacatcctcctctacatccagaggaccaagagcatgttccagaggaccacgtacaagtatgagatgattaacaagcagaatgagcagatgcatgcgctgctggccattgccctcacgatgtaccccatgcgtattgatgagagcattcacctccagctgcgggagaaatatgggggacaagatgttgcgcatgcagaaaggtgacccacaagtctatgaagaacttttcagttactcctgccccaagtttcttgtcgcctgtagtgcccaactatgataatgtgcaccccaactaccacaaagaagcccttcctgcaagcagctgaaaggtgttttctgatgaagttccagccagcaggcccagctttcaaaccaatccgcagcttcctgaagctctacacccaccatgcctggtggccaagctggctggcttccctggaccctcacagagccaggagttcccggatcccaggtttctttgtcttcaaacaacaagatgaaagaacctccgtgtggacccagcgggtattctcagcccctggatggtgaaatttcagtcaagcctcagaggttgacttcctacatttgataaggacatgattccacatcgcggacaccaaggtcgcacaggcgttatgggggatttcttcatccgtcagattccacaaatttggaggagcttaatcgaaccctgaaggaaggatggggacagagaccttggatgatatttcacacacatttcagggaacctggttttgaatgtattatagggcagggaagtgttttttgctaaccgtgaaaccttttacctagatcagccatcagccctggtcaactcagttaacaagtttaagggaccgaaagtgtttcaagtgggatcttcagttaaaggatctttggagccagaaaaaaaaaaaaaaaaaaa

SEQ ID NO: 4408 - DNA, 1722 bp, Homo sapiens
  SIMILAR (1304)..(1720): 761254mologous to Homo sapiens putative p150,accession number U93574,Smith-Waterman Score=557.
atgaacatcaaagcgaaaatccttaataaaatactggcaaaccgaatccagcagcacatcaaaaagcttatccaccacgatcatgtcagcttcatccctcggatgcaaggctggttcaacatacacaaaccaataaacgtcatccatcacataaacagaaccaatgacaaaaaccacatgattatctcaatagatgcagaaaaggccttcgataaaattcaacaccccttcacgctaaaaactctcaataaactagatgacatgactgtatatttagaaaaccccatcgtctcagcccaaaatctccttaagctgataagcaacttcagcaaagtctcaggatacaaaatcaatgtacaaaaatcacaagcattcttatacaccaacaacagacaaacagagagccaaatcatgagtgaactcccattcacaattgcttcaaagagaataaaatacctaggaatccaacttacaagggatgtgaaggacctcttcaaggagaactacaaaccactgctcaaggaaataaaagaggacacaaacaaatggaagaacattccatgctcatgggtaggaagaatcaatgtcgtgaaaatggccatactgcccaaggtaatttacagattcaatgccatccccatcaagctaccaatgactttcttcacagaattggaaaaaactactttaaagttcatatggaaccaaaaaagagcccgcatcgccaagtcaatccctaagccaaaagaacaaagctggaggcatcacactacctgacttcaaactatactacaaggctacagtaaccaaaacagcatggtactggtaccaaaacagagatatagatcaatggaacagaacagaggccctcagaaataatgccacacatctacaaccatctgacttttgacaaacctgacaaaaacaagcaatggggaaaggattccctatttaataagtggtgttgggaaaactggctagccatatgcagaaagctgaaactggaccccttccttacaccttatacaaaaattaactcaagatggattaaagacttaaatgtaagacctaaaaccataaaaaccctagaagaaaacctaggcaataccgttcaggacataggcatgtgcaaagacttcatgactaaaacaccaaaagcaatggcaacaaaagccaaaattgacaaatgggatctgattaaactaaagagtttctgcacatcaaaagaaactatcatcagagtgaacaggcaacctacagaatgggagaaaatgtttgcaatctatccatctgacgaagggctaatatccagaatctgcaaggaacttttaaacaaatttacaagaaaaaaaaccaccccatcaaaaagtgggcaaaggatatgaacagacacttctcaaaagaagacatttatgtggccaacaaacatatgaaaaaaagcttatcatcactggtcattagagaaatgcaaatcaaaaccacaatgagacaccatctcacaccagttagaatgacgatcattaaaaagtcaggaaacaacagattctggagaggatgtggagaaacaggaatgcttttacactgttggtgggagtgtaaattagttcaaccactgtagaagatagtgtggtgattcctcaaggatctagaatcagaaataccatctgactcagcaatcccattagggggtatacacccaaaggcttataaatcattctattataa

SEQ ID NO: 4409 - DNA, 2354 bp, Homo sapiens
  SIMILAR (2346)..(1042): 931254mologous to Homo sapiens aspartate aminotransferase precursor (2.6.1.1),accession number M22632,Smith-Waterman Score= 2085.
gggtctacagtaattttattgtaacagagaaaaccaggccgcaataagtctacatggttagagcagatggtggttctttccagtgggtgaagcctgaacccagctagcagcacgcaagcctagaatatcctctttcctggtaccaccctgcgccgctggactcacagtgtgagatgagaggctgcacaccacattcaacaaagggaggaggtccaaccgggcagagacaacatcccaactggagaaacttgcactatcattcaagaggatgccgagataaagtacagtttcctactctccactattctttgctgaaaagggtgagggtacggcatcagcagaaaaattatgttcttcattcttaaataatctcgataggatggagttgatggtcaatcaagcagtagaatgggatgaaactgcaatagttaaaaatgttttgcgtgtaaggaaaagaacggcaatgacaagggagaaaagagagccttctctttttcttaaataagacaggaaactgcattatttcccttgctggagtggcagcagctcatggttttcataaaacatcatttctgcagtgcggcctgttgataaggttgttccaagatgggaggacagacacgaggccgactactcatgacagaactagctggccttctctcaaagcctctaaggtgtgcttgtttctcacgaggaacctgacacttcagttaaagcttctgaaatattgcaatggcataattgacaggttttttggtgcgatgactttcttgcacatgtaaactctttgagaaaagttggagaaaaaaggaccggggagagtttggtttaatattccagacgccagccatggatgcctctgccctgtgtcactacatgttcttttctgagaaacattcaaatgctgagtgttacacactgtggctgaaagaaatgatccactcaccaccatccaccctctctcattgtctgtgtgaagctctcaatagcagaggctgaagacagaaaggttgtctctgtttcctcgacccagggacattacttggtgacctggtgaatggcatgggcaaggtagcccacgttgctggaggtgacccctgccacagagatgcggccatcttttgtcatgtagatggagaactccttgatcagccgctccacctgttccagcttttaacccctgtgaaaacagaacatgcccaatttggtcggtgaatgtgttgcccaattggtgggtggaaaccctcccttccttgaaggttggagaccagttgaagtcccgcatgcccaatgaatgcggtcagccatgcctttcacttcttgcagccattgttttcgcaaatctggggtgttcagaatggcagcagcaatccgggccccattgaggggagggttggaatacatgggacggatcaagatcttcaactgtgactctacccttttggcttcatccgcatctttgcagaccatagtgaaggctcctacacgctcaccatataagcccatgttcttggcatatgattggcagaggcaaacattaatgccctgttcgatgaagtggcgcacagcccaggcatccttatcaccatcaccactggcaaagccttggtaggccatgtcaaagaacgcaaagagattccttttcttcaccactgttgctatttccttccactgttccggacgcgggtccactcccgtgggattgtgggcgcaggcatgcagaagaagaacactctgctctggtatttttgaaatatcctccacagcgcctgtgaagtcaaaaccgcaagtcttggggtcataataccgataaccttgtagctgcatgccagcatccctgaagatgggtgtgtggtttccccaggttggtttgggcagaaagacatctcggctgaacttaaaaaatctttgcagaaaactggctccgatccttaaggctccagttccagaaatggtctgcacagtgacaaaccggccactcttcaagacttcgctgttctcacccagggctagttctgcagatgccttgcaaaattcagccagtcccccaatgggcaggtattccttgtccaaattttttgcggcaatctgggcctctgccttgcggacgctaggcagaacgtaaggctttccattatcatcccggtaggcaccaactcccagattcatctttttgctattggtgtccctcttaaaggcttcagtgactcccagaatgggatctggaggtcccatttccacatgggtccaccaggagctggctctggcagaggccgcggcggcgaggcccgggtggaaggcggcggcgatcccggggaggacgcggccggagtgcagcagggccatggtggacc

SEQ ID NO: 4410 - DNA, 861 bp, Homo sapiens
  SIMILAR (184)..(459): 1001254mologous to Homo sapiens aldo-keto reductase,accession number AF052577,Smith-Waterman Score=483.
atggaggagctggtggatgaggggctggtgaaagcccttggggtctccaatttcagccacttccagatcgagaagctcttgaacaaacctggactgaaatataaaccagtgactaaccagaactccctaggaacaatgcaaaacagagccggctttccccgtgatgaggattgtttgctgttgcaggttgagtgtcacccatacctcacacaggagaaactgatccagtactgccactccaagggcatcaccgttacggcctacagccccctgggctctccggatagaccttgggccaagccagaagacccttccctgctggaggatcccaagattaaggagattgctgcaaagcacaaaaaaaccgcagcccaggttctgatccgtttccatatccagaggaatgtgattgtcatccccaagtctgtgacaccagcacgcattgttgagaacattcagaacactgagcactacaaatactgtggtctttgtgtaggacctaatttagagaaaaatttgtatcccgtggacagaatgggaaaaactcctgtggccagtttgtgctgtgaatatcctctcatttggaagactatcccttcaatgcagaatattgaggttgaatctcctgcttgccttcaacaccattgtgccaaagagtcaatggcagagcctgcaaactccacaaagatgctagtgttcattgagagaggtgcggcattttcttgggaagtagaggtccctccggctgtggtttcaggttactccccagctgtttcaggccacgccccagcctgtgctgtcccttcagctgaggtttcaagttactccccagccgcttcaggccacaacccaccaagttaa

SEQ ID NO: 4411 - DNA, 243 bp, Homo sapiens
  SIMILAR (46)..(231): 351254mologous to Homo sapiens aldose reductase-like peptide,accession number U37100,Smith-Waterman Score=73.
atggatggaactggagagcctaagccacttccagatcgagaagctcttgaacaacctggactgaaatataaaccagtgactaaccaggtaaattctattcagtttaagggtagtattctagaagaaggcattgttaacatgggagatgacagctccatgcatgttagtgcccctgaagaccctccagtgggacaagatgtggaggcggaagacagtgacactgatgatcctgatcctgtgtag

SEQ ID NO: 4412 - DNA, 1337 bp, Homo sapiens
  SIMILAR (70)..(1017): 1001254mologous to Homo sapiens aldose reductase-like peptide,accession number U37100,Smith-Waterman Score=1662.
caaaaacagcaacagaaagcaggacgtgagacttctacctgctcactcagaatcatttctgcaccaaccatggccacgtttgtggagctcagtaccaaagccaagatgcccattgtgggcctgggcacttggaagtctcctctcggcaaagtgaaagaagcagtgaaggtggccattgatgcaggatatcggcacattgactgtgcctatgtctatcagaatgaacatgaagtgggggaagccatccaagagaagatccaagagaaggctgtgaagcgggaggacctgttcatcgtcagcaagttgtggcccactttctttgagagaccccttgtgaggaaagcctttgagaagaccctcaaggacctgaagctgagctatctggacgtctatcttattcactggccacagggattcaagtctggggatgaccttttccccaaagatgataaaggtaatgccatcggtggaaaagcaacgttcttggatgcctgggaggccatggaggagctggtggatgaggggctggtgaaagcccttggggtctccaatttcagccacttccagatcgagaagctcttgaacaaacctggactgaaatataaaccagtgactaaccaggttgagtgtcacccatacctcacgcaggagaaactgatccagtactgccactccaagggcatcaccgttacggcctacagccccctgggctctccggatagaccttgggccaagccagaagacccttccctgctggaggatcccaagattaaggagattgctgcaaagcacaaaaaaaccgcagcccaggttctgatccgtttccatatccagaggaatgtgattgtcatccccaagtctgtgacaccagcacgcattgttgagaacattcaggtctttgactttaaattgagtgatgaggagatggcaaccatactcagcttcaacagaaactggagggcctgtaacgtgttgcaatcctctcatttggaagactatcccttcgatgcagaatattgaggttgaatctcctggtgagattatacaggagattctctttcttcgctgaagtgtgactacctccactcatgtcccattttagccaagcttatttaagatcacagtgaacttagtcctgttatagacgagaatcgaggtgctgttttagacatttatttctgtatgttcaactaggatcagaatatcacagaaaagcatggcttgaataaggaaatgacaattttttccacttatctgatcagaacaaatgtttattaagcatcagaaactctgccaacactgaggatgtaaagatcaataaaaaaaataataatcat

SEQ ID NO: 4413 - DNA, 2031 bp, Homo sapiens
  SIMILAR (103)..(555): 931254mologous to Rattus norvegicus rsec5,accession number AF032666,Smith-Waterman Score=720.
atgaataacaaagaccctcctattgccggaaaacaccaaggatttaagactcgctcccagaaaccagggacagaggatcaccagtttgctccacaaagcacaatgtctcgatcacgacaacccccccttgtgaccggcatctctccaaatgaagggataccatggacgaaggtcacaatcaggggagaaaatctggggactggccccaccgacctcataggcttgaccatttgtggacataattgcctcctgacggcagaatggatgtctgcaagtaaaatagtatgtcgagtgggacaagccaaaaatgacaaaggagacattattgtcaccactaagtcaggtggcagaggaacctcaacagtctctttcaagctactcaaacctgagaaaatagcccagggccttggaggcctagctggcattttggatcagtctgctgtgtgggttgatgaaatgaattattatgatatgcgcactgacaggaacaaaggaattccgcccttgtccttacgtcctgctaacccgcttggcattgagattgaaaacataaaacacatttccttagcaattgtggttgaaactggacataatgatgttctcaggcagaaagatggtgtctcttcttggtttcccttcttgaaagtatggagacctttcccagatgtgctccaacagaccttcctccgacatcactgttcaaaaacaagtttatccaatcaagagcagggggaatatgacaagcgcggttggcttatggtggttgatctctccccagttaaggggcaattggggggctgtgtttcagcagagagggtccagggtgattggtgtgcaagcaccttgctagagagagtgggctccaggccattggaagttgtgcctatgggcactggtcacctgaacgtggaggggctccagcagggagtgtctgcggggacacatcttagagggggcggcaaatcagacgaacaaagtaaaccccaagatggtggagaccaacatgcgagacagtatagtccctttgaggctgccgaagcgtcaggtttcatgcctagagtggcagaaatgagccctgagggacaagcagattcagttcatagacatgcttggatttcatcctgcaaatggggcagggggcgccagcaaaggctgccacgttgtgagcctcgttttgagcagctcaaaatggcagtcaccaacctaaagagacaggctaacaagaagagtgagggcagcctggcctatgtgaaaggcggtctcagtacattcttcgaagcacaggatgccctctcagtgatgggttttgtcagcatcagaaaatgtggctacatgatttcctttaatgctaattttgacttagaaagcaacctgtggagcagggctactgtggggtgtgacatctcagcgcagtgtctgttcattgcagctgcagtgggtgcccactcggtgcagctgcagtgggtgccagccatccatcaaaaactagaagcagatggaacggaaaaagtagaaggatccatgacgcagaaactggagaatgttctgaacagtaagttttgtcctactacccagaactatttatggattttacaacatgctttaaaattagttcttggacctgatatcgcgggacaaggcaaaacattttttaacaacatgatgttgattgctgtcttaggatatgtttttcctaattcaggtcaacttgacagacgtttatttaactctggttgtgtcaagccccgtgctaagccagcctgggagcaaagccggaggggatgcagctctggccccgagagagtcccgcccaggcgggtgctctggatgatcagccacactgcctccttcaaggccaccagcgatagtcactgtacgtctgttaccagttctcagcagacagcaaagtgtgcagttgtgctacctccttatctcccagtgacaaaccctcctgacattttacaaaaatggatgatcgggaagggattggtcgataaagatgaaagtgcatcaaaaaccaggaagctctaa

SEQ ID NO: 4414 - DNA, 1046 bp, Homo sapiens
  SIMILAR (3)..(731): 731254mologous to Homo sapiens dJ20B11.1 (ortholog of rat RSEC5 (mammalian exocyst complex subunit)),accession number AL031770,Smith-Waterman Score=828.
ctgattttacaagtgagaatttctcagcagcctggtatcttatagagaatcactcaaacaccagttttgagcagctcaaaatggcagtcaccaacctaaagagacaggctaacaagaagagtgagggcagcctggcctatgtgaaaggcggtctcagtacattcttagaagcacaggatgccctctcagccatccatcaaaaactagaagcagatggaacggaaaaagtagaaggatccatgacgcagaaactggagaatgttctgaacagagcaagtaatactgcagacacattgtttcaaggaaagtattaggtcggaaagacaaggcagattccactaagaaatgcactcaatgtgcttccagcgatttaagtttcttttcaaccttcctctaaatattgaaaggaatattcaaaagggtgattatgatgtggttattaatgattatgaaaagggccaagtcactttttggggaaaacggaggtgcaagttttccaagaaatattatgctgaagtaggaaccaagggttgaagctttaagagaattacttctgggataaattgcttgagacaccatcaactttacatgaccaaaaacgttacataaggtacctgtctgaccttcatgcgtctggtgaccctgcttggcaatgcattggagcccaacacaagtggatccttcagctcatgcacagttgcaaagagggctacgtgaaagatctgaaaggcaaggatttctcttccaatgtgtttcagttctccggatcggcattgagacgcgttccagacaccgtgcgggtgctggacagtcagttctctagatcagcattgagaagcgttccagacaccgtgcaggtgctcgacagtcagttctctggatcggcattgagacgcgttccagacaccgtgcgggtgctcgacggtcagttctctagatcggcattgagaagcgttccagacaccgtgcgggtgctcgacaaatgtcactgctctccagcaaaggtggtgatgaatgcagtcaccatattcactggatacagatag

SEQ ID NO: 4415 - DNA, 442 bp, Homo sapiens
  SIMILAR (139)..(252): 811254mologous to Homo sapiens HTRM clone 1645941 protein sequence,accession number Y73377,Smith-Waterman Score=154.
atgcagcgtaatctggctcgagccttctcgcccggcattaaaaagataaaaatgatgtgtctgggaaactccgagaaggactggccaaagttcagaggagttggagaagatgccggcctccttgcagcacgagagtgtggggcattgttggtcattagacatcttataaatgcggtacgtgcaatagttcctaataagagcaacaatgaaattatcctggttttgcagcactttgataactgtgtggacaaaaacagtacaagcattcatggaaggtagtgccagtgaagtactcaaagaatggacagtaacaggcaagaaaaagcttttactgcagggagaggaggagctagccagattacccttcatcactggtggcagtggctcgtgttactcgagttccacgttggcggtggaagaggagtgccgtgtactcgcctaa

SEQ ID NO: 4416 - DNA, 276 bp, Homo sapiens
  SIMILAR (186)..(275): 461254mologous to Homo sapiens ORF1; putative,accession number M19503,Smith-Waterman Score=64.
atggaggatgagatggaaggattgacagaagcaggtttcagaaggtgggtaacaacaaattctgctgaactaaaggagcatgttctaacccaatgcaaagaagctaagaaccttgataaaaggttagaggagctgctaagtagaataaccagtttagagagggacataagtgaccagatggagctgaactttgtgaagcatacacaagtatcaatagccaaatcaatcaagcagaagaaagaatatcagagtttgaagaccatcttgctgagataa

SEQ ID NO: 4417 - DNA, 361 bp, Homo sapiens
  SIMILAR (160)..(357): 861254mologous to Homo sapiens transcription factor BTF3,accession number X74070,Smith-Waterman Score=278.
aagaaatggttcacagaaagaagaaggcggttcatagaacagccacagcagatgataaaaaacttcagttctccttaaagaagttagaggtaaacaatgtctctggtattgaagaggtgaatatgtttacaaaccaaggaacagtgatccactttaacagcagagatgccagcaaactctttcaccattacaggccatgctgagacaaagcagctgatggaaatgctacccagcatcttaaaccagcttggggcacactgtctgactagtttaaggagactggctgaagctctgcccaaacagtctgtgaatggaaaagcaccacttgctactggagaggatgacgatgaagttccagctc

SEQ ID NO: 4418 - DNA, 487 bp, Homo sapiens
  SIMILAR (1)..(474): 1001254mologous to Homo sapiens basic transcription factor 3a,accession number M90357,Smith-Waterman Score=812.
atgcgacggacaggcgcacccgctcaggctgactctcgggggcgaggtcgagccaggggcggctgccctgggggcgaggcgacgctgtctcaacctccacctcgcggcggaacccgaggagaggagcctcagatgaaagaaacaatcatgaaccaggaaaaactcgccaaactgcaggcacaagtgcgcattggtgggaaagtgaatatgtttacaaaccaaggaacagtgatccactttaacaaccctaaagttcaggcatctctggcagcgaacactttcaccattacaggccatgctgagacaaagcagctgacagaaatgctacccagcatcttaaaccagcttggtgcggatagtctgactagtttaaggagactggccgaagctctgcccaaacaatctgtggatggaaaagcaccacttgctactggagaggatgatgatgatgaagttccaggaggcttccaagaatgaggcaaactga

SEQ ID NO: 4419 - DNA, 1072 bp, Homo sapiens
  SIMILAR (479)..(730): 701254mologous to Homo sapiens basic transcription factor 3a,accession number M90357,Smith-Waterman Score=225.
cggccccttattcgctccgacaaggtacaaaaaggctctggacggcggcgtggtaggaggacgggagcgggggcgggaagttccctgaaggagcgagacagggagggacagggcagaggaggagaaggaaggcgatgcgacggacaggcgcacccgctcaggctgactctcgggggcgaggtcgagccaggggcggctgccctgggggcgaggcgacgctgtctcaacctccacctcgcggcggaacccgaggacaggagcctcagatgaaagaaacaatcatgaaccaggaaaaaactcgccatacctgcagggcacaaagtgcgcattggtgggaaaggaactgctcgcagaaagaagaaggtggttcatagaggagccgcgagccagatgacaaaaaacttcagtttctccttaaagaagtttaggggtaaacaatatctctggtattgaaagaggtgaatatgtcttacaaacccaaggaaccagtggatccacttttaacaacccctaaaagtttcaaggcatctcttggccagcgaacacttttcaccatttacagggccatgctgaggacaaaggcagctgacaagaaatgctagcccagcatcttaaacccagcttgggggcggatagtctgactagtttaaggagactggccgaagctctgcccaaacaatctgtggatggaaaagcaccacttgctactggagaggatgatgatgatgaaggttccagatcttgtgggagaatttttgatgaaggcttccaaggaatgaggcaaacttgaatttgagtcaacttctgaagataaaaccttgaagaagttacttgggagctgctattttaatattaatggacttgctttttaagaaattttttgtttatggatctgataaaatctagatctctaatatttttaagccccaagcccccttggacactgcagcccttttccagtttttgccttatcccaattcattctttgcagctaattaaggccgaagaagcctgggaatcaagtttgaaacaaagattaataaagttctttgcctagtaaaaaaaaaaaaaa

SEQ ID NO: 4420 - DNA, 1530 bp, Homo sapiens
  SIMILAR (484)..(843): 721254mologous to Salmonella typhimurium PhoQ protein,accession number AJ272210,Smith-Waterman Score=438.
atggcaataaccttgcgggagctgaatggcctgagctatgaagagatagccgctatcatggattgtccggcgttgacgatagcgggatactggataagggtattaggcatgcagaaagaacaactttccgctttaatggatggcgaaacgctggatagtgagctgcttaacgaactggctcataacccagaaatgcagaaaacctgggaaagctatcacttaatccgtgactcaatgcggggtgatactcccgaggtgctccatttcgatatctcttcacgcgtgatggccgccattgaagaagagccagtgttcttgcgtgatattatatgcgagtataactgcgcgtcgatcccatatgaacgtgatcgcataatgcaaagtgtcacaaagatcgttaatgctcaactcatccggatcgagcttgcgggaaagcataccattgatgtactgatggaacggctatctgttcgaattgcgctgataaaaaaattactgcgtctttttttcccgctctcgctgcgggtacgttttctgttggcaacggcagcggtagtactggtgctttcgcttgcatacggaatggtcgcgctgatcggttatagcgtcagtttcgataaaactacgtttcggctgttacgtggcgagagcaatctgttctatacccttgcgaagtgggaaaacaataagttgcatgtcgagttacccgaaaatatcgacaagcaaagccccaccatgacgctaatttatgatgagaacgggcagcttttatgggcgcaacgtgacatgaaaggatggacgaacgaatgcatcctcgtactgagtggagatcattcgatacagcaacagttgcaggaagtgcgggaagatgatgacgacgcggagatgacccactcggtggcagtaaacgtctacccggcaacatcgcggatgccaaaattaaccattgtggtggtggataccattccggtggagctaaaaagttcctatatgggtttgtgtgggcagcccacaaataaagacgtccttcgccggatgaagaagcgctaccccacgacgttcgttatggtggtcatgttggcgagctatttccttatctccatgtttggaggagtcatggtctttgtgtttggcattacttttcctttgctgtgtatggaaaaaattgtatctacaaaggcaattcttgacaaaaacacaaatcagtgcaaaggtatgtgtaagggcatccgtaccctgaaatcttgcctatgctatctgattaatggttcttccattgtggaggtccaggactcctggctgatgggtgctatcaagttccaacaggaaagcagacttttacaccacagacttttaagtgctattagaattaaacagaaggaggaggaagaaaggaacaagaaggagaagaaagacaaagagctggagagcatatttcccagctatggcccttttcactactttaaaagcaaaaccatcaaagaatgggcacctttctatgggtatgacttttatccccttgtcctctag

SEQ ID NO: 4421 - DNA, 330 bp, Homo sapiens
  SIMILAR (37)..(114): 761254mologous to Homo sapiens RNA-binding protein,accession number AF023259,Smith-Waterman Score=108.
atggtgactcatctggcagctgacattcaccaaaacgatcaagagctggaagagtatggaaaaattgtatctacaaaggcaattcttgacaaaaacacaaatcagtgcaaaggtatgtgtaagggcatccgtaccctgaaatcttgcctatgctatctgattaatggttcttccattgtggaggtccagaaaaggttagcatatgcaggaactttggaaccttcattagtgcatcaagtttactcagaattgtcctattataaactccctgggacccaggtagttaggattattgccgaagtattgaggatgcaggacagttctgagtag

SEQ ID NO: 4422 - DNA, 576 bp, Homo sapiens
  SIMILAR (4)..(567): 411254mologous to Homo sapiens retinitis pigmentosa GTPase regulator,accession number AF286472,Smith-Waterman Score=296.
atggatggaagggagagagaaatggagggggagaaggaaagatggaaggaaggagggaaggaaggaaggaaggaaagagagaaggagagaaagagagaaaggaagggaaaggaaagaaaggaaaggaaaggaaaggaaaggaaaggaaaggaaaggaaaggaaaggaaaggaaaggaagggaaaggaaaggaacggaagggaaaggaacggaagggaaaggaaaggaaaggaagggaaaggaagggaaaggaaaggaaaggaaaggaaaggaaaggaaaggaaaggaaaggaaaggaaaggaagggaaaggaaaggaacagaagggaaaggaaaggaagggaaaggaaaggaaaggaaaggaaaggaaaggaaaggaaaggaaaggaaaggaaaggaaaggaaaggaagagaaaggaagagaaaggaagggaaaggaagggaaaggaagggaaaggaagggaaaggagggagggaaggaggaaggaaggaaggaaagaaggaaagaaggaaggaaggaaggaaagaagtttagtaataatggaatggttgaagagatgcaaggccagtgtatatga

SEQ ID NO: 4423 - DNA, 1344 bp, Homo sapiens
  SIMILAR (712)..(1341): 911254mologous to Homo sapiens putative p150,accession number U93563,Smith-Waterman Score=1053.
atgggcaaatacttcatgactaaaacaccaaaagcaatggcaacaaaagccaaaattgacaaatgggatctaattaaactaaagaacttgtgtgcagttttatttgggagtgtgcgtggggtacctctgagttttaaaaatgaagaaatgtcttctcagaaacaagcagccttgaaggatacaagtgacaagaaagattctgttttgaacatagccacagaaataaaagatgaacaaaaatctgggacagactatttcaaaactatacatcccagagagaaggattatttctctatgatcgatagaagatggtgtcgctacctactggatagtgttgcacagcctgtgacaaaggataagtttgctttggaatctgaaactatttcagaaccatactttacgaacagaaggactatttctcaacaatctgcagaaaagttgtctcctgagcaaccgcctttattcacgcttactctgaaagaggcagatcccagttcaaaagtagccatgagaaggaaggattcaccacctccaggaaaagtgtcttctcagaaacaaccagctgagaaggctacaagtaatgagaaatattctgtttcaaatacagccacagaaataaaggggggaccaatatctgggacagtgtcttctcagaaacaaccagctgagaaggctacaagtgacaagacagattctgttttgaatatagctacagaaataaaggatgctttaaagttcatatggaaccaaaaaagagcctgcatcaccaagtcaatcctaagccaaaagaacaaagctgcaggcatcacactacctgacttcaaactatactacaaggctacagtaaccaaaacagcatggtactggtaccaaaacagagatatagatcaatggaacagaacagagccctcagaaataacaccgcatatctacaactatctgatctttgacaaacctgagaaaaacaagcaatggggaaaggattccctatttaataaatggtgctgggaaaactggctagccatatggagaaagctgaaactggatcctttccttacaccttatacaaaaatcaattcaagatggattaaagacttaaacattagacctaaaagcataaaaaccctagaagaaaacctaggcaataccattcaggacataggcatgggcaaggacttcatgtctaaaacacaaaaagcaatggcaacaaaagacaaaattgacaaatgggatctaattaaactaaagagcttctgcacagcaagagaaactaccatcagagtgaacaggcaacctacaaaatgggagaaaattttcgcaacctactcattgacaaagggctaa

SEQ ID NO: 4424 - DNA, 374 bp, Homo sapiens
  SIMILAR (3)..(224): 751254mologous to Human endogenous retrovirus W polyprotein,accession number AB021921,Smith-Waterman Score=270.
ctcttaacctggacacatttcttccacacaatgaagaaaagatagaacataactgtcaacaagtaattgctcaaacctatgccactcgaggggaccatttagaggttcccttgactgatcccaaccctaacttgtatactgatggaagatcctttgtagaaaaaggacttcaaaaagtgggaattaaagctgtaaaactacaaatcattcttcaaatggagccccagatgcagtccatgactaagatctaccgcggacccctggaccaccctgacagcccatgctccaatgttaacgacatcgaaggcacccctcctgaggaaatctcaactgcacaacccctactacaccccaggccagcaggaagcagttag

SEQ ID NO: 4425 - DNA, 3867 bp, Homo sapiens
  SIMILAR (1102)..(3372): 821254mologous to multiple sclerosis associated retrovirus polyprotein,accession number AF009668,Smith-Waterman Score=3109.
atgcagtgggaagaggctgagaaagacccttctggcagttgtgtgttccagcggcctcctgtggcccttgtcttccccctacactccaagtggacgttggtgaacagcccaccaagctcaggcgatccctacgtgccaggacgaccagcacagtcaggacagctttccctcagccctgcacctccatatgttcttcctggccccgggaaaataaagcaagcaggcaacaacccatcactgacaagcatctaccgttcagaagtcttctgtgcccaccgccacctccaccccccgcagctggtgtgtgcccgtggacacattggatcagcgcatctcagtgtggacaggggcagcctcatctgggaagtgttagaaagcacagtctgggcgcgcaccaatgagtggagtccagtgacccggacggttctcatttcagctttggcatctacacacattccacagccctgcgagtctcgtccacccgtccctccagaatatgaggtgacagtccttcggagtcaaggcactgctcagctcccgccctggtcctcttccaccagctggaggctgacagatccttcctgcccaaaacatgctgcctggctgactgaccttgcctccagcaaaggcccagcggctggtggaactggctccttctcccagccaggcaccttgacatccacaagaacaaatcctcttaagaaagaaaaaagtcccgaggacttaaagcaaattaaaatagacctaggtaaattctcagataaccctgatggctatattgatgttttacaagggttaggacaatcctttgatctgacatggagagatataatgttactgctaaatcagacactaaccccaaatgaaaaagtgccaccattactgcagcctgagagtttggcgatctctggtatctcagtcagagatcaggaggagcaggcagaacaggacaaacaggataaaaaaaaggccatcactttagtcatggccctcaggcaagtggactttggaggctctgtaaaagggaaaagctgggcaaatcgaatgcctaatagggcttacttccagtgcggtctacaaggacactttaaaaaagattgtccaagtagaaagccccaggtatgcttgaccattgagagccaagaggttaactgtctcctggacgccggtgcggccttctcagtcttactctcctgtcccggacaactgtcctccagatctgtcactatccgaggggtcctaggacagccagtcactagatacttcttccagccactaagttgtgactggggagctttacccttttcacatgctttcctaattatgcctgaaagcctcactcccttgttagagagagagattctagtaaaagcaggggccattatacacctgaacataggagaaggaacacccatttgtcgtctcctgtttgaggaaggaattagtcctgaagtctgggcaacagaaggacaatatggacaagcaaagaatgcccattttgtccaagttaaactaaaggattccacctcctttccctatcaaaggcagtaccccctcagacccgaggcccaacaaagactccaaaagattgttaaggacctaaaagcccaaggcctagtaaaaccatacagtagcccctgcaatactccaattttaggagtacagaaacccaaaagacagtggaggttagtgcaagatctcaggattatcaatgaggctgtttttcctctatacccagctatacctagcccttatactctgctttcccaaataccagaggaagcagagtggtttacagtcctggatcttaaggatgcctttttctgcatccctgtacatcctgactctcaattcttgtttgcatttgaagatccttcaaacccaacatctcaactcacctggactgttttaccccaagggttcagggatagtccccatctatttggccaggcattagcccaagacttgagccagttctcatacctggacactcctgtccttcagtgcatggatgatttacttttagctgcccgttcagaaaccttgtgccatcaagccacccaagcgctcttaaatttcctcactacctgtggctacaaggtttccaaaccaaaggctcagctctgctcacagcaggttaaatgcttagggctaaaattatccaaagtcaccagggccctcagtgaggaacgtatccagcctatactggcttatccttatcccaaaaccctaaagcaactaagagggttccttggcataacaggtttctgccgaatatggattcccaggtacggcaaaatagccagaccgttatatacgctaattaaggaaactcagaaagccaatacccatttagtaagatggacacctgaagcagaagcagctttccatgccctaaagaaggccctaatgcaagccccagtgctaagcttgctaacggggcaagacttttcctcatatgtcacaaaaaacaaacaaacaaagaaaaaaaaaaacatgaatagctctaagagtccttgcgctggtctgagggacgagtttgcaacccgtggcatacctgataaggaaattgatgtagtggcaaagggtcagcctcattgtttacgggtagtggtggcagtagcagtcttagtatctgaagcagttaaaataatacagggaagaaatcttactgtgtggacatctcatgatgtgaatggcatactcactgctaaaggagacttgtggctgtcagacaaccatttacttaaatatcaggctctattacttgaagggccaatgctgcgactgtgcacttgtgcagctcttaacctggacacatttcttccacacaatgaagaaaagatagaacataactgtcaacaagtaattgctcaaacctatgccactcgaggggaccatttagaggttcccttgactgatcccaaccctaacttgtatactgatggaagatcctttgtagaaaaaggacttcaaaaagtggggtatgcagtagtcagtgataatggaatacttgaaagtaatcccctcactccaggaactagtgctcagctggcaaaactcactcgggcactagaattaggagaaggaaaaagggtaaatatatatacagactctaagtatgcttacctagtcctccatgcccatgcagtaatatggagagaaagggaattcctaacttctgagggaacacctatcaaacatcaggaagccattagggaattattattggccgtacagaaacctaaagaggtggcagtcttacactgccggggtcatcagaaaggaaaggaaagggaaatagaaaggaaccgccaagcagatattgaagccaaaagagctgcaaggcaggaccctccattagaaatgcttatagaaggacccctagtatggggtaatcccctctgggaaaccaagccccagtattcagaagaagaaatagaatggggaatctcacgaggacatagttttctcccctcaggatggcaagccaccgaacaaggaaaaatacctttgcctgcagctaaccaatggaaattacttaaaaccactcaccaaaactttcacttatgcattgatagcacccatcagatggccaaattgttatttactggaccaggacttttcaaaactctcaagcagatagttggggcctgtaaatttgtctcttccagaattaaagctgtaaaactacaaatcattcttcaaatggagccccagatgcagtccatgactaagatctaccgcggacccctggaccaccctgacagcccatgctccaatgttaacgacatcgaaggcacccctcctgaggaaatctcaactgcacaacccctactacaccccaggccagcaggaagcagttag

SEQ ID NO: 4426 - DNA, 415 bp, Homo sapiens
  SIMILAR (204)..(362): 941254mologous to multiple sclerosis associated retrovirus element gag polyprotein,accession number AF123881,Smith-Waterman Score=260.
tccttcggagtcaaggcactgctcagctcccgccctggtcctcttccaccagctggaggctgacagatccttcctgcccaaaacatgctgcctggctgactgaccttgcctccagcaaaggcccagcggctggtggaactggctccttctcccagccaggcaccttgacatccacaagaacaaatcctcttaagaaagaaaaaagtcccgaggacttaaagcaaattaaaatagacctaggtaaattctcagataaccctgatggctatattgatgttttacaagggttaggacaatcctttgatctgacatggagagatataatgttactgctaaatcagacactaaccccaaatgaaaaagtgccaccattactgcagcctgagagtttggcgatctctggtatctcagtcag

SEQ ID NO: 4427 - DNA, 676 bp, Homo sapiens
  SIMILAR (456)..(277): 521254mologous to Mus famulus reverse transcriptase,accession number AJ233597,Smith-Waterman Score=136.
tcatccttttttattgctgcatattattccacagtgcatataggccatattttctttatccaatccactggtgacaagcacctggaatgattctgttaccgggggtccttgctcacagagctcccaagatggtggtgagccgcttccaagatgatggcaagcctcgtgttctctgacctggggttcttggcctgacggattccaaggaatggaatcttgggccatgtggtgagtgttatagctctcttcctcactaaatccattcagcacaatatcatcaatgtaatggaccagtgtgctatcttgtggaagggaaaggtgatcaagatccctgttaactaaattctgacatcgggctagggagttgatataacctagccaaaattttaaagtaactgtgtttcccttatgctgaaagacctgacctacaatttctgtgctgagatctttgtgcaagaagtccttatctgcttcaggcccaaaagtatctccaggaattttgagcaatccctcatctagatcagcagactgagccacctgacccttctgtaagtttttacctactggattgtacgttgaactgcacagcccaacataaaacctgctgaaagaagagcatagggctgtaggagcaaaaccaacaaaccctatccagcattccttacagtcacacaca

SEQ ID NO: 4428 - DNA, 861 bp, Homo sapiens
  SIMILAR (583)..(855): 861254mologous to multiple sclerosis associated retrovirus polyprotein,accession number AF009668,Smith-Waterman Score=385.
atggagtgggaagataatcttcccctggagttgggccgcacagtggccaaactcctctctgaccactcccaaactcctcttggtattcagatgttcctcctcttctctctttctctgcggaagagtccgttggtctgcctgtcttacctcttcaacttccggttcactctggagtctgaggttcagcatttatctggagctataacacttaccgcatggcccaagattccattcctcggaatccgtgaggccaagagccccaggtcagagaacacaaggcttgccaccatcttggaagcgggtcaccgccatcttgggacctctgtgagcaaggaccacccggtaacattttggcgaccacgaagggacctccaaagtgacttaaagcaaattaaaatagacctaggtaaattctcagataaccctgatggctatattgatgttttacaagagttagggcaatcctttgatctgacatggagagatataatgttactgctaaatcagacactaaccccaaatgagagaagtgccaccataactgcagcccgagagtttggtgatctctggtatatcagtcaggtagtggcagcagtagcaggcttagtatctgaagcagttaaaataatacagggatcttactgtgtggacatccatgatgtgaatggcatactaactgctaaaggagacttgtggctgtcagacaaccatttacttaaatatcaggctctattacttgaagggccagtgctgcgactgcgcacttgtgcaactcttaacccagccacatttcttccagacaatgaagaaaagatagaacataactgtcaacaagtaattgctcaaacatacgccacttga

SEQ ID NO: 4429 - DNA, 1940 bp, Homo sapiens
  SIMILAR (336)..(431): 651254mologous to Homo sapiens Protein encoded by the endogenetic fragment of HERV-W,accession number B07702,Smith- Waterman Score=101.
gattttgttgaggctgatggctttttgtgttgaaaagcttgatctgggctttgtattgagaagcttgatctataaagaaatgcagaaacataacaattcgaagataacaattcaaaatattccagtaaagaataaatttgtcagtgcttttgctagaaacaaacaacaaatgaaggtgactttgttacccccacgacctggtgttggatctgattaccccaacattcctggctgcccgatgtggggcaacaaagaccctggtgaaggaacactagagcgtgggaaagtggaggatgcatcgcaaaggacatcgaggactctaaaagaaaccagcgggaaagctgagcatcggaagaaacaggatgggaaatgttccccccaaggcaaaaacgcccttaagatgtattctggagaattcgacccagtcagagtgtgtgtacctttttccctctcagatttgaagcaacttaaaatagacctaggtagattctcagataaccctgatggctatattgatgttttacaagggttaggacaatcctttgatctgacatggagagatataatgttactgctagatcagacactaaccccaaatgagagaaatgccaccataactgcagcccgagagtttggtgatctctggtgtctcagtcagggattttgccgatttcggaaccaccatcaaacaggattttcgcttgctggggcaaaccagcgtggaccgcttgctgcaactctctcagggccaggcggtgaagggcaatcagctgttgcccgtctcactggtgaaaagaaaaaccaccctggcgcccaatacgcaaaccgcctctccccgcgcgttggccgattcattaatgcagctggcacgacaggtttcccgactggaaagcgggcagtgagcgcaacgcaattaatacccaagtttggggcgacaccaacaagttatgtttgccgatttcggaaccaccctcaaacaggattttcgcctgctggggcaaaccagcgtggaccgcttgctgcaactctctcagggccaggcggtgaagggcaatcagctgttgcccgtctcactggtgaaaagaaaaaccaccctggcgcccaatacgcaaaccgcctctccccgcgcgttggccgattcattaatgcagctggcacgacaggtttcccgactggaaagcgggcacaactttaaggatgatgagtaccctcagagaccatgtcctttgcctatgtctgagtaccgtctaggcagcacccccccgcaaaacatgatagagactgaaggaaacaataaggaatgtggcactattttatactcaacttgtggaataaaattgattcctgctagaagaattaccaatgttctccgcatcctgtcttcacagcatgattttctgccgacacgtcccttccgttccctgcaaggccatttccagggaggcttacgaagacagcagatgatggtgatggaaggagtctgggtgctgagctgtgccatggacctgctgtgccgctcagctgtgtgtcctctggcacccacaaaatcaaacacctgccttccagatgtttgcacctataggccggcaaagctgactgcagcaagtccttcagaagggagacagtctctattacttgaagggccagtgctgcgactgcgcacttgtgcaactcttaacccagacacatttcttccagacaatgaagaaaagatagaacataactgtcaacaagtaattgctcaaacaatcaaagctataaaactacaaattgttcctcaaatggaaccccagatgcattccatgactaagatctaccgcagacccctggatcagcctgctagcccatgctctgatgttaacgacattggagccacccctcctgaggatatctcaattgcacgacccctactatgccccaattcagcaggaagcagttag

SEQ ID NO: 4430 - DNA, 7466 bp, Homo sapiens
  SIMILAR (1378)..(2271): 841254mologous to multiple sclerosis associated retrovirus polyprotein,accession number AF009668,Smith-Waterman Score=1279.
agccccaggtatgcttgaccattgagagccaagaggttaactgtctcctggacgccggtgcggccttctcagtcttactctcctgtcccggacaactgtcctccagatctgtcactatccgaggggtcctaggacagccagtcactagatacttcttccagccactaagttgtgactggggagctttacccttttcacatgctttcctaattatgcctgaaagcctcactcccttgttagagagagagattctagtaaaagcaggggccattatacacctgaacataggagaaggaacacccatttgtcgtctcctgtttgaggaaggaattagtcctgaagtctgggcaacagaaggacaatatggacaagcaaagaatgcccattttgtccaagttaaactaaaggattccacctcctttccctatcaaaggcagtaccccctcagacccgaggcccaacaaagactccaaaagattgttaaggacctaaaagcccaaggcctagtaaaaccatacagtagcccctgcaatactccaattttaggagtacagaaacccaaaagacagtggaggttagtgcaagatctcaggattatcaatgaggctgtttttcctctatacccagctatacctagcccttatactctgctttcccaaataccagaggaagcagagtggtttacagtcctggatcttaaggatgcctttttctgcatccctgtacatcctgactctcaattcttgtttgcatttgaagatccttcaaacccaacatctcaactcacctggactgttttaccccaagggttcagggatagtccccatctatttggccaggcattagcccaagacttgagccagttctcatacctggacactcctgtccttcagtgcatggatgatttacttttagctgcccgttcagaaaccttgtgccatcaagccacccaagcgctcttaaatttcctcactacctgtggctacaaggtttccaaaccaaaggctcagctctgctcacagcaggttaaatgcttagggctaaaattatccaaagtcaccagggccctcagtgaggaacgtatccagcctatactggcttatccttatcccaaaaccctaaagcaactaagagggttccttggcataacaggtttctgccgaatatggattcccaggtacggcaaaatagccagaccgttatatacgctaattaaggaaactcagaaagccaatacccatttagtaagatggacacctgaagcagaagcagctttccatgccctaaagaaggccctaatgcaagccccagtgctaagcttgctaacggggcaagacttttcctcatatgtcacaaaaaacaaacaaacaaagaaaaaaaaaaacatgaatagctctaagagtccttgcgctggtctgagggacgagtttgcaacccgtggcatacctgagtaagaaaactgatgtagtggcaaagggttggcctcattgtttatgggtaatggcagcaatagcagtcttaatatctaaagcagttaaaatgatacagtgaagagatcttactgtgtggacatctcatgatgtgaatggcatactcactgctaaaggagacttgtggctgtcagacaaccatttacttaaatatcaggctctattacttgaagggccaatgctgcgactgtgcacttgtgcagctcttaacctggacacatttcttccacacaatgaagaaaagatagaacataactgtcaacaagtaattgctcaaacctatgccactcgaggggaccatttagaggttcccttgactgatcccaaccctaacttgtatactgatggaagatcctttgtagaaaaaggacttcaaaaagtggggtatgcagtagtcagtgataatggaatacttgaaagtaatcccctcactccaggaactagtgctcagctagcagaactaatagccctcacttgggcactagaattaggagaaggaaaaagggtaaatatatatacagactctaagtatgcttacctagtcctccatgcccatgcagtaatatggagagaaagggaattcctaacttctgagggaacacctatcaaacatcaggaagccattagggaattattattggccgtacagaaacctaaagaggtggcagtcttacactgccggggtcatcagaaaggaaaggaaagggaaatagaaaggaaccgccaagcagatattgaagccaaaagagctgcaaggcaggaccctccattagaaatgcttatagaaggacccctagtatggggtaatcccctctgggaaaccaagccccagtattcagaagaagaaatagaatggggaatctcacgaggacatagttttctcccctcaggatggcaagccaccgaacaaggaaaaatacctttgcctgcagctaaccaatggaaattacttaaaaccactcaccaaaactttcacttatgcattgatagcacccatcagatggccaaattgttatttactggaccaggacttttcaaaactctcaagcagatagttggggcctgtgaagtgtgccagagaaataatcccctgccttatcgccaagctccttcaggagaacaaagaacaggccattaccctggagaagactggcaactgattttacccacaagcccaaacctcagggatttcagtatctactagtctgggtagatactttcacgggttgggcagaggccttcccctgtaggacagaaaaggcccaagaggtaataaaggcactagttcatgaaataattcccagattcggacttccccgaggcttacagagtgacaatagccctgctttccaggccacagtaacccagggagtatcccaggcgttaggtatacgatatcacttacactgcgcctgaaggccacagtcctcagggaaggtcgagaaaatgaatgaaacactcaaaggacatctaaaaaagcaaacccaggaaacccacctcacatggcctgttctgttgcctatagccttaaaaagaatctgcaactttccccaaaaagcaggacttagcccatacgaaatgctgtatggaaggcccttcataaccaatgaccttgtgcttgacccaagacagccaacttagttgcagacatcacctccttagccaaatatcaacaagttcttaaaacattacaaggaacctatccctgagaagaggaaaagaatattccacccaagtgacatggtattagtcaagtcccttccctctaattccccatccctagatacatcctgggaaggaccctacccagtcattttatctaccccaactgcggttaaagtggctggagtggagtcttggatacatcacacttgagtcaaatcctggatactgccaaaggaacctgaaaatccaggagacaacgctagctattcctgtgaacctctagaggatttgcgcctgctcttcaaacaacaaccaggaggaaaaatcgaagctgtaaaactacaaatggagcccaagatgcagtccaagactaagatctaccgcagacccctggaccggcctgttagcccacgatctgatgttaatgacatcaaaggcacccctcctgaggaaatctcagctgcacaacctctactacgccccaattcagcaggaagcagttagagcggtcgtcggccaacctccccaacagcacttaggttttcctgttgagatgggggactgagagacaggactagctggatttcctaggctgattaagaatccctaagcctagctgggaaggtgaccacatccacctttaaacacggggcttgcaacttagctcacacctgaccaatcagagagctcactaaaatgctaattaggcaaagacaggaggtaaagaaatagccaatcatttattgcctgagagcacagcaggagggacaatgatcgggatataaacccaggcattcgagctggcaacagcagcccccctttgggtcccttccctttgtatgggagctctgttttcatgctatttcactctattaaatcttgcaactgcactcttctggtccatgtttcttacggctcgagctgagcttttgctcaccgtccaccactgctgtttgccaccaccgcagacctgccgctgactcccatccctctggatcctgcagggtgtccgctgtgctcctgatccagcgaagcgcccattgccgctcccaattgggctaaaggcttgccattgttcctgcacggctaagtgcctgggtttgttctaattgagctgaacactagtcactgggttccatggttctcttctgtgacccacggcttctaatagagctaacagagctataacactcaccgcatggcccaaggttccgttccttgtaatccgtgaggccaagaaccccaggtcagagaacaaaaggcttgccaccatcttggaagcggcctgctaccgtcttggaagtggttcaccaccatcttgggagctctgtgagcaaggaccccccggtaacattttggcaaccaacgacggacatccaaagtgatgggaaacgttccccgcaagacaaaaacgcccctaagacgtattctggagaattgggaccaatttgaccctcagacactaagaaagaaacgacttatattcttctgcagtgccgcctggcactcctgagggaagtataaattataacaccatcttacagctagacctcttttgtagaaaaggcaaatggagtgaagtgccataagtacaaactttcttttcattaagagacaactcacaattatgtaaaaagtgtgatttatgccctacaggaagccttcagagtctacctccctatcccagcatccccgactccttccccaactaataaggaccccccttcaacccaaatggtccaaaaggagatagacaaaagggtaaacagtgaaccaaagagtgccaatattccccaattatgacccctcccaagcagtgggaggaagagaattcggcccagccagagtgcatgtgcctttttctctcccagacttaaagcaaataaaaacagacttaggtaaattctcagataaccctgatggctatattggtgttttacaagggttaggacaattctttgatctgacatggagagatatatatgtcactgctaaatcagacactaaccccaaatgagagaagtgccaccataactgcagcctgagagtttggcgatctctggtatctcagtcaggtcaatggataggatgacaacagaaggaaagagatgattccccacaggccagcaggcagttcccagtctagaccctcattggggacacagaaatcagtaacatgggagattggtgctgcagacatttgctaacttgtgtgctacaaggactaaggaaaactacgaagaaaatctacgaattactcaatgatgtccaccataacacaggggaagggaagaaaatcctactgcctttctggagagactaagggaggcattgaggaagcgtgcctctctgtcacctgactcttctgaaggccaactaatcttaaagcgtaagtttatcactcagtcagctgcagacattagaaaaaacttcaaaagtctgccgtaggcccggagcaaaacttagaaaccctattgaacttggcaacytcggttttttataatagagatcaggaggagcaggcggaacaggacaaacgggattaaaaaaaaggccaccgctttagtcatgaccctcaggcaagtggactttggaggctctggaaaagggaaaagctgggcaaattgaatgcctaatagggcttgcttccagtgcggtctacaaggacactttaaaaaagattgtccaagtagaagtaagccgccccttcgtccatgccccttatttcaagggaatcactggaaggcccactgccccaggggacaaaggtcttttgagtcagaagccactaaccagatgatccagcagcaggactgagggtgcctggggcaagcgccatcccatgccatcaccctcacagagccctgggtatgcttgaccattgagggccaggaaggttgtctcctggacactggtgcggtcttcttagtcttactcttctgtcccggacaactgtcctccagatctgtcactattctgagggggtcctaagacgggcagtcactagatactttttcccagccactaagttatgaactggggagctttattcttttcacatgcttttctaattatgcttgaaagccccactaccttgttagggagagacattctagcaaaagcaggggccattatacacctgaacataggagaaggaacacccgtttgttgtcccctgcttgaggaaggaattaatcctgaagtctgggcaacagaaggacaatatggacgagccaaagaatgcccgtcctgttcaagttaaactaaaggattccacttcctttccctaccaaaggcagtaccccctcagacccaaggcccaacaaggattccaaaagattgttaaggacttaaaagcccaaggcttagtaaaaccatgcataactccctgcagtaattccgtagtggattgaggaggcacagaaacccagtggacagtggagggttagtgcaagatctcaggattatcaatggaggccgttgtccttttatacccagctgtacctagcccttatactgtgctttcccaaataccagaggaagcagagtggtttacactcctggaccttaaggatgccttcttctgcatccctgtacatcctgactctcaattcttgtttgcctttgaagatacttcaaacccaacatctcaactcacctggactgttttaccccaagggttcagggatagcccccatctatttggccaggcattagcccaagacttgagccaatcctcatacctggacacttgtccttcggtaggtggatgatttacttttggccgcccattcagaaaccttgtgccatcaagccacccaagcgctcttcaatttcctcgctacctgtggctacatggtttccaaaccaaaggctcaactctgctcacagcaggttacttagggctaaaattatccaaaggcaccagggccctcagtgaggaacacatccagcctatactggcttatcctcatcccaaaaccctaaagcaactaaggggattccttggcgtaataggtttctgccgaaaatggattcccaggtttggcgaaatagccaggtcattaaatacactaattaaggaaactcagaaagccaatacccatttagtaagatggacaactgaagtagaagtggctttccaggccctaacccaagccccagtgttaagtttgccaacagggcaagacttttcttcatatgtcacagaaaaaacaggaatagctctaggagtccttacacagatccgagggatgagcttgcaacctgtggcgtacctgactaaggaaattgatgtagtggcaaagggtt

SEQ ID NO: 4431 - DNA, 1639 bp, Homo sapiens
  SIMILAR (1076)..(1636): 1001254mologous to Escherichia coli HMP haemoprotein,accession number X58872,Smith-Waterman Score=980.
gagactgaatatgacttctatgacccctttaaagccacggatggggaccttcacggggaccaatgtgccccgttatccggtgaatacttctgacatcaagaacagcggggacaagcttaatggcggtgagcagcggtgcgtggccagggtagatccccagttcaccttcgctacccgttacctggattttctcgaccagaccagagaacatttgttgctctgcgctgacgacgtccaggtggcgttaaagttttttggctttttccacagcttcttcgatggaaccgaccatgtagaacgcctgctccggcaggtgatcgtattcgccttccatgatgcctttaaagccacggatggtgtctttcagggagacgtatttacccggagaaccggtgaatacttctgccacgaagaacggctgggacaggaagcgctggatcttacgagcacgcgctaccaccagtttgtcttcttcagacagttcatccatacccaggatggcgatgatgtctttcagttcctgataacgttgcaggatggactgaacgccacgcgcggtgtcgtagtgttcctgaccaaccaccagcgggtccagctgacggctggtggagtccagcgcgcgcacgctgttgcctacgccagcgccgaggttgtagatgtgtacgcctggcttgttcgccagtttttccatcgccacgacgtgaccgtccgccagatccattacgtggatgtaatcgcgtacgccagtaccatcttcggtcggataatcgttaccaaaaatcgccagcgagtcgcgacggcctacagcaacctgggcgattggcgagaagcacttacaacccgccaaaagctgattgcccaggattataaagtcagttattcattggccaaatcctgtaaaagtgacttgaagaaataccggtgcaatgtggataaccttccgcgatcgcgtgaagccaagtgtgagcgcaacatcatagttgacgaagctggtttcgaagctgcaatggaagagcagcgtcgtcgcgcgcgcgaagccagcggctttgtaatcatgcagtttcgccatcgtactattgccgcctacgccagtaatattgaaaacctgcctgcgctgctgccagcggtagaaaaaatcgcgcagaagcacaccagcttccagatcaaaccggaacagtacaacatcgtcggtgaacacctgttggcaacgctggacgaaatgttcagcccggggcaggaagtgctggacgcgtggggtaaagcctatggtgtactggctaatgtatttatcaatcgcgaggcggaaatctataacgaaaacgccagcaaagccggtggttgggaaggtactcgcgatttccgcattgtggctaaaacaccgcgcagcgcgcttatcaccagcttcgaactggagccggtcgacggtggcgcagtggcagaataccgtccggggcaatatctcggcgtctggctgaagccggaaggtttcccacatcaggaaattcgtcagtactctttgactcgcaaaccggatggcaaaggctatcgtattgcggtgaaacgcgaagagggtgggcaggtatccaactggttgcacaatcacgccaatgttggcgatgtcgtgaaactggtcgcttga

SEQ ID NO: 4432 - DNA, 2601 bp, Homo sapiens
  SIMILAR (227)..(2536): 1001254mologous to Homo sapiens LDL receptor related protein 105,accession number AB009462,Smith-Waterman Score=4241.
tacgggcctgcaccgccaccgcacaaagacgcctcgggagccgccgcctgcacccgggccgcagcagccacgccagccggagcccgagccgtagcccgagcccgagcccgagccgcagccagagccagagccggagccgcagccagagccagagccggagccgcagccggaaccggagccggagccgcggggcaggaggcggcgcccgcgggcggccgggcccggcatggagaagcgcgcggccgcggggctggagggcgcgccgggcgcccgggcgcagctggccgtcgtctgtctggtgaacatctttctcaccgggagactcagcagtgcggttcctgccttagcggcctgcagtgggaagctggagcagcacacagagcggcgtggggtcatctacagcccggcctggcccctcaactacccgccaggcaccaactgcagctggtacatccagggcgaccgtggtgacatgattaccatcagcttccgcaactttgacgtggaggagtcccaccagtgctccctggactggctcctgctgggcccagcagccccaccccgccaggaggccttccgcctctgtggctccgccatcccacctgccttcatctctgcccgcgaccatgtctggattttcttccactcagacgcctccagctccggccaggcccagggcttccgtctgtcttacatccgagggaagctgggccaggcatcctgccaggcagatgagttccgctgtgacaacggcaagtgcctgcccggcccgtggcagtgcaacacggtggacgagtgtggagacggctctgatgagggcaactgctcggcgcccgcctccgagcctccaggcagcctgtgccccggggggaccttcccatgcagcggggcgcgctccacgcgttgcctgcctgtggagcggcgctgtgacggcttgcaggactgcggcgacggctcggatgaggcgggctgccccgacctggcgtgcggccggcggctgggcagcttctacggctcctttgcctccccagacctgttcggcgccgctcgcgggccctcagaccttcactgcacgtggctggtggacacacaggactcccggcgggtgctgctgcagctggaactgcggctgggctatgacgactacgtgcaggtatacgagggcctgggtgagcgcggggaccgcctgctgcagacgctgtcctaccgcagcaaccaccggcccgtgagcctggaggccgcccagggccgcctcactgtggcctaccacgcgcgcgcccgcagcgccggccacggcttcaatgccacctaccaggtgaagggctattgcctcccctgggagcagccgtgcgggagcagtagtgacagtgacgggggcagcctgggcgaccagggctgcttctcagagccacagcgctgtgatggctggtggcattgtgccagcggccgagacgagcagggctgccctgcctgcccgcccgaccagtacccctgcgagggtggcagtggtctgtgctacacgcctgccgaccgctgcaacaaccagaaaagctgtcccgacggcgccgacgagaagaactgcttctcctgccagcccggcaccttccactgcggtaccaacctgtgcatcttcgagacgtggcgctgtgacggccaggaagactgccaggacggcagcgatgagcatgggtgcctggccgccgtgccccgcaaggtcatcacggcggcgctcattggcagcctggtgtgtggcctgctgctggtcatcgcgctgggctgcgccttcaagctctactcactgcgcacgcaggaatacagggccttcgagacccagatgacgcgcctggaggctgagtttgtgcggcgggaggcacccccatcctatggtcagctcatcgcccagggcctcattccacccgtggaggactttcctgtctacagtgcgtcccaggcctctgtgctgcagaatcttcgcacagccatgcggagacagatgcgtcggcacgcctcccgccgggggccctcccgccgccgcctcggccgcctctggaaccggctctttcaccggccgcgggcgccccgaggccagatcccactgctgaccgcagcacgcccctcacagaccgtgctgggcgatggcttcctccagcctgctccaggggctgcccccgaccccccagcaccgctcatggacacaggcagcaccagggcggccggagacaggccccccagtgcccccggccgtgcaccggaggtgggaccttcagggccacccttgccctcgggcctgcgagacccagagtgcaggcccgtggacaaggacagaaaggtctgcagggagccactggcagacggcccagctcctgcagatgcacctcgggagccctgctcagcccaggacccgcacccccaggtctccactgccagcagcaccctgggcccccactcgccagagccactgggggtctgcaggaaccccccgcccccctgctccccaatgctggaggccagcgatgatgaggccctgttggtctgttgaccgctgggctcgctggtgaccgccacagccccgctttgtaaccagggaatacacagtcattt

SEQ ID NO: 4433 - DNA, 771 bp, Homo sapiens
  SIMILAR (256)..(306): 521254mologous to Rattus norvegicus LRp105,accession number AB009463,Smith-Waterman Score=40.
atggaccgtccaggccagaatgttcccccccctaatggcgatcaacgtgaagccctgtttaacgctattgccgcctacgccagtaatattgaaaacctgcctgcgctgctgccagcggtagaaaaaatcgcgcagaagcacaccagcttccagatcaaaccggaacagtacaacatcgtcggtgaacacctgttggcaacgctggacgaaatgggcttgggactcagggcagtgcggtcgagcccctacccactccggagaacccccggccccgccagcgcggccgggctgctggctcccctggcgtccggtcgaggcgcacacccgcctcggtccgactgtgaccccgcggggcgcgctccacgcgctgcctgcctgtggagcggcgcatgtgacggcttgcaggactgcggcgacggctcggatgaggcgggctgccccgacttggcgtgcggccggcggctgggcagcttctacggctcctttgcctccccagacctgttcggcgccgctcgcgggccctcagacattcactgcacgtggctggtggacacacaggactcccggcgggtgctgctgcagctggaactgcggctgggctatgacgactacgtgcaggtatacgagggcctgggcgagcgcggggaccgcctgctgcagacgctgtcctaccgcagcaaccaccggcccgtgagcctggaggccgcccagggccgcctcactgtggcttaccacgcgcgcgcccgcagccaccccttgatgaatgaatga

SEQ ID NO: 4434 - DNA, 565 bp, Homo sapiens
  SIMILAR (2)..(562): 981254mologous to Homo sapiens G protein coupled receptor flh2882,accession number Y28488,Smith-Waterman Score=950.
ggagctgtacgcctcgtgcacgctgtgcagccggcggccggactagcgcctgcgcttcgccgtcttcactggcgccttccacgctctcagcttcctgctctccttcgtcgtgctctgctgcacgtacctcaaggggctcaaggtggcccgcttccattgcaagcgcatcgacgtgatcaccatgcagacgctcgtgctgctggtggacctgcaccccagtgtgcgggaacgctgtctggaggagcagaagcggaggcgacagcgagccaccaagaagatcagcaccttcatagggaccttccttgtgtgcttcgcgccctatgtgatcaccaggctagtggagctcttctccacggtgcccatcggctcccactggggggtgctgtccaagtgcttggcgtacagcaaggccgcatccgacccctttgtgtactccttactgcgacaccagtaccgcaaaagctgcaaggagattctgaacaggctcctgcacagacgctccatccactcctctggcctcacaggcgactctcacagccagaacattctgccggtgtctgagtga

SEQ ID NO: 4435 - DNA, 492 bp, Homo sapiens
  SIMILAR (106)..(318): 401254mologous to Caenorhabditis elegans weak similarity to collagens; glycine- and proline-rich,accession number AF000298,Smith-Waterman Score=107.
gagcgaggtcgtcaggaaatgagtgccaagctgaggcctcctgcagagccgccctgtgtccctgccaggatctcaccttgaagacccagctagaggcagtaaatggaaagacgatgcccgccctggaggtgttcgcccatgccctgcgcttcttcagggagcacgcccttcaggtgcgctgcggccccacctctgccgactgtggcagggaccccctattttcccctcatccgaaaccgctcccccatcccgtccccgacattggatgggtagccaccgccggagctcagaggtcatcttctccagtaccctcctccctttttgtctggtagagcctgcaccaagccatactgatgggaggggggccgattcttccagctctgctgggaagtccttcctgtgatttgattagtacctccagttccgcagagggctgaagaccaccctccctccaagccagcctgggcaacaagagagactccatctcacaaa

SEQ ID NO: 4436 - DNA, 943 bp, Homo sapiens
  SIMILAR (448)..(762): 701254mologous to Homo sapiens dJ964F7.1 (novel protein (disintegrin and metalloproteinase)),accession number AL356755,Smith-Waterman Score=357.
gatctcaccttgaagacccagctagaggcagtaaatggaaagacgatgcccgccctggaggtgttcgcccatgccctgcgcttcttcagggagcacgcccttcaggtctcgaagccagacatggggctggtggccctggaggctgaaggccaggagctcctgcttgagctggagaagaaccagagtctccggagcccgcactcccagacatcactgccctccttcctgagggtgctgaggctcggaggctcagagatgctactggtccaaggtcatgcagcgaggagcggcaatgaacagggtcgtggggaggagggggcgctgaccagttacgccccgccctcactaccgcactcatgcccccggacaatcgcttcggcgaaaacaccccagctgcaccagctaacggtcactgcgccccgggaacctgacatcactctagttcaggaccactcggagctccccatcggcgccgcagccaccatggcccatgagatcggccacagcctcggcctcagccacgaccccgacggctgctgcgtggaggctgcggccgagtccggaggctgcgtcatggctgcggccaccgggtacgcgggcacccgtttccgcgcgtgttcagcgctgcagccgccgccagctgcgcgccttcttccgcaaggggggcggcgcttgcctctccaatgccccggaccccggactcccggtgccgccgcgctctgcgggaacggcttcgtggaagcgggcgaggagtgttactgcgtttcctggccaggagtgccgcgacctctgctgctttgctcacaactgctcgctgcgcccgggggcccagtgcgcccacggggactgctgcgtgcgctgcctggtgagggcatggaaggttcaggctcccaccagctcccgaggctggttccaggtggtgactctgcggagattctcatga

SEQ ID NO: 4437 - DNA, 838 bp, Homo sapiens
  SIMILAR (130)..(702): 701254mologous to Homo sapiens KRAB zinc finger protein HZF26,accession number AF325191,Smith-Waterman Score=759.
atgggaccactgacatttagggatgtgaaaatagaattctctctagaggaatggcaatgcttggacactgcgccaggaaatttatatagagatgtgatgttagagaactacagaaacctggtcttccttgttatgtgttctcattttgcccaagatgtttggccagagcacagcataaaagattctttccaaaaagtgatactgagaacatatggaaaatatggacatgagaatttacagctaagaaaagaccataaaagtgtggatgcatgtaaggtgtacaaaggaggttataatggacttaaccagtgtttgacaactactgacagcaagatatttcagtgtgataaatatgtgaaagtctttcataaatttccaaatgtaaatagaaataagataagacatactggaaagaaacctttcaaatgtaaaaaccgtggcaaatcattttgcatgctttcacaattaactcaacataagaaaattcatactagagagtattcttacaaatgtgaagaatgtggtaaagcctttaactggtcctcaacccttactaaacataagataattcatactggagaaaaaccctacaaatgtgaagaatgtggcaaagcttttaaccggtcctcaaatcttactaaacataaaataattcatactggagagaaaccctacaaatgtgaagaatgtgggcaaagcttttaaccggtcctcaacccttactaaacataaaagaattcatacagaagagaaaccctacaaatgtgaagaatgtggcaaggcctttaaccagttctcgattcttaataaacataagagaattcatatgggaagataa

SEQ ID NO: 4438 - DNA, 591 bp, Homo sapiens
  SIMILAR (75)..(128): 881254mologous to Homo sapiens cell cycle protein p38-2G4 homolog,accession number U59435,Smith-Waterman Score=69.
atgttgggcaaggtccagcagcaggagcaaactatcgccaaggacctggtcgtgaccaagtataagatgtgtggggggaccacatcgccaaccgggtacttcggtcgttggtggaagcatctagctcagagaggccaggattatattctcaaggaaggtgacttggtaaaaattgaccttggggtccatgtggatggcttcatcgctaatgtaactcatacttttgtggttgatgtagctcaggggacccaagtaacagggaggaaaggagatgttattaaggcagctcaactttgtgttgaagctgccttatgcctggtcaaacctggaaatcagaacatacaagtgagagaagcctggagcaaagttgccctctcatttaactgcatgccaatagaaggtatgctgtcacaccagttgaagcagcatgtcatcgatggtgaaaaaaacattatccagaatcctacagaccagcagaagaaggaccatgaaaaagctgaatttgaggtacatgaagtatatgctgcggatgttctcgtcagctcaggagagggcaaggccaaggatgcaggacagagaaccactatttag

SEQ ID NO: 4439 - DNA, 699 bp, Homo sapiens
  SIMILAR (151)..(348): 841254mologous to Mus musculus p38-2G4,accession number X84789,Smith-Waterman Score=287.
cttttgctcccttgaagatctatcctggctataacccagtctaagccagaaatctcagagccctgtgtttccataaccaggtagttgtctcactgcctaccacttcaaactactgaagtgggtggatttggaaaccttttgggatactggatagcttgttccataggttgtgtactatctacaggtatgctgtcacaccagttgaagcagcatgtcatcgatggagaaaaaaccattatccagaatcccacagaccagcagaagaaggaccatgaaaaagctgaatttgaggtacatgaagtatatgctgtggatgttctcgtcagctcaggagagggcaaggtgaggagagtaccagagttggcaaagaggggtgactgagagtgttcaccagaccaaatgttacttaaattactctttcaggccaaggatgcaggacagagaaccactatttacaaacgagacccctctaaacagtatggactgaaaatgaaaacttcacgtgccttcttcagtgaggtggaaaggcgttttgatgccatgccgtttactttaaggtactaagcaatgatagtacttggaaccagtctgactcacagaccatacacccaggaacactttttcctctcccttcctgcctagacttgtagcgtgcatgtgctcactccctccctctctctccccatctccttctcattg

SEQ ID NO: 4440 - DNA, 1827 bp, Homo sapiens
  SIMILAR (1139)..(1405): 611254mologous to Homo sapiens cell cycle protein,accession number AF104670,Smith-Waterman Score=212.
  misc_feature (1)...(1827): n = a,t,c or g
ggcacgagtgcgcctcagcccgcgcgctcgcagcttctcgctctcgcctgcctgcccgctcccttgcttgctcgcgctttcgctcgccctctcctcgaggatcgaggggactctgaccacagcctgtggctgggaagggagacagaggcggcggcggctcaggggaaacgaggctgcagtggtggtagtaggaagatgtcgggcgaggacgagcaacaggagcaaactatcgttgatgttctctggtcgtgaccaagtataagatggggggcgacatcgccaacagggtacttcggtccttggtggaagcatctagctcaggtgtgtcggtactgagcctgtgtgagaaaggtgatgccatgattatggaagaaacagggaaaatcttcaagaaagaaaaggaaatgaagaaaggtattgcttttcccaccagcatttccggtaaataactgtgtatgtcacttctccccttttgaaagagcgaccaggattatattctcaaggaaggtgacttggtaaaaattgaccttggggtccatggtggatggcttcatcgctaatgtagctcacacttttgtggttgatgtagctcaggggacccaagtaacagggaggaaaggcagatgttattaaggcagctcaccttttgtgctgaagctgcccctacgcctggtcaaacctggaaatcagaacacacaagtgaccagaagcctggaacaaagttgcccactcattttaactgcacgccaattagaaggtatgctgtcacacagtttgaagcagcatgtcatcgatggagaaaaaccataattccagaatcccacagacaagcagaaagagggcccatgaaaaagctgattttgaggtacatgtatgtatatgccgtggaaggtctcgtcaagcctcaggagagggcaaggcccaaggatgcaggacagagaaccactatttacaaacgagacccctctaaacagtatggactgaaaatgaaaacttcacgtgccttcttcagtgaggtggaaaggcgttttgatgccatgccgtttactttaagagcatttgaagatgagaagaaggctcggatgggtgtgggtggagtgcgccaaacatgaacttgctggcaaccatttaatgttctctattnaggaagggagggtgattttgtttgcccagttttaaattttacagttctggctcatgcccaatgggcccatgctgataaccagtggtcccttcgagcctgacctatacaagtcccagatggaggtccagtgatgcagagctaaaggccctcctccagagttctgcaagtcgaaaaacccagaaaaagaagaaaaagaaggcctccaagactgcagagaatgccaccagtggggaaacattagaagaaaatgaagctggggactgaggtgggtcccatctccccagcttgctgctcctgccctcatccccttcccaccaaaccccagactctgtgaagtgcagttcttcttctccacctaggaccgccagcagagcggggggatttccctgcccccaccccagttccccaacccactcccttccaacaacaaccagctccaactgaatttggttttgggaggtgaggcttcccaaccacggaagactactttaaatgaaaaaaagaaattgaataataaaatcaggagtcaaaattcatcgtcttcaaggcccctctttctagccttttctactactctctgcttggtcaaggtttgtgccccactacagaacagggctaaattagccaccaccactgaaaactcagccgaatttttttataccactctgacgtcagcatttttt

SEQ ID NO: 4441 - DNA, 431 bp, Homo sapiens
  SIMILAR (9)..(188): 661254mologous to Homo sapiens argininosuccinate synthetase (aa 1-412),accession number X01630,Smith-Waterman Score=186.
ggccctgcatcgcccgcaaacaagtggaaatcgcccagcgggagggggccaagtatgtgtcccacggcgccacaggaaaggggaacgtgcagggtgattatgagccaactgatgccaccgggttcatcaacatcaattccctcaggctgaaggaatatcatcgtctccagagcaaggtcactgccaaatagacccgtgtacaatgaggagctggggcctcctcaatttgcagatcccccaagtacaggcgctaattgttgtgataatttgtaattgtgacttgttctccccggctggcagcgtagtggggctgccaggccccagctttgttccctggtccccctgaagcctgcaaacgttgtcatcgaagggaagggtggggggcagctgcggtggggagctataaaaatgacaattaaaagagaaaaaaa

SEQ ID NO: 4442 - DNA, 588 bp, Homo sapiens
  SIMILAR (1)..(516): 751254mologous to Homo sapiens argininosuccinate synthetase (aa 1-412),accession number X01630,Smith-Waterman Score=684.
atgcccgaattctacaaccggttcaagggccacagtgacctgacggaatatgcaaagcaacgcgggattcccaccccggtcactcccaagaacccgtggagcatggacgagaacctcatgcacatcagctgcgaggctggaatcctggagaatcccgagaaccaagcgcctccagctctctacacgaagacccaggacccggccaaaacccccaacacccctgacattctcgagatcgagttcaaaaaaggggtccccgtgaagctcttcatgtacctgaacgaagtcgcgggcaagcacagcgtgggcaatattgccatcgtggagaaccgtttcattggaacgaagtcccgaggtatctaccgggccccagcaggcaccatcctttgctacgctcatttagacatcgaggccttcaccatgtaccgggaagtgcacaaaatcaaacaatgccggggcttgaaatttgctgagctgcatagtggggctgccaggccccagctttgttccctggtccccttgaagcctgcaaacgtcgtcatcgaagggaaggatggggggcagctgcggtggagagctgtaaaatga

SEQ ID NO: 4443 - DNA, 1871 bp, Homo sapiens
  SIMILAR (1)..(1206): 531254mologous to Homo sapiens argininosuccinate synthetase (aa 1-412),accession number X01630,Smith-Waterman Score=801.
  misc_feature (1)...(1871): n = a,t,c or g
atgtccagcaaaggctccgtggttctggcctacagtggcggcctggacacctcgtgcatcctcgtgtggctgaaggaacaaggctatgacgtcattgcctatctggccaacattggccagaaggaagacttcgaggaagccaggaagaaggcactgaagcttggggccaaaaaggtgttcattgaggatgtcagcagggagtttgtggaggagttcatctggccggccatccagtccagcgcactgtatgaggaccgctacctcctgggcacctttttttgccaggccctgcatcgcccgcaaacaagtggaaattcgcccagcgggagggggccaagtatgtgtcccacggcgccacaggaaaggggaacgatcaggtccggtttgagctcagctgctactcactggcccccccagataaaggtcattgctccctggaggatgcctgaattctacaaccggttcaagggccgcaatgacctgatggagtacgcaaagctaacatgggattcccatcccggtcactcccaagaacccgtggagcatggatgagaacctcatgcacatcagctacgaggctggaatcctggagaaccccaagaaccaagcgcctccaggtctctacacgaagacccaggacccagccaaagcccccaacacccctgacattctcgagatcgagtttcaaaaaaggggtccctgtggaaggtggaccaacgttcaaggatgggcaccacccaccagacctttcttggagctctttcatgtacctgaacgaagtcgcgggcaagcatggcgttgggccgtatttgacatcgtgggagaaccgctttcattgggaattgaagtcccgaggtatcttacggagaccccaggcagggcaccatcctttaccatgctcatttagacatcgaggccttcaccatgggcggggatagggcgcaaataccaaaccagggtctgggctttgaatttgttgagcttggtgtataccggttttctggcacagcccctgagtgtgaattggtcggcccttgccttcgccaaagtccccaggagcgagtggaagggaaaagtgcaggtgtcccgtccctcaaagggcccaggtgtacatccctcggcccggaagtcccccactgttctctctacaatgaaggagctggtgaagcatggaacgtgccagggtgattatgaagcccaactgattgccacccgggttcatccaaacatcaatttccctcaaggctgaagggaattatcatcgtcttcccagagcaaaggtcactgcccaaattagaccccgtgtacaatgaggagcttggggcctccctcaatttgcaagatccccccaagtacaggcgcctaattgttgtgataatttgtaattgtgacttgttctccccggctggcagcgtaagtggggctgccaggccccagctttgttccctggtccccctgaagcctgcaaacgttgtcatcgaagggaagggtggggggcagctgcaggtggggagctataaaaatgacaattaaaagagacactagtcttttatttctannnnnnnnnnnnnnnnnnnnnnnnnnnnnnnnnnnnnnttaattatgggtttcttaggccaacctttgtgttttcggacctaagtgctgccgaaggccgccatttgccagacagcctgttaatccggctgtcgacccctctccagcaaaaactaggaatccagatgtgccgcctgggtccgatcctatccagcatcctgggaatctgtcaccaactgtggtcctgtggcaaatgtcaagaaaccaaataaaattcagggaatgccctttgggggcatcaacgcacagccctttctctggacatcacttttact

SEQ ID NO: 4444 - DNA, 501 bp, Homo sapiens; identical to SEQ ID NO: 4250
  SIMILAR (179)..(487): 1001254mologous to Homo sapiens hnRNPcore protein A1,accession number X79536,Smith-Waterman Score=538.

SEQ ID NO: 4445 - DNA, 3435 bp, Homo sapiens
  SIMILAR (2626)..(2685): 301254mologous to Homo sapiens putative p150,accession number U93574,Smith-Waterman Score=47.
gcaagaaaaggggctttgcctttgtaacctttgacgaccatgactccatggataagattgtcattccgaaataccatactgtgaatggccacaactgtgaagttaggaaagccctgtcaaagcaagagatggctagtgcttcttccagccaaagaggtcaaagtggttctggaaactttggtggtggttgtggaggtggtttctgtgggaatgacaactttggtcatggaggaaacgtcagtggtcgtggtggctttggtggcagccatggtggtggtggatatggtggcagtggggatggctataatggatttggtaatgatggaatctaagagaccaattataaaacaataaaatactcctctctcccacagttgccttttttctctcttcttgtaattttctcttgctctatttggcccttcttttcacttgtccttccagccagtcaagttctccccaaattcccaggaactcttggggtaggtgtgtgtttttcacatcttaaaggctcacagaccctgcgctggacaaatgttccattcctgaaggacctctccagaatccggattgctgaatcttccctgttgcctagaagggctccaaaccacctcttgaactcaaatttcactttattctttgcatgtttttttttctttctctaggttgtttggttagggctgaatgttttcctgtttgtggatgccttcctgatcctccctaactcattttatgaggccagcatcattctgataccaaagcctggcagagacacaaccaaaaaagagaattttagaccaatatccttgatgaacattgatgcaaaaatcctcaataaaatactggcaaaccgaatccagcagcacatcaaaaagcttatccaccatgatcaagtgggcttcatccctgggatgcaaggctggttcaatatacacaaatcaataaatgtaatccagcatataaacagagccaaagacaaaaaccacatgattatctcaatagatgcagaaaaggcctttgacaaaattcaacaacctttcatgctaaaaactctcaataaattaggtattgatgggacatatttcaaaataataagagctatctatgacaaacccacagccaatatcatactgaatgggcaaaaactggaagcattccctttgaaaactggcacaagacagggatgccctctctcaccgctcctattcaacatagtgttggaagttctggccagggcaattaggcaggagaaggaaataaagggtattcaattaggaaaagaggaagtcaaattgtccctgtttgcagatgacatgattgtatatctagaaaaccccatcgtctcagcccaaaatctccttaagctaataagcaacttcagcaaagtctcaggatacaaaatcaatgtacagaaatcacaagcattcttatacaccaacaacagacaaacagagagccaaatcatgagtgaactcccattcacaattgcttcaaagagaataaaatacctaggaatccaacttacaagggatgtgaaggacctcttcaaggagaactacaaaccgctgctcaaggaaataaaagaggatacaaacaaatggaagaacattccatactatggtgaaatgaagcagctgatggtctctttttctcctctgctgtagtcaacattggcctgtgcccgagcgtctgctctctgcttgaattttaacagcacgctgatcctgcataaagctggctggcgacatctgaccatgatcattctacatttgtagttttgcagccgcacactgagaaagcaattggatcacaaatgttgctgagatgcctcttaacatttcttttcatctttccatttagctattcacatcattgcacacctgtttaactttgactgctatagcagaagccgacaggccacagatggctcccttgcctccattctctccagcctatctcatgatgagtgcacaggtggacattgtgtcaggctgacatttctcctttcacagacagtggagtatgtgacattcaccagcattgctggtctcactggagtgatcatgacaatagccttgattctcatggtaacttcagctactgagttcatccggaggagttattttgaagtcttctggtatactcacccttgcataattctttgtcccaaaccatccttctttgtctatttcagtggaattgtccggggtcaaacagaggagagcatgaatgagagtcatcctcgcaagtgtgcagagtcttttgagatgtgggatgatcatggattaaagacttaaatgtaaaaccccaaactataaacaccgtagaagacaaccaccctggaagacaacctaggcaataccattcaggacataggccctggcaaagatttcatgatgaagataccaaaagcaaatgcaacaaaaataaaaattgatgaatgggatctaattaaactaaagagcttctgcacagcaaaagcaactaccaagagagtaaacaaacatgacgagagcctgaggagccattatgagtgatggggaatgctcacagactgtgtggtaatgagagatccaaacaccaagcgctccaggggctgtgggtttgtcacatacgccactgtggaggaggtggatgcagccacgaacgcaaggccacacaaggtggatggaaaagttgtggaaccaaagagaactgtctcaagagaagattctcaaagaccaggtgcccacttaactgtgaaaaagatatttgttggtggcattaaagaagacacggggggctttgcctttgtaacttttgacgaccatgactccgtggataagattgtcattccgaaataccatactgtgaatggccacaactgtgaagttaggaaagccctgtcaaagcaagagatggctagtgcttcatccagccaaagaggtcgaagtggtcgtggaggtggttttggtgggaatgaaaactttggttgtggaggaaacttcagtggtcatggtggctttggtggcagccatgatggtggtggatatggtggcagtggggatggctataatggatttggtaatgatggtggttatccaggaggcggccctggttactctggaggaagcagaggctatggaagtggtggacagggttgtggaaatcaggacagtggctatggcaggagtggcagctatgacagctgtaacaagggaggcagaggcggctttggcagtggtagtggaagcaattttggaggtggtggaagctacaatgattttggcaattacaacaatcagtattcaaattttggacccatgaagggaggaaactttggggcagacgctctggcccctagggtgatggaggccaatactttgccaaaccaccaaaccacagtggctatggcggttccagtagcagcagtagctatggcagtggcagaagatg

SEQ ID NO: 4446 - DNA, 765 bp, Homo sapiens; identical to SEQ ID NO: 4251
  SIMILAR (382)..(762): 921254mologous to Homo sapiens hnRNPcore protein A1,accession number X79536,Smith-Waterman Score=648.

SEQ ID NO: 4447 - DNA, 397 bp, Homo sapiens
  SIMILAR (3)..(326): 921254mologous to Homo sapiens hnRNPcore protein A1,accession number X79536,Smith-Waterman Score=545.
gcaagaaaaggggctttgcctttgtaacctttgacgaccatgactccatggataagattgtcattccgaaataccatactgtgaatggccacaactgtgaagttaggaaagccctgtcaaagcaagagatggctagtgcttcttccagccaaagaggtcaaagtggttctggaaactttggtggtggttgtggaggtggtttctgtgggaatgacaactttggtcatggaggaaacgtcagtggtcgtggtggctttggtggcagccatggtggtggtggatatggtggcagtggggatggctataatggatttggtaatgatggaatctaagagaccaattataaaacaataaaatactcctctctcccacagttgccttttttctctcttcttgt

SEQ ID NO: 4448 - DNA, 1678 bp, Homo sapiens
  SIMILAR (1)..(633): 961254mologous to Homo sapiens hnRNPcore protein A1,accession number X79536,Smith-Waterman Score=1080.
atgagagatccaaacaccaagcgctccaggggctttgggtttgtcacatatgccactgtggaggaggtggatgcagctatgaatacaacgccacacaaggtggatggaagagttgtggaaccaaagagagctgtctccagagaagattctcaaagaccaggtgcccacttaactgtgaaaaagatatttgttggtggcattaaagaagacactgaagaacatcacctaagagattattttgaacagtatggaaaaattgaagtaattgaaatcatgactgaccgaggcagtggcaagaaaaggggctttgcctttgtaacctttgacgaccatgactccgtggataagattgtcattcagaaataccatactgtgaagggccacaactgtgaagttagaaaagccctgccaaagcaagagatggctagtgcttcatccagccaaagaggtcgaaggggttctggaaactttggtggtggtcgtggagatggtttcggtgggaatgacaactttggtcgtggaggaaacttcagtggtcgtggtggctttggtggcagctgtggtggtggtggatatggtggcagtggggatggctataatggatttggtaatgatggaagcaatttttgagggtggtggaagctacaatgattctggcaattacaacaatcagtcttcaaaatttgaacccatgaagggaggaaattttggaggcagaagctctggcccctatggcggtggaggccaatactttgcaaaaccacaaaaccaagcagcacgctgcgtggctgctcgctggctatttaggacggaagctcggttggtgtttctccagaagtttcccccttgggcggtggtggaggtggtaaccgtgatagtagcagctccggcggcagcaacagcgactacgagggatggcggcggctgcagcaggaactgcaacatcccagaggtttttccagagcttctcggatgccctaatcgacgaggacccccaggcggcgttagagagaagcagcagcaaacaaattcaaaatctaccagaagacaagaaataactaagaccatagcagaactgaaggagatagagacacgaaaaacgcttcaaaaaatcaatgaatccaggagctggttttatgaaaagatcaacaaagtagatagactgctagacagactcataaagaagaaaagagagaagagtcaaatagatgcaataaaaaatgatataggggatattgtcactgatcccgcagaaatacaaactaccatcaaagaatactataaacgtctctatgcaaatgaactagaaaatctagaagaaatggataaattcctggcaacatacagcctccacagtctaaaccaggaagaagtcgaatccctgaataaaccagtaaccagttctgaagttgaggcagtaactaatagcctaccaaccaaaaaaagtccaggaccagatggattcacagtattattggaagttctggccccggcaatcaggcaagagaaagaaataaagcatattccaataggaagagaggaagtaaaattgtctctgtttgcagatgacgtgattgtatatttagaaaaccccatcgtctcagcccaaaatctccttaagctgataagcaacttcagcaaactctcagggtacaaaatcaatgtgcaaaaatcataa

SEQ ID NO: 4449 - DNA, 2165 bp, Homo sapiens
  SIMILAR (667)..(1341): 461254mologous to Rattus norvegicus helix destabilizing protein,accession number M12156,Smith-Waterman Score=356.
atgaagtgtttaaagtttataaatcacaaagaaatattggaggcttctgaaagaaaacaagcagagtcattagattttccctttaaaaaacttcgctggcatctctgtgaaggatggattgaagaggaaagagatgagtcaagaaaatcggaaaccatcttcaaagacctcttcaaagtccctgtgcttaaagaaaccatctattacaaattctatgggccccctgtctatcagattgaaactgtgtattttatggcactgagtccacctaagtcaaagcaatttgacaaaacaaaacaaaacaacaacaacaaaaaaacacatcagtttgtaattgttttctttaaaacagatgaacacctttctgcccgtggacgccgccgaagaagcatcgttaaagtctctcttctccctgccgtcattggtctaaagtcaaagtttcttaaaaagcccgaccagttgaggaagctttttcattggagggttgagctttgaaactactgatgagagcctgaggagccattttgagcaatggggaacgctcacggactgtgtggtaatgagagatccaaacaccaagcgctccaggggctttgggtttgtcacatatgccacttgtggaggaggtggatgcagctatgaatgcaaggccacacaaggtggattggaagagttgttggaaccaaagagagctgtctccagagaagattctcaaagaccaggtgcccacattaacttgtgaaaaagatatttgttggtggcattaaagaagacactgaagaacatcacctaagagatgattattttgaagagattattttgaacagtatggaaaaaattgaagtggattgaaatcatgacttgaccgaggcagtggcaagaaaaggggctttgccttttgtaacctttgacgaccatgactccgtggataagattgtcattccagaaataccatactgtggaaatggccacaactgtgaagttaagaaaagccctgtcaaagcaagaagatggctaggtgcttcatccagcccaaagggggtcgaagtggttctgggaaacttttggtggtgggtcgtgggaggtggttttcggtgggaatggacaacttcggtccgtggaggaaacttcagttggtccgtggtggcctttggtggcaccccgtggttggtggtggatatggttggcagtgggggatggcctataatggatttggtaatgatggaaagcaattttggaggtggtggaaagctacaatgattttggggaattacaacaatcaagtcttcaaattttggacccatgaagggaggaaattttggaaggcagaagctctggcccctatgggcggtggaggccaatacttttgctaaaccccgaaaaccaaggtggctatggcggttccagcagcagcaagtaactattggcagtggcagaagattttaatttaggaaaccaaagcttagcaggaagaggagagccagagaagttgacagggaagctacaggtttacaacagatttgtgaactcagcctaagcacagtggtggcagggcctagctgctacaaagaagacatgttttagacaaatactcatgtgtatgggcaaaaaactcgaggactgtatttgtgactaattgtataacaggttattttagtttctgttctgtggaaagtgtaaagcattccaacaaagggttttaatgtagattttttttttttgcaccccatgctgttgattgctaaatgtaacagtctgatcgtgacgctgaataaatgtcttttttttttaatgtgctgtataaagttagtctgctctgaagccatcttggtaaattttccccaagagtgtgaagttagaattccttcagggtgatgccaggttctttttggagtttatatacaacctgcttgggtggagaagccattgtcttcagaaaccttggtgtaggtgaactgatggttactgttgcgatctgaagttcaccattaaaagggattacccaagcaaaatcatggaattattggttataaaaatgattgttggcccatcctatgcaatatatctaaattgaataatggtaccagataaaattatagatgggaatgaagcttgtgtatcattcattatcatgtgtaatcaataaacgatttaattctcttgaa

SEQ ID NO: 4450 - DNA, 615 bp, Homo sapiens
  SIMILAR (239)..(325): 891254mologous to Homo sapiens ribosomal protein L7,accession number X52967,Smith-Waterman Score=125.
atgcaagcagcctcaagaagctggaaaaagcaagcctacagcttagagcctagagcctccagaaaacaactcagttttgccaactgcatgattttggtccaggaagacccattttggacttttgatcttttgaactgttctgaattctatgtctgttattttagccatttcaaccttgttaaaaattattactggggagctattgcagtcatttggagatggccttttgtggaaccttgtgattggaatcagaggtatcgatggtctgagcccaaaggtccgaaaggtgttgcagcttcttcgtcttcgtcaaatcttcaatggacctttgtgaagctcatcaaggttacagttaacatgctgaggactgtagagccatatattgcctgtgggtacccaaatctgaagtcagtaaatgaactaatctacaagcatggttatggcaaaatcagtaagaagcgaattgctttgacagataatgttttgattgctcgatctcttggtaaatatggcatcatctgcatggaggatctgatttatgagatctatactgttggaaaacgcttcaaagaagcaaataacttcctgtggcccttcaaattatcttctccatga

SEQ ID NO: 4451 - DNA, 1986 bp, Homo sapiens
  SIMILAR (100)..(1617): 881254mologous to Homo sapiens putative p150,accession number U93574,Smith-Waterman Score=2241.
atgctctttgaaaccaaggagaacaaagacacaacataccagaatctccgggacgcattcaaagcagtgtgtagagggaaatttatagcactaaatgcccacaagagaaagcaggaaagatccaaaattgacaccctaacatcacaattcaaagaactagaaaagcaagagccaatacattcaaaagctagcagaaggcaagaaataactaaaatcagagcagaactgaagatcaacaaaattgatagactgctagcaagactaataaagaaaaagagagagaagaatcaaatagacgcaataaaaaatgataaaggggatatcaccaccgatcccacagaaatacaaactaccatcagagaatactacaaacacctctatgcaaataaactagaaaatctagaagaaatggataaattcctcaacacatacactctcccaagactaaaccaggaagaagttgaatctctgaatagaccaataacaggatctgaaattgtggcaataatcaatagcttaccaaccaaaaagagtccaggaccagatggattcacagccgaattctaccagaggtacaaggaggagctggtaccattccttctgaaactattccaatcaatagaaaaagagggaatcctgcctaactcattttatgaggccggcatcattctgataccaaagctgggcagagacacaaccaaaaaagagaattttagaccaatatccttgatgaacattgatgcaaaaatcctcaataaaatactggcaaaccgaatccagcagcacatcaaaaagcttatccaccatgatcaagtgggtttcatccctgggatgcaaggctggttcaatatactcaaatcaataaatgtaatccagcatataaacagagccaaagacaaaaaccacataagtatctcaatagatgcagaaaaggcctttgacaaaattcaacaacccttcatgctaaaaactctcaataaattaggtattgatgggacgtatttcaaaataataagagctatctatgacaaacccacagccaatatcatactgaatgggcaaaaactgggagcattccctttgaaaactggcacaagacagggatgccctctctcaccactcctattcaacatagtgttggaagttctggccagggcaattagacaggagaaggaaataaagggtattcaattaggaaaagaggaagtcaaattgtccctgtttgcagatgacatgattgtatatctagaaaaccccattgtctcagcccaaaatctccttaagctgataagcaacttcagcaaagtctcaggatataaaatcaatgtacaaaaatcacaagcattcttatgcaccaacaacagacaaacagagagccaaatcatgagtgaactcccattcacaattgcttcaaagagaataaaatacctaggaatccaacttacaagggatgtgaaggaccccttcaaggagaactacaaaccactgctcaaggaaataaaagaggagacaaacaaatggaagaacattccatgctcatgggtaggaagaatcaatattgtgaaaatggccatactgcccaagaaatacttacgactgggaaatttacaaagaaaagaggttttattggctcatggttctgcaggctatacaggaagaaaagcagcttccgctcggctgctggggaagcctcagaaaacttttactcaaggcgaaggcaaagccagagcagtcacatcacatggcccaagcaggaaagagaaaaagtcgggaggctgcacaggaagtgtggtatctccttctcatgagggcctcaggaagcttacaatcattcaagaagccaaaggtggagccagtgtgttagatggtgagagtgggagcaagagagagaagaggagcagccagggttgtttcaacaaccagctctcctgtgaactgaggaagaacccacttgtcactaaggagatagtgctaaatgattcatga

SEQ ID NO: 4452 - DNA, 1530 bp, Homo sapiens
  SIMILAR (442)..(891): 961254mologous to Homo sapiens putative p150,accession number U93564,Smith-Waterman Score=733.
atgcagctgaaagccaaggctcgagaactacgtgaagaatgcagaagcctcaggagccgatggaatcaactggaagaaagggtatcagtgatggaagatgaaatgaatgaaatgaagcgagaagggaagtttagagaaaaaagaataaaaagaaacgaacaaagcctccaagaaatatgggactatgtgaaaagaccaaatctacgtctgattggtgtacctgaaagtgacggtgagaatgcaaccaggttggaaaacactctgcaggatatcatccaggagaacttccccaatctagcaaggcaggccaacattcagattcaggaaatacagagaatgccacaaagatactcctcaagaagagcatctccaagacacataattgtcagattcaccaaagttgaaatgaaggaaaaaatgttaagggcagccagagagaaagtgttggaagttctggccagggcaatcaggcaggagaaggaaataaagggtattcaattaggaaaagaggaagtcaaattgtccctgtttgcagatgacatgattgtatatctagaaaaccccatcatctcagcccaaaatctccttaagctgataagcaacttcagcaaactctcaggatacaaaatcaatgtgcaaaaatcacaagcattcttatacaccaataacagacaaacagagagtcaaatcatgagtgaactcccattcacaattgcttcaaagagaataaaatacctaggaatccaacttacaagggacgtgaaggacctcttcaaggagaactacaaaccactgctcaatgaaataaaagaggatacaaacaaatggaagaacagtccatgctcatgggtaggaagaatcaatatcatgaaaatggccatactgcccaagagggaaagagttgagctgctaaccctgaagggagagctagccatgcagctgtacatgggagtggccggaggaagcagccgagatagtaaaaacagtgtaaaagagctgctgaataaagccatatttcatctacatacattctttcagctatctgccacccatccacccactccctgtggacctcagcatgggctgaaacctgaccctagacctgaaaattggcatagtcggcaggatgagatgagtaggtcttcagccactgagggctcccagaacccaaaagaaccatgggaagctgataagctgtggtaccatcgcacagggcagaagcccttggcagccgcattgttatccagagatgaaaacttaggctgtattttgcctgagggacataatttatccttgttagtacctgtgactgctttgtcatttcggctgttgacatgccccaacagcatcatggactgggcccacacttacgccaaggtgatcaatgtctccagctgttggatctgcaccactcttccagcggcagctgcagacagcttgccctggtacatgaattcagcttctgtgaagaactggacatggctggaaacttggggtcccatggacaatggttgggatgtaacacggtga

SEQ ID NO: 4453 - DNA, 2211 bp, Homo sapiens
  SIMILAR (1)..(945): 931254mologous to Homo sapiens putative p150,accession number U93564,Smith-Waterman Score=1555.
atggccatactgcccaaggtaatttatagattcaatgccatccccatcaagctatcaatgactttcttcacggaattggaaaaaactactttagagttcatatggaaccaaaaaagagcccgcattaccaagtcaatcctaagccaaaagaacaaagctgaaggcatcacgctacctgacttcaaactacagtacaaggctacagtaaccaaaacagcatggtactcgtaccaaaacagagatatagatcaatggaacagaacagagccctcagaaatagtgccatgcatctacaactatctgatctttgacaaacctgacaaaaacaagaaatggggaaaggattccctatttaataaatggtgctgggaaaactggctagtcatatgcagaaagctgaaactggatctcttccttacaccttatacaaaaattaattcaagatggatgaaagacctaaatgttagacctaaaaccataaaaaccctagaagaaaacctaggcaataccattcaggacataggcatgggcaaggacttgatgtctaaaacaccaaaagcaatggcaacaaaagccaaaattgacaaatgggatctaattaaactaaagagcttctgcacagcaaaagaaactaccatcagagtgatcaggcaacccacaaaatgggagaaaattttcacaacctactcatctgacaaagggctaatatccagaatctacagtgaactcaaagaaatttacaagaaaaaaacaaacaaccccatcaaaaagtgggcaaaagatatgaacagacacttctcaaaagaagacatttatgcagccaaaaaacacatgaaaaaatgctcatcatcactggccatcagagaaatgcaaatcaaaaccacaatgagataccatctcacaccagttagaatggcgatcattaaaaagtcaggaaacaacagggacatggatgaaactggaaaccatcattctcagcaaactacggcaaggacaaaaaaccaaacaccccatgttctcactcataggtgggaattgaacaatgagaacacatggacacaggaaggggaacatcacactctggagactgttgtgggggacatggatgaagccggaaaccatcattctcagcaaaatatcacaaggacagaaaaccaaacaccacatgttctcactcataagcgggagttgaacaatgagaacacatggacacagggaggggaacataacataccagggcctgttgtgggttcctggagagccttgaacactggactgagaagctttgactttatcccagggacagtaagagagcctgtaaagattttaggcagaaggttgacatcggatttgcagattaggaacagccctttagaggctgctgtacaagatgcagaaaaggcctttgacaaaattcaacagccctttatgctaaaaactctcaataaaatagctattgatgggacgtatctgaaaataataagagctatttatgacaaacccacagccaatatcatactgaatgggcaaaaactggaagcattccctttgaaaacgggcacaagacaggggtgccctctctcaccactcctatgcaacatagtgttggaagttctggccagggcaatcaggcaggagaaggaaataaagggtattcaattaggaaaagaggaagtcaaattgtccctgtttgcagatgacatgattgtatatctagaaaaccccattgtctcagcccaaaacctccttaagctgataagcaacttcagcaaagtctcaggatacaaaatcaatatgcaaaaatcacaagcattcttatacaccaataacagacaaacagagagccaaatcatgagtgaactcccagtcacaattgcttcaaagagaataaaacacctaggaatccaacttacaagggctgtgaaggacctcttcaaggagaactacaaaccactgctcaatgaaataaaagaggacacaaacaaatggaagaacattccatgctcatggataggaacaatcaatatggtgaaaatggccatactgcccaaggtaatttatagattcaatgccatccccatcaagctaccaaggactttcttcacagaattggaaacaactactttagagttcatatggaaccaaaaaagcctgcattgccaagtcaatcctaagccaaaagaacaaagctggaggcatcatgctacctga

SEQ ID NO: 4454 - DNA, 2481 bp, Homo sapiens
  SIMILAR (784)..(2460): 861254mologous to Homo sapiens putative p150,accession number U93563,Smith-Waterman Score=2393.
atgttctttgaaaccaatgagaacgaagatacatcataccagaatctcagggacacatttaaagtagtctttagatggaaaattatagctctaaatgcccacaagagaaagcaggaaagatctaaaattgataccctaacatcaaaattgaaagaactagagaagcaacagcaaacaaattcaaaagctagcagaagacatgaaataactaacatcagagcagaactgaaggagatagagacacaaaaaacccttcaaaaaatcaatgaatccgtgaactggttttttgaaaaaatcatcaaaatagatagactgctagccagactaataaagaagaaaagagagaagaatcaaatagattcaataaaaaatgatatagaggatatcaccactgatcctgtagaaacacaaactaccgtcagagaatattttaaacacctctacgcaaataaactagaaaatctagaagaaatggataaattcctggacacatacatcctcccaagtctaagccaggaagaagtagaacccctgaacagaccaataacaggttctgaaattgaggcaataattaatagcttaccaaccaaaaaaagtccaggaccagacagattcacagccaaattctaccagagaataaccaatacagagaagtgcttaaaggagctgatggagctgaaagccaaagctcgagaactacgtgaagaatgcagaagcctcaggagtcgatgcgatcaactggaagaaagggtttcagtgatggaagatgaaatgaatgaaatgaatgcaatcaaactagaactcaggattaagaatctcactcaaaaccgctcaactacatggaaactgaacaacctgctcctgaatgactactgggtacatagcgaaatgaaggcagaaataaagatgttctttgaaaccaacgagaacaaagacacaacataccagaatctctgggacacattcgaagcaaaaagcaagagcaaacaacattcaaaagctagcagaaggcaagaaataactaaaatcagagcagaactgaaggaaatagagatacaaaaaacccttcaaaaaattaatgaatccaggagctggttttttgaaaggatcaacaaaattgatagaccactagcaagactaataaagaaaaaaagagagaagaatctaatagacgcaataaaaactgataaaggggatatcaccaccaatcccacagaaatacaaactaccatcagagaatactacaaacacctctacgcaaataaactagaaaatcgagaagaaatggataaattcctcgacacatacactctcccaagactaaacgaggaagaagtcgaatctctgaatacaccaataacaggctcagaaattgtagcaataatcaatagcttaccaaccaaaaagagtccaggaccagatggattcacagccgaattgtaccagaggtacaaggaggaactggtaccattccttctgaaactattccaatcaatagaaaaagagggaatcctccctaactcattttatgaggccagcatcattctgataccaaagccaggcagagacacaaccaaaaaagagaattttagaccaatatcgttgatgaacattgatgcaaaaatcctcaataaaatactggcaaaaggaatccagcagcacatcaaaaagcttatccaccatgatcaagtgggcttcatccctgggatgcaaggccggttcaatatacgcaaatcaataaatgtaatccagcatataaacagaaccaaagacaaaaaccacatgattatctcaatagatgcagaaaaagcctttgacaaaattcaacaaccctttatgctaaaaactctcaataaattaggtattgatgggacgtatttcaaaataataagagctatctatgacaaacccacagccagtatcatactgaatgggcaaaaactagaagcattccgtttgaaaactggcacaagacagggatgccctctctcaccactcctattcaacatagtgtttgaaattctggcccgggcaattaggcaggagaaggaaataaagggtattcaattaggaaaagaggaagtcaaattgtccctgtttgcaggcgacatgattgtatatctagaaaaccccattgtctcagcccaaaatctccttaagctgataagcaacttcagcaaagtctcaggatacaaaatcaatgtgcaaaaatcacaagcattcttatacaccaataacagacaaacagagagccaaatcatgagtgaactcccattcacaattgcttcaaagagaataaaatacctaggaatccaacttacaagggatgtgaaggacctcttcaaggagaactacaaaccactgctcaaggaaataaaagaggatacaaacaaatggaagaacattccatgctcatgggtaggaagaatcaatatcgtgaaaatggccatactgcccaagaattggaaaaatctactttaa

SEQ ID NO: 4455 - DNA, 1544 bp, Homo sapiens
  SIMILAR (2)..(1387): 951254mologous to Homo sapiens putative p150,accession number U93572,Smith-Waterman Score=2229.
gatcaacaaaattgatagactgctagcaagactaataaagaaaaagagagagaagaatcaaatagacgcaataaaaaatgataaaggggatatcaccaccgatcccacagaaatacaaactaccatcagagaatactacaaacacctctatgcaaataaactagaaaatctagaagaaatggataaattcctcaacacatacactctcccaagactaaaccaggaagaagttgaatctctgaatagaccaataacaggatctgaaattgtggcaataatcaatagcttaccaaccaaaaagagtccaggaccagatggattcacagccgaattctaccagaggtacaaggaggagctggtaccattccttctgaaactattccaatcaatagaaaaagagggaatcctgcctaactcattttatgaggccggcatcattctgataccaaagctgggcagagacacaaccaaaaaagagaattttagaccaatatccttgatgaacattgatgcaaaaatcctcaataaaatactggcaaaccgaatccagcagcacatcaaaaagcttatccaccatgatcaagtgggtttcatccctgggatgcaaggctggttcaatatactcaaatcaataaatgtaatccagcatataaacagagccaaagacaaaaaccacataagtatctcaatagatgcagaaaaggcctttgacaaaattcaacaacccttcatgctaaaaactctcaataaattaggtattgatgggacgtatttcaaaataataagagctatctatgacaaacccacagccaatatcatactgaatgggcaaaaactgggagcattccctttgaaaactggcacaagacagggatgccctctctcaccactcctattcaacatagtgttggaagttctggccagggcaattagacaggagaaggaaataaagggtattcaattaggaaaagaggaagtcaaattgtccctgtttgcagatgacatgattgtatatctagaaaaccccattgtctcagcccaaaatctccttaagctgataagcaacttcagcaaagtctcaggatataaaatcaatgtacaaaaatcacaagcattcttatgcaccaacaacagacaaacagagagccaaatcatgagtgaactcccattcacaattgcttcaaagagaataaaatacctaggaatccaacttacaagggatgtgaaggaccccttcaaggagaactacaaaccactgctcaaggaaataaaagaggagacaaacaaatggaagaacattccatgctcatgggtaggaagaatcaatattgtgaaaatggccatactgcccaagaaatacttacgactgggaaatttacaaagaaaagaggttttattggctcatggttctgcaggctatacaggaagaaaagcagcttccgctcggctgctggggaagcctcagaaaacttttactcaaggcgaaggcaaagccagagcagtcacatcacatggcccaagcaggaaagagaaaaagtcgggag

SEQ ID NO: 4456 - DNA, 2151 bp, Homo sapiens
  SIMILAR (1)..(1362): 891254mologous to Homo sapiens putative p150,accession number U93565,Smith-Waterman Score=2008.
atggatacattcctcgacacatacactctcccaagactaaaccaggaagaagttgaatctctgaatcgaccaataacaggctctgaaattgtggcaataatcaatagtttaccaaccaaaaagagtccaggaccagatggattcacagccgaattctaccagaggtacaaggaggaactggtaccattccttctgaaactattccaatcaatagaaaaagagggaatcctccctaactcattttatgaggccagcatcattctgataccaaagccgggcagagacacaaccaaaaaagagaattttagaccaatatccttgatgaacattgatgcaaaaatcctcaataaaatactggcaaaccgaatccagcagcacatcaaaaagcttatccaccatgatcaagtgggcttcatccctgggatgcaaggctggttcaatatacgcaaatcaataaatgtaatccagcatataaacagagccaaagacaaaaaccacatgattatctcaatagatgcagaaaaagcctttgacaaaattcaacaacccttcatgctaaaaactctcaataaattaggtattgatgggacgtatttcaaaataataagagctatctatgacaaacccacagccaatatcatactgaatgggcaaaaactggaagcattccctttgaaaaccggcacaagacagggatgccctctctcaccgctcctattcaacatagtgttggaagttctggccagggcaatcaggcaggagaaggaaataaagggtattcaattaggaaaagaggaagtcaaattgtccctgtttgcagacgacatgattgtttatctagaaaaccccatcgtctcagcccaaaatctccttaagctgataagcaacttcagcaaagtctcaggatacaaaatcaatgtacaaaaatcacaagcattcttatacaccaacaacagacaaacagagagccaaatcatgggtgaactcccattcacaattgcttcaaagagaataaaatacctaggaatccaacttacaagggatgtgaaggacctcttcaaggagaactacaaaccactgctcaaggaaataaaagaggagacaaacaaatggaagaacattccatgctcatgggtaggaagaatcaatatcgtgaaaatggccatactgcccaagctgataggcaactgcagcaaaatctcaggatacaaaatcaatgtgcaaaaatcacaagcattcttatacaccaataacagacaaacagagagccaaatcatgagtgaactcgcattcacaattgcttcaaagaaaatcaaatacctaggaatccaacttacaagggatgtgaaggacctcttcaaggagaactacaaaccactgctcaatgaaataaaagaggatacaaacaaatggaagaacattccatgctcatgggtaggaagaatcaatatcgtgaaaatggccatactgcccaagagcagagtttgtgatcttcggtatttgcactggatctacggatctgtgtcctatggaaaaggcaatgcgtggatcacaagaaagagaagcaccacccaaaagtggacaggtgcagcactacagcccctttccaggacatccctgaaagacaccggagaaggggaatcttcccagtgggcagaacttcgagcagtgtacctgttggttcactttgcatggaaggagaaatggccacatgtgtggttatatactgattcatgggctgtatccagtggttcggctggatggtcaggaacttggaagaagcatgattggaaaattggtgacaaagaaatttggagaagagccagctacctggtggcagattatattggacctcttccatcatggaaagggcagagatttgtcctcactggaatagacacttactctggatatgggtttgcctatcctgcatgcaatgcttctgccaagactaccatccgtggattcatggaatgccttatccaccatcatggtattccacacagcattgcctctgaccaaggcactcacttcatggctaaagaagtgcagcagtgggctcattctcatggaattcaccggtcttatcatgttctccatcacccagaagcagctggattgatagaacgatggaatggccttttgaagtga

SEQ ID NO: 4457 - DNA, 744 bp, Homo sapiens
  SIMILAR (136)..(588): 961254mologous to Homo sapiens putative p150,accession number U93563,Smith-Waterman Score=724.
atgcgtaaggagaaaataccgcatcaggcgccattcgccattcaggctgcgcaactgttgggaagggcgatcggtgcgggcctcttcgctattacgccagctggcgaaagggggatgtgctgcaaggcgattaagttggtgttggaagttctggccagggcaattaggcaggagaaggaaataaagggtattcaattaggaaaagaggaagtcaaattgtccctgtttgcagatgacatgactgtatatctagaaaaccccattgtctcagctcaaaatctccttaagctgataagcaacttcagcaaagtctcaggatacaaaatcaatgtacaaaaatcacaagcattcttatacaccaataacagacaaacagagagccaaatcatgagtgaactcctattcacaattgcttcaaagagaataaaatacctaggaatccaacttacaagggatgtgaaggacctcttcaaggagaactacaaaccactgctcaatgaaataaaagaggatacaaagaaatggaagaacattccatgctcatggctaggaagaatcaatatcgtgaaaatggccatactgcccaagcggtgcctggacccagttcgcacgggaggaagtaggaggcagaatcccctttgggccacagaaagtaacgatctggactcggttcgggccgtgaaagggagggatgcagacctagttgggaccgcagaaaggaaggatcgagaaatccttcagacg

SEQ ID NO: 4458 - DNA, 2241 bp, Homo sapiens; identical to SEQ ID NO: 2293
  SIMILAR (865)..(2085): 961254mologous to Homo sapiens unknown protein,accession number M22333,Smith-Waterman Score=2000.

SEQ ID NO: 4459 - DNA, 2629 bp, Homo sapiens
  SIMILAR (793)..(2388): 931254mologous to Homo sapiens putative p150,accession number U93564,Smith-Waterman Score=2624.
atgaaatctgggcaccctgaaaaagaacaggataacagcgatgttcaggaaacaagggagataaccataaggggcctgctgtgcactgctctgatgaggcattccactggggcaattgcctacctgggagtgctctcaggatctgcttcactcaagctggctggagtccccctcagatgctgtgagggtgacaaagatgcagggcacccactggaaacacagacggcactctgcgaaagaggaaggggcgccaggagcttggttggcaacaccatcatgacatcacaacctgttcccaatgagaccatcatagtgctcccatcaaatgtcatcaacttctcccaagcagagaaacccgaacccaccaaccaggggcaggatagcctgaagaaacatctacacgcagaaatcaaagttattggggtaaatctaattcagaacgtgttggagaggggttgggggaagtgccaagagatgatatatgtcttgggactggacatctgtcgacccttttttgtgagtagagtttctgaggagggcaggatggggcaaagaggggaggaagatgccaatagcttagacttcccacctgccagcttgctatgtttgatctgccaggagcaaggagtcaacggtgaatcttgttctcctgtcggaatgtatcacagagaaattgtgcctgtttatgaggttctttcggtgataactggccttcaaattcaggttttcagtggcaaggaagctgacagtgttataaagcggtctattggttggggtccattctttaagcccagaaccaaagacaaaaaccacatgattatctcaatagatgcagaaaaggcctttgacaaaattcaacaacacttcatgctaaaaactctcagtaaattaggtattgatgggacgtatctcaaaataataagagctatctatgacaaacccacagccaatatcatactgaatgggcaaaaactggaagcattccctttgaaaactggcacaagacaaggatgccccctctcaccactcctattcaacatagtgttggaagttctggccagggcaattaggcaggagaaggaaataaagggtattcaattaggaaaagaggaagtcaaattgtccctgtttgcagatgacatgattgtatatctagaaaaccccattgtctcagaccaaaatctccttaagctgatcagcaacttcagcaaagtctcaggatacaaaatcaatgtacaaaaatcacaagcattcttatacaccaataacagacaaacagagagccaaatcatgagtgaactcccattcacaattgcttcaaagagaataaaatacctaggaatccaacttacaagggatgtgaaggacctcttcaaggagaactacaaaccactgctcaatgaaataaaagaggatacaaacaaatggaagaacattccatgctcatgggtaggaagaatcaatatcgtgaaaatggccatactgcccaaggtaatttatagattcaatgccatccccatcaagctaccaatgactttcttcacagaactggaaaaaactaccttaaagttcatatggtaccaaaaaagagcccgcatcaccaagtcaatcctaagccaaaggaacaaagctggagacatcacgctacctgacttcaaactatactacaaggctacagtaaacaaaacagcatggtactggcaccaaaacagacatatagatcaatggaacagaacaaagccctcagaaataacgctgcatatctacaactatctgttctttgacaaccctgacaaaaacaagaaatggggaaaggattccctatttaataaatggtgctgggaaaactggctagccatatgtagaaagctgaaactggatcccttccttacaccttatacaaaaattaattcaagatggattaaagacttaaacattagacctaaaaccataaaaaccctagaagaaaacctaggcattaccattcaggacataggcatgggcaagtacttcatgactaaaacaccaaaagcaatggcaacaaaagccaaaattgacaaatgggatctaattaaactaaagagcttctgcacaggcaaagaaactaccatcagagtgaacaggcaacctacaaaatgggagaaaattttcgcaacctactcatctgacaaagggctaatatccagaatctacaatgaactcaaacaaatttacaagaaaaaaacaaacaaccccatcaaaaagtgggcgaaggacatgaacagacacttctcaaaagaagacatttatgcagccaaaaaacacatgaaaaaatgctcaccatcactggccatcagagaaatgcaaatcaaaaccacaatgagataccatctcacaccaacccacttattgtcattggaattgaagaatgtctcagaggaaaagaaaaacttgaaacattatactattggaattcagacacggaccaccaggtctgatggctggggtggccgtaatggaagtcagaccacaaaaaggagcaacccagcttctgagagaacatttcagctaaagcataagttgatagatgtcacaatccaagttcttttagatttccacgcaggaacttcagagttggtgacaagaattg

SEQ ID NO: 4460 - DNA, 1785 bp, Homo sapiens
  SIMILAR (1)..(894): 971254mologous to Homo sapiens putative p150,accession number U93563,Smith-Waterman Score=1482.
atgaaggcagaaataaaaatgttctttgaaaccaacgagaacaaagacacaacataccagaatctctgggacgcattcaaagcagtgtgtagagggaaatttatagcactaaatgcccacaagagaaagcaggaaagatccaaaattgacaacctaacatcacaattaaaagaactagaaaagcaagagcaaacacattcaaaagctagcagaaggcaagaaataactaaaatcagagcagaactgaaggaaatagagacacaaaaaacccttcaaaaaatcaatgaatccaggagctggttttttgaaaggatcaacaaaattgatagaccgctagcaagactaataaagaaaaaaagagagaagaatcaaatagacacaataaaaaatgataaatgggatatcaccaccgatcccacagaaatacaaactaccatcagagaatactacaaacacctctacgcaaataaactagaaaatctagaagaaatggataaattcctcgacacatacactctcccaagactaaaccaggaagaagttgaatctctgaatagaccaataacaggatctgaaattgtggcaataatcaatagcttaccaaccaaaaagagtccaggaccagatggattcacagccgaattctaccagaggtacaaggaggaactggtaccattccttctgaaactattccaatcaataggaaaagagggaatcctccctaactcattttatgaggccagcatcattctgataccaaagccaggcagagacacaaccaaaaaagcaaattttagaccaatatccttgatgaacattgatgcaaaaatcctcaataaaatactggcaaaacgaatccagcagcacatcaaaaagcttatccaccatgatcaacatataaacaaagccaaagacaaaaaccacatgattatctcaatagatgcagaaaaagcctttgacaaaattcaacaacccttcatgctaaaaactctcaataaattaggtattgatgggacgtatttcaaaataataagagctatctatgacaaacccacagccaatatcatactgaatgggcaaaaactggaagcattccctttgaaaactggcacaagacagggatgccctctctcaccactcctattcaacatagtgttggaagttctggccagggcaattaggcaggagaaggaaataaagggtattcaattaggaaaagaggaagtcaaattgtccctgtttgcagatgacatgattgtatatctagaaaaccccattgtctcagcccaaaatctccttaagctgataagcaacttcagcaaagtctcaggatacaaaatcaatgtacaaaaatcacaagcattcttatacaccaacaacagacaaacagagagccaaatcatgagtgaactcccattcacaattgcttcaaagagaataaaatacctaggaatccaacttacaagggatgtgaaggacctcttcaaggagaactacaaaccactgctcaaggaaataaaagaggatacaaacaaatggaagaacattccatgctcatgggtaggaagaatcaatatcgtgaaaatggccatactgcccaaggtatttccagaaaacactgagggcaggagacaagagagccttctcaagggcacaggcagaaatgctgagaatcaagatacacgaggcttgaccaaaccgggagtggacaaagacaacaaagatggagaagagttgaacaaagtgaccttccggacccccaactatgagcctagattcaagtaa

SEQ ID NO: 4461 - DNA, 1415 bp, Homo sapiens
  SIMILAR (136)..(1284): 951254mologous to Homo sapiens putative p150,accession number U93572,Smith-Waterman Score=1856.
atggcagaagatgaagggaaagcaaagaccttcttcgcatggcagcttaaagaagggaagagcagagcgaagggggaagagcctcttatgaaaccatcagatcttccttgtagtataggctgcagtaaccaaaacagactaaaccaggaagaatttgaatctctgaatagaccaataacaggatctgaaattgtggcaataatcaatagcttaccaagcaaaaagagtccaggaccagatggattcacagccgaattctaccagaggtacaaggcggaactggtaccattccttctgaaactattccaatcaatagaaaaagaggaaatcctccctaactcgttttatgaggccagcatcatcctgataccaaagctggacagagacacaaccaaaaaagagaattttagaccaatatccttgatgaacattgatgcaaaaatcctcaataaaatactggcaaaccgaatccagcagcgcatcaaaaagcttatccaccatgatcgagtgggcttcatccctgggatgcaaggctggttcaatatatgcaaatcaatcaatgtaatccagcatataaacagaaccaaagacaaaaaccacatgattatctcaatagatgcagaaaaggcctttgacaaaattcaacagcccttcatgctaaaaactctcaataaattaggtattgatgggacgtatctcaaaataataagagctatctatgacaaacccacagccaatatcatactgaatgggcaaaaactggaagcattccctttgaaaactggcacaagacagggatgccctctctcaccactcctattcaacatagtgttggaagttctagccagggcaattaggcaggagaaggaaataaagggtattcaattaggaaaagaggaagtcaaattgtccctgtttgcagatgacatgattgtatatctagaaaaccccattgtctcagcccaaaatctccttcagctgataagcaacttcagcaaagtctcaggatacaaaatcaatgtacaaaaatcacaagcattcttatacaccaacaacagacaaacagagagccaaatcatgagtgaactcccagtcacaattgcttcaaagagaataaaatacttaggaatccaacttacaagggatgtgaaggacctcttcaaggagaactacaaaccactgctcaatgaaataaaagaggatacaaacaaatggaagaacattccatgctcatgggtaggaagaatcaatatcgtgaaaatggccacactgcccaaggtccttctatatgatccactctttgactggaccatgaatcctttgaaagctttgtatttacagcagaggccggaagatgaaactgagcttcaccctactctgaatgcagatgaccaagaatgcaaacgaaatctcag

SEQ ID NO: 4462 - DNA, 3328 bp, Homo sapiens
  SIMILAR (1753)..(3159): 951254mologous to Homo sapiens putative p150,accession number U93568,Smith-Waterman Score=2438.
atgggagactttaacaccccactgtcaacattagacagatcaacgagacagaaagtcaacaaggatacccaggaattgaacttagctctgcaccaagcggacctaatagacatctacagaactctccaccccaaatcaacagaatatacatttttttcagcaccacaccacacctattccaaaattgaccgcatagttggaagtaaagctctcctcagcaaatgtaaaagaacagaaattataacaaactatctctcacaccacagtgcaatcaaactagaactcaggattaagaatctcactcaaaaccgctcaactacatggaaactgaacaacctgctcctgaatgactactgggtacatagcgaaatgaaggcagaaataaagatgttctttgaaaccaacgagaacaaagacacaacataccagaatctctgggacacattcgaagcagtgtgtagagggaaatttatagcactaaatggccacaagagaaagcaggaaagatccaaaattgacaccctaacatcacaattaaaagaactagaaaagcaagagcaaacaacattcaaaagctagcagaaggcaagaaataactaaaatcagagcagaactgaaggaaatagagatacaaaaaacccttcaaaaaattaatgaatccaggagctggttttttgaaaggatcaacaaaattgatagaccactagcaagactaataaagaaaaaaagagagaagaatctaatagacgcaataaaaactgataaaggggatatcaccaccaatcccacagaaatacaaactaccatcagagaatactacaaacacctctacgcaaataaactagaaaatcgagaagaaatggataaattcctcgacacatacactctcccaagactaaacgaggaagaagtcgaatctctgaatacaccaataacaggctcagaaattgtagcaataatcaatagcttaccaaccaaaaagagtccaggaccagatggattcacagccgaattgtaccagaggtacaaggaggaactggtaccattccttctgaaactattccaatcaatagaaaaagagggaatcctccctaactcattttatgaggccagcatcattctgataccaaagccaggcagagacacaaccaaaaaagagaattttagaccaatatcgttgatgaacattgatgcaaaaatcctcaataaaatactggcaaaaggaatccagcagcacatcaaaaagcttatccaccatgatcaagtgggcttcatccctgggatgcaaggccggttcaatatacgcaaatcaataaatgtaatccagcatataaacagaaccaaagacaaaaaccacatgattatctcaatagatgcagaaaaagcctttgacaaaattcaacaaccctttatgctaaaaactctcaataaattaggtattgatgggacgtatttcaaaataataagagctatctatgacaaacccacagccagtatcatactgaatgggcaaaaactagaagcattccgtttgaaaactggcacaagacagggatgccctctctcaccactcctattcaacatagtgtttgaaattctggcccgggcaattaggcaggagaaggaaataaagggtattcaattaggaaaagaggaagtcaaattgtccctgtttgcaggcgacatgattgtatatctagaaaaccccattgtctcagcccaaaatctcccttaagctgataagcaacgtcagccaaagtctgaggatacaaaatcaatgtgcaaaaatcacaagcattcttatacaccactaacagacaaacagagagccaaatcatgagtgaactcccattcacaattgcttcaaagagaataaaatacctaggaatccaacttacaagggatgtgaaggacctcttcaaggagaactacaaaccactgctcaaggaaataaaagaggatacaaacaaatggaagaacattccatgctcatgggtaggaagaatcaatatcgtgaaaatggccatactgcccaaggtaatttatagaatcaatgccatccccatcaagctaccaatgcctttcttcacagaattggaaaaatctactttaaagttcatatggaaccaaaaaagagcccgcatcgccaagtcaatcctaagccaaaagaacaaagctggaagcatcacactacctgacttcaaactatactacaaggctacagtaaccaaaacagcatggtactggtaccaaaacagagatatagatcaatggaacagaacagagccctcagaaataacaccgcatatctacaactatctgatctttgacaaacctgagaaaaacaagcaatggggaaaggattccctatttaataaatggtgctgggaaaactggctagccatatgtagaaagctgaaactggatcccttccttacaccttatacaaaaatcaattcaagatggattaaagacttaaacgttagacctaaaaccataaaaaccctagaagaaaacctagggattaccattcaggacataggcataggcgacgacttcatgtctaaaacaccaaaaacaatggcagcaaaagacaaaatcgacaaatgggatctaattaaactaaagagcttctgcacagcaaaagaaactaccatcagagtgaacaggcaacctacaaaatgggagaaaattttcgcaacctactcttctgacaaagggctaatatccagaatctacaatgaactcaaacaaatttttaagaaaaaaacaaacaaccccatcaaaaagtgggtgaaggacatgaacagacacttctcaaaaggagacatttatgctgccaaaaaacacatgaaaaaatgctcatcatcactggccatcagagaaatgcaaatcaaaaccacaatgagataccatctcacaccagttagaatggcaatcattaaaaagtcaggaaacaacaggtgctggaggggatgtggagaaataggaacacttttacactgttggtgggactgtaaactagttcaaccattgtggaagtcagtgtggcgattcctcagggatctagaactggaaataccatttgacccagccatcccattactgggtatatacccaaaggactataaatcatgctgctataaagacacatgcacactaacttggatggagctagaagccattattctaagtgaagtactcaggaatggaaaaaccaaaaaccgtatgttctcacttataagtgggaaccaagatacgggtatgcaaaggcatacagaattctatgatggactttggcgactcagaagagggagggttgaggggg

SEQ ID NO: 4463 - DNA, 593 bp, Homo sapiens
  SIMILAR (349)..(591): 1001254mologous to Homo sapiens ribosomal protein L12,accession number L06505,Smith-Waterman Score=408.
tttcgtgctcggaggaggccaaggtgcaacttccttcggtcgtcccgaatccgggttcatccgacaccagccgcctccaccatgccgccgaagttcgaccccaacgagatcaaagtcggtgcgtgctctggttgtggccggggctgcgggatggagcatccctcggccccgccgcgcgtgcaaagctttccccgtatggggctcttaaagccgctgcctcccagagaccttcccggtgttgcgccgccccggccaggcctcagcctttctgggccttagcttcttcacgtgtaggtggggagggaggactggaccacctgtggcggcttgggagcccgcacgccctaggtatacctgaggtgcaccggaggtgaagtcggtgccacttctgccctggcccccaagatcggccccctgggtctgtctccaaaaaaagttggtgatgacattgccaaggcaacgggtgactggaagggcctgaggattacagtgaaactgaccattcagaacagacaggcccagattgaggtggtgccttctgcctctgccctgatcatcaaagccctcaaggaaccaccaagagacagaaagaa

SEQ ID NO: 4464 - DNA, 2530 bp, Homo sapiens
  SIMILAR (46)..(1665): 871254mologous to Homo sapiens putative p150,accession number U93565,Smith-Waterman Score=2434.
atgagaacaaagacacaacataccagaatctctgggacgcattcaaagccagtgtgtagagggaaatttatagcactaaatgcccacaagagaaagcaggaaaaatccaaaattgacaccctaacatcacaattaaaagaactagaaaagcaagagcaaacacattcaaaagctagcagaaggcaagaaataactaaaatcagagcagaactgaaggaaatagacacacaaaaaacccttcaaaaaataaatgaatccaggagctggttttttgaaaggatcaacaaaattgatagaccactagcaagactaataaagaaaaaaagagagaagaatcaaacagacacaataaaaaattgtaaaggggatatcaccactgatcccacagaaatacaaactaccatcagagaatactacaaacacctctacgcaaataaactagaaaatctagaagaaatggataaattcctcaacacatacactctcccaagactaaaccaggaagaagttgaatctctgaatagaccaataacaggagctgaaattgtggcaataatcagtagtttaccaaccaaagagtccaggaccggatggattcacagccgaattctaccagaggtacaaggaggaactgaaaaagagggaatcctccctaactcattttatgaggccagcatcattctgataccaaagccgggcagagacgcaaccaaaaaagagaattttagaccaatatccttgatgaacattgatgcaaaaatcctcaataaaatactggcaaaacgaatccagcagcacatcaaaaagcttatccaccatgatcaagtgggcttcatccctgggatgcaaggctggttcaatatacgcaaatcaataaatgtaatccagcatataaacagaaccaaagacaaaaaccacatgattatctcaattgatgcagaaaaagcctttgacaaaattcaacaacgcttcctgctaaaaactctcaataaattaggtattgatgggacatatttcaaaataataagagctatctatgataaacccacagccaatatcatactgaatgggcaaaaactggaagcattccctttgaaaactggcacaagacagggatgccctctctcaccgctcctattcaacatagtgttggaagttctggccagggcaattaggcaggagaaggaaataaagggtattcaattaggaaaagaggaagtcaaattgtccctgtttgcagatgacatgattgtatatctagaaaaccccattgtctcagcccaaaatctccttaagctgataagcaatttcagcaaagtctcaggatacaaaatcaatgtacaaaaatcacaagcattcttatacaccaacaacacacaaacagagagccaaatcatgagtgaactcccattcacaattgcttcaaagagaataaaatacctaggaatccaacttacaagggatgtgaaggacctcttcaaggagaactacaaaccactgctcaaggaaataaaagacgatacaaacaaatggaagaacattccatgctcatgggtaggaagaatcaatatcgtgaaaatggccatactgcccaagctaccaatgactttcttcacagaattggaaaaaaactactttaaagttcatatggaaccaaaaaagagcctgcatcgccaagtcaatcctaagccaaaagaacaaagctggaggcatcacactacctgacttcaaactatactacaaggctacagtaaccaaaacagcatggtactggtaccaaaacagagatatagatcaatggaacagaacagagccctcagaaataatgccacctatctacaactatctgatctttgacaaacctgagaaaaacaagcaatggggaaaggattccctatttaataaatggtgctgggaaaactggctagccatatgtagaaagctgaaactggatcccttccttacaccttatacaaaaatcaattcaagatggattaaagacttaaatgttagacctaaaaccataaaaaccctagaagaaaacctaggcattaccattcaggacataggcttgggcaaggacttcatgtctaaaacaccaaaagcaatggcaacaaaagccaaaattgacaaatgggatctaattaaactaaagagcttctgtgcagaaaaagaaactaccatcagagtgaacaggcaacctacaaaatgggagaaaatttttgcaacttactcatctgacaaagggctaatatccagaatctacaatgaactcaaacagatttacaagaaaaaaacaaacaaccccatcaaaaagtgggtgaaggacatgaacagacacttctcaaaagaagacatttatgcagccaaaagacacatgaaaaaatgctcatcatcactggccatcagagaaatgcaaatcaaaaccacaatgagataccatctcacaccagttagaatggcaatcattaaaaagtcaggaaacaacagtttcaggtacgtctttatcagcagcatgaaaatgaactaa

SEQ ID NO: 4465 - DNA, 5401 bp, Homo sapiens
  SIMILAR (2451)..(4049): 591254mologous to Mus musculus reverse transcriptase,accession number D84391,Smith-Waterman Score=1867.
atggggaaaaaacagaacagaaaaactggaaactctaaaaagcagagcgcctctcctcctccaaaggaacgcagttcctcaccagcaacggaacaaagctggatggagaatgactttgacgagatgagagaagaaggcttcagacgatcaaattactctgagctacgggaggacattcaaaccaaaggcaaagaagttgaaaactttgaaaaaaatttagaagaatgtataactagaataaccaatacagagaagtgcttaaaggagctgatggagctgaaaaccaaggctcgagaactacgtgaagaatgcagaagcctcaggagccgatgcgatcaactggaagaaagggtatcagtgatggaagatgaaatgaatgaaatgaatgatggggagaatggaaccaagttggaaaacactctgcaggatattatccaggagaacttccccaatctagcaaggcaggccaacgttcagattcaggaaatacagagaacgccacaaagatactcctcgagaagagcaactccaagacacataattgtcagattcaccaaagtggaaatgaaggaaaaaatgttaagggcagccagagagaaagactttaaaccaacaaagatcaaaagagaaaaagaaggccattacataatggtaaagggatcaattcaacaagaagagctaactatcctaaaaatatatgcacccaatacaggagcaccaagattcacaaagcaagtcctgagtgacctacaaagagacttagactcccacacattaataatgggagactttaacaccccactgtcaacattagacacatcaacgagacagaaagtcaagaaggatacccaggaattgaactcagctctgcaccaagcggacctaatagacatctacagagctctccaccccaaatcaacagaatatacatttttttcagcaccacaccacacctattccaaaattgaccacatagttggaagtaaagctctcctcagcaaatgtaaaagaacagaaattataacaaactatctctcagaccacagtgcaatcaaactagaactcaggattaagaatctcactcaaaaccactcaactacatggaaactgaacaacctgctcctgaatgactactgggtacataacgaagtgaaggcagaaataaaggtgttctttgaaacgaaggagaacaaagacacaacataccagaatctctgggacgcattcaaagcagtgtgtagagggaaatttatagcactaaatgcccacaagagaaagcaggaaagatccaaaattgacaccctaacatcacaattaaaagaactagaaaagcaagagcaaacacattcaaaagctagcagaaggcaagaaataactaatatcagagcagaactgaaggaaatagagacacaaaaaacccttcaaaaaattaatgaatccaggagctgaaatacaaactaccatcagggaatactacaaacacctctatgcaaataaactagaaaatctagaagaaatggataaattcctggacacatacactctcccaagactaaaccaggaagaagttgaatccctgaatagaccaataacaggctctgaaattgtggcaataatcaatagcttaccaaccaaaaagattccaggaccagatggattcacagccgaattctaccagaggtacaaggaggaactggtaccattccttctgaaactattccaatcaatagaaaaagagggaatcctccctaactcattttatgaggccagcatcattctgataccaaagccaggcagagacacaacaaaaaaagagaattttagaccaatatccttgatgaacattgatgcaaaaatcctcaataaaatactagcaaaacgaatccagcagcacatcaaaaagcttatcccccatgatcaagtgggcttcatccctgggatgcaaggctggttcaatatacgcaaatcaataaatgtaatccagcatataaacagagcaaaagacaaaaaccacatgattatctcaatagatgcagaaaaagcctttgacaaaattcaacaacccttcatgctaaaaactctcaataaattaggtattgatgggacgtatttcaaaataataagagctatctatgacaaacccacagccaatatcatactgaatgggcaaaaactggaagcattccctttgaaaactggcacaagacagggatgccctctctcaccactcctattcaacatagtgttggaagttctggccagggcaattaggcaggagaaggaaataaagggtattcaattaggaaaagaggaagtcaaattgtccctgtttgcagatgacatgattatatatctagaaaaccccattgtctcagcccaaaatctccttaagctgataagcaacttcagcaaagtctcaggatacaaaatcaatgtacaaaaatcaccaagcattcctatacaccaacaacagacaaacagagagccaaatcatgagtgaactcccattcacacttactacaacaagaataaaatacctaggaatccaacttacaagggatgtgaaggacctcttcacggagaactacaaaccactgctcaatgaaataaaagaggatacaaacaaatggaagaacattccatgctcatgggtaggaagaatcaatatcgtgaaaatggccatactgcccaaggtaatttatagattcaatgccatccccatcaagctaccaatgactttcttcacagaattggaaaaaactactttaaagttcatatggaaccaaaaaagggcccgcattgccaaggcaatccgaagccaaaagaacaaatctggaggcatcacactacctgacttcaaactatactacaaggctacagtaaccaaaacagcatggtactggtaccaaaacagagatatagatcaatggaacagaacagagccctcagaaataacgccgcatatctacaactatctgatctttgacaaacctgagaaaaatgagcaatggggaaaggattccctatttaataaatggtgctgggaaaactggctagccatatgtagaaagctgaaactggatcctttccttacaccttatacaaaaatcaattcaagatggattaaagacttaatcgttagacctaaaaccataaaaaccctagaagaaaacctaggcattaccattcaggacataggcatgggcaaggacttcatgtctaaaacaccaaaagcaatggcaacaaaagccaaaattgacaaatgggatctaattaaactaaagagcttctgcacagcaaaagaaactaccatcagagtgaacaggcaacctacaaaatgggagaaaactttcgcaacctactcatctgacaaagggctaatatccagaatctacaatgaactcaaacaaatttacaagaaaaaaacaaacaaccccatcaaaaagtgggcgaaggacatgaacagacacttctcaaaagaagacatttatgcagccaaaaaacacatgaaaaaatgctcaccatcactggccatcagagaaatgcaaatcaaaaccacaatgagataccatctcacaccagttagaatggcaatcattaaaaagtcaggaaacaacaggtgctggagaggatgtggagaaataggaacacttttacactgttggtgggactgtaaactagttcaaccgttgtggaagtcagtgtggcgattcctcagggatctagaaccagaaataccatttgacccagccatcccattactgggtatatacccaaaggactctaaatcatgctgctataaagacacatgcacacgtatgtttattgcggcattattcacaatagcaaagacttggaaccaacccaaatgtccaacaatgatagactggattaagaaaatgtggcacatatacaccatggaatactatgcagccataaaaaatgatgagttcgtgtcctttgtagggacatggatgaaattggaaatcatcattcttagtaaactatcgcaagaacaaaaaaccaaacactgcatattctcactcatagtgaggaaactgtggctcaggaagatgatgtgcctttgacaaggtcatggttgctgaaagcactcaagccccaagaggttcagagcagagccaagtcccctgatggccagtacaaagaggaggagaaagagaaggacagcagagggtgctctctgctggatttccccagcatgccagcttcccactgtgcagataaagcaaaatctgataggagcggggaggaagtgggctcaggctccaggagtacaagttggtatgcaagcaagtcattccaaacgccgcctccacacaaaccctctgagctgcaaattattaacctgcttaactctattgcagaaacaagcgctgctggggtgttggaagttctggccagggcaattaggcaggagaaggaaataaagggtattcaattaggaaaagaggaattcaaattgtccctgtttgcagatgacatgattgtatatctagaaaaccccattgtctcagcccaaaatctccttaagctgataagcaacttcagcaaagtctcaggatacaaaatcaatgtacaaaaatcacaagcattcttatacaccaataacagacaaacagagagccaaatcatgagtgaactcccattcacaattgcttcaaagagaataaaatacctaggaatccaacttacaagggatctgaaggacctcttcaaggagaactacaaaccactgctcaatgaaataaaagaggatacaaacaaatggaagaacattccatgctcatgggtaggaagaatcaatatcgtgaaaatggccatactgcccaagagggacgtgactgcaaattgtccaggttcttggcgttttgaacaaagaattggacaaaacacgcagcaaagaaagaatgaagcaacaaaagaacgaaagcagctctctcggctttcggctcggaggaggccaaggtgcaactttcttcggtcgtctcgaatccgggttcatccgacaccagccgcctccaccatgccgccgaagttccaccccaatgagatcaaagtcgtatacttcacgtgcactggagttgaagtcggtgccacttctgctctggcccccaagattggccccgcgggtctgtctccaaaagaggttggtgatgacattgccaaggtaacgggtgactggaagggcctgaggattacagtgaaactgaccattcagaacagacaggcccagattgaagtggtaccttctgcctccgccctgatcatcaaaaggaactaccaagagacagaaagaaacagaaaaacattaaacacagggggaatatcactttttatgagatcgtcaacattgctcgacagatgcagcactgatccttag

SEQ ID NO: 4466 - DNA, 6029 bp, Homo sapiens
  SIMILAR (3962)..(5158): 751254mologous to Homo sapiens putative p150,accession number U93574,Smith-Waterman Score=1500.
atgaacattgatgcaaaaatcctcaataaaatactgccaaaccaaatccagcagcacatcaaaaagcttatccaccatgatcaagtgggcttcatccctgggatgcaaggctggttcaatatacgcaaatcaataaatgtaatccagcatataaacagagccaaagacaaaaaccacatgattatcttaatagatgcagaaaagtcctttgacaaaattcaacaacccttcatgctaaaaactctcaataaattaggtattgatgggacgtatttcaaaataataagagctatctatgacaaacccacagccaatatcatactgaatgggcaaaaactggaagtattcactttgaaaactggcacaagacaaggatgccctctctcaccactcctattcaacatagtgttggaagttctggccagggcaattaggcaggagaaggaaataaagggtattcaattaggaaaagaggaagtcaaattgtccctgtttgcagacgacatgattgtatatctagaaaaccccattgtctcagcccaaaatctccttaagcagataagcaacttcagcaaaatctcaggatacaaaatcaatgtacaaaaatcacaagcattcttatacaccaacaacagacaaacagagagccaaatcatgagtgaaatcccattcacaattgctttaaagagaataaaatacctaggaatccaacttacaagggatgtgaaggacctcttcaaggagaactacaaaccactgctcaatgaaataaaagaggataaaaacaaatggaagaacattccatgctcatgggtaggaagaatcaatatcatgaaaatggccatactgcccaagaaagaagttcttcagatgcgaggtttcaacaaaaccactgtggttacacagttcatcctggtgggtttctccagcctgggggagctccagctgctgctttttgtcatctttcttctcctatacttgacaatcctggtggccaatgtgaccatcatggccgttattcgcttcagctggactctccacactcccatgtatggctttctattcatcctttcattttctgagtcctgctacacttttgtcatcatccctcagctgctggtccacctgctctcagacaccaagaccatctccttcatggcctgtgccacccagctgttctttttccttggctttgcttgcaccaactgcctcctcattgctgtgatgggatatgatcgctatgtagcaatttgtcaccctctgagggacatggatgaagctggaaaccatcattctcaggaaactattgcaaggacagaaaaccaaacactgcatgttctcactcataggtgggaattgaacattgagaacacatggacacaggaaggggaacatcacacactgggacctgttggaagtgttggaagttctggccagggcaatcaggcaagagaaagaaataaagatattcaattaggaaaagaggaagtcaaattggccctgtttgcagacaacatgattgtatatttagaaaaccccatcatctcagcccaaaatctccttaagctgataagcaacttcagcaaagtctcaggatacaaaatcaatgtacaaaaatcacaagcattcttatacatcaataagagacaaacagagatccaaatcatgagtgaactcccattcacaactgcttcaaagagaataaaatacctaggaacccaaattacaagggatgtgaaggacctcttcaaggaggactacaaacaactgctcaacaaaataaaagaggacacaaacaaattgaagaacattccatgctcatggataggaagaatcaatatcatgaaaatggccatactgcctaagcctaactgggaggcaccacccagtaggggcagactgacacctcacacggccaggtacccctctgagacaaagattccagaggaacaatcaggcagcaacatttgctgttcagcaatattcacggttctgcagcctccgctgctgatacccaggcaaacaaggtctcgagtggacctccagcaaactccaacagacctgcagctgaggctcctgactgttagaaggaaaactaacaaacagaaaggacaaccacaccaaaagcccatctgtacgtcaccatcatcaaagaccaaaggagaactacgtgatgaatgcacaagcttcagtagccgatttgatcaactggaagaaagggtatcagtgactgaagatcaaatgaatgaaatgaagcgagaagagaagtttagagaaaaaagaataaaaagaaacgaacaaagcctccaagaaatgtgggactatgtgaaaagaccaaatctacgtctcattgatgtacctgaaagtgacagggagaatggaaccaagttggaaaacactctgcaggacattatcctggagaacttccccaatctagcaaggcaggccaacattcaaattcaggaaatacagagaatgccacaaagatactcctcaagaagagcaactacaagaaacctaattgtcagattcaccaaagttgaaatgaaggaaaaaatgttaagggcagccagagagaaaggtcgggttacccacaaagggaagcccatcagactaacagcagatctcttggcagaaactctgcaagccagaagagagtgggggccaatattcaacattcttaaagaaaagaattttcaacccagaatttcatatccagcaaaactaagcttcataagtgaaggagaaataaaatactttacagagaagcaaatgctgagagattttgtcaccactagccctgccctagaagagctcctgaaggaagcactaaacatggaaaggaacaaccgaacaacaagacagaaagttaacaaggatatccaggaattgaattcagctctgcaccaagcagacctaatagacatctccagaactctccaccccaaatcaacagaatatacattcttctcagcaccacatcacacttattccaaaattgaccacatagttggaagtaaagcactcctcagcaaatgtaaaagaacagaaattataacaaagtgtctctcagaccacagtgcaatcaaactagaactcaggattaagaaactcactcaaaactgcacaactacatggaaactgaacaacctgctcctgaatgactactgggtacaaaatgaaatgaaggcagaaataaagatgttctttgaaaacaatgagaacaaagatacaacataccagaatctctgggacacatttaaagcagtgtgtagagggaaatttatagcactaaatgcccacaagagaaagcagaaaagatctaaaactgacaccctaacatcacaattaaaagaactagaaaagcaagagcaaacacattcaaaagctagcagaaggcaagaaataactaaaatcagagcagaactgaaggaaatagagacacaaaaaacccttcaaaaagttaatgaatccaggagctggtgttttgataggatcaacaaaattgatagaccgctagcaagactaataaagaagaaaagagagaagaatcaaatagacgcaataaaaaatggtaaaggggatgtcaccaccaatcccacagaaatacaaactaccatcagagaatactacaaacacctctacgcaaataaactagaaaatctagaagaaatggataaattcctcgacacatacaccctcccaagactaaaccaggaagaagttgaatctctgaatagaccaataacaggctctgaaattgtggcaataatcagtatagcataccaaccaaaaaaagtccaggaccagatggatccacagccgaattctaccagagtgttggaagttctggccagggcaattaggcaggagaaggaaataaagggtattcaattaggaaaagaggaagtcaaatttgtcccctctttgcagatgacatgattgtatatgtagaaaacccccttccgtctcagccccaaaatcttctttaaggctggttaagcaacttcagcaaaagtcttcaggttacaaaatcaatgtgcaaaaatcacaagcattcttatacaccaacaacagacaaagagagagccaactcatgagtgaactcccattctgttattgcttcaaagagaataaaatacctaggaatccaacttacaagggatgtgaaggacctcctcaaggagaactacaaaccactgctcaaccgaaataaaagaggacacaaacaaatggaagaacattccatgctcatggataggaagaatcaatattgtgaaaaatggccatactggccatactgcccaaggtaatttacagattcaatgccatccccatcaagctaccaatgactttcttcacagaattggaaaaaactactttaaagttaatatggaaccaaaaaagagcccgcatcgccaagtcaatcctaagccaaaagaacaaagctggaggcatcacactacctgacttcaaactatactacaaggctacagtaaccaaaacagcatgttacggtactggtaccaaaacagcatggtactggtaccaaaacagagatatagatcaatggaacagaacagagccctcagaaataacgccgcatgtctacaactatctgatctttgacaaacctgacaaaaacaagcaatggggaaaggattccctatttaataaacggtgctgggaaaactggcgtgccatatgtacaaagctgaaactggatcccttccttacaccttatacaaaaattaattcaagatggattaaagacttaaacgttagacctaaaaccgtaacaaccctagaagaaaacctaggcattaccattcaggacataggcatgggcaaggacttcatgtctaaaacaccaaaagcaatggcaacaaaagccaaaattgacaaatgggatctgattaaactaaagagcttctgcacagcaaaagaaactaccatcagagtgaatgggcaacctacaaaatgggagaaaatttttgcaacctactcatctgacaaagggctaatatccagaatctacaatgaactcaaagaaatttacaagaaaaaaacaaacaaccccatcaaaaagtgggtgaaggatatgaacagacacttctcaaaagaagacatttatgcagccaaaaaaacacatgaaaaaatgctcaccatcaatggccatcagagaaatgcaaatcaaaaccacaatgagttatcatctcacaccagttagaatggcgatcattaaaaagtcaggaaacaacagtacgtttgactttggacaacatgagtttgaactacacaggtccacttatacgcggattgttttcagtaaaattacaccaatattggaagttctggccagggcaattaggcaggagaaggaaataaagggtattcaattaggaaaagaggaagtcaaattgtccctgtttgcagatgacatgattgtatatctagaaaaccccattgtctcagcccaaaatctcctcaagctgataggcaacttcagcaaagtctcaggatacaaaatcaatgtacaaaaatcacaagcattcttatacaccaataacagacaaacagagagccaaatcatgagtgaactcccattcacaattgcttcaaagagaataaaatacctaggaatccaacttacaagggacgtgaaggacctcttcaaggagaactacaaaccactgctcaatgaaataaaagaggatacaaacaaatggaagaacattccatgctcatgggtaggaagaatcaatattgtgaaaatggccatactgcccaaggtctctgagtctctcagaagagagggtagctcctctctgcagctggtcatcccacagtctgtctgtcctctgctctggctgagccccaggcttattatggacctcacaggggaggaagtgcatgccaatcagtccctgggcagccataggcaggcctggaagaggaaccacatgtccccacttaggtcctcaggactggcagctcagcccccagcctttaggccctacctggcctga

SEQ ID NO: 4467 - DNA, 3423 bp, Homo sapiens
  SIMILAR (1)..(909): 951254mologous to Homo sapiens putative p150,accession number U93565,Smith-Waterman Score=1473.
atggtaaagggatcaattcaacaagaagagctaactatcctaaatatacatgcacccaatacaggagcacccagattcataaagcaagtcctgagtgacctacaaagagacttagactcccacaccttaataatgggagattttaacaccccactgtcaacattagacagatcaacgagacagaaagtcaacaagtatacccaggaattgaactcagctctgcaccaagcggacctaatagacatctacagaactctccaccccaaatcaacagaatatacaattttttcagcaccccaccacacctattccaaaattgaccacatacttggaagtaaagctctcctcagcaaatgtaaaagaacagaaattataacaaactatctctcagaccacagtgcaatcaaactagaactcaggattaagaatctcactcaaaaccgctcaactacatggaaactgaacaacctgctcctgaatgactactgggtacataaggaaatgaaggcagaaataaagatgttctttgaaaccaatgagaacaaagacacaacataccagaatctctgggatgcattcaaagcagtgtgtagagggaaatttatagcactaactgcccacaagagaaagcaggaaagatccaaaactgacaccctaacatcacaattaaaggaactagaaaagcaagagcaaacacattcaaaagctagcagaaggcaagaaataactaaaatcagagcagaactgaaggaaatagagacacaaaaaactcttcaaaaaattaatgaatcaaggagctcgttttttgaaaggatcaacaaaattgatagaccgctagcaagactaataaagaaaaaaagagagaagaatcaaatagacacaataaaaattgataaaggggatatcaccaaccgatcccacagaaatacacactaccatcagagaatactataaaaacctctacgcaaagaaactagaaaatctagaagaaatggataaattcctggagacatacaccctcccaagaccaaaccaggaagaagttgaatctctgaatagaccaataacaggatctgaaattgtggcaataatcaatagcttaccaaccaaaaagagtccaggaccagatggattcacagccgaattctaccagaggtacaaggaggaactggtaccattccttctgaaactattccaatcaatagaaaaagaaggaatcctccctaactcatttgatgaggccagcatcatcctgataccaaagctgggcagagacacaaccaaaaaagagaattttagaccaatacccttgatgaacactgatgcaaaaatcctcaataaaatactggcaaaccgaatccagcagcacatcaaaaagcttatccaccatgatcaagtgggcttcatccctgggatgcaaggctggttcaatgtacgcaaatcgataaatgtaatccagcatataaacagaaccaacgacaaaaaccacatgattatctcaatagatggagaaaaggcctttgacaaaattcaacaacccttcatgctaaaaactctcaataaattcggtattgatgggacatatatttcaaaataataagagctatccatgacaaacccacagccaatatcatactgaatggggccaaaaactggaagcattcccctttgaaaaactggcacaagaacagggatgcccctctctcacccactccctattcaacatagtgttggaagttctggcccgggcaattaggcaggataaggaaataaagggtattcaattaggaaaagaggaagtcaaattgtccctgtttgcagacgacatgactgtatgtatagaaaaccccattgtctcagcccaaaatctccttaagctgataagcaacttcagcaaagtctcaggatacaaaatcaatgtacaaaaatcacaagcattcttatacaccgataacagacaaacagagagccaaatcatgagtgaactcccatttcacaattgcttccaagagaattaaatacctaggaatccaccttacaagggacgtgaaggacctcttcaaggagaactacaaactactcactgatcaaggaaataagagaggacacaaacaaatggaaaaacattccatgctcatggataggaagaatgaatatcatgaaaatggccatactgcccaaggtaaatttatagattcaatgccatccccatcaagctaccaatgactgttttcacagattcggaaagcactactttaaagttcatatggaaccaaaaaagagcccacatcgccaagtcaatcctaggccaaaagaacaaagctggaggcatcacactacctgacttcaaactatactacaaggctacagtaaccaaaacagcatggtactggtaccaaaacagagatatagatgaatggaacagaatagagccctcagaaataatgccgcatatctacaactatctgatctttgacaaacctgagaaaaacaagcaatggggaaaaggattccctatttaataaatggtgctgggaaaactggctagccatatgtagaaagctgaaactggatcccttccttacaccttatacaaaaatcaattcaagatggattaaagacctaaacgttagacctaaaaccataaaaaccctagaagataacctaggcattaccattcagtacacaggcatgggcaaggacttcgtgtctaaaacaccaaaaacaatggcaacaaaagccaaaattgacaaatgggatctaattaaactaaagagcttctgcacagcaaaagaaactaccatcagagtgaacaggcaacctacacaatgggagaaaatttttgcaacctactcatctgacaaagggctaatatccagaatctacaatgaactcaaacaaatttacaagaaaaaaacaaacaaccccatcaaaaagtgggcaaaggacatgaacagaaacttctcaaaagaagacatttatgcagccaaaaaacacatgaaaaaatgctcaccatcactggccatcagagaaatgcaaatcaaaaccacaatgagatatcatctcacaccagttagaatggcaatcattaaaaagtcaggaaacaacagaacttgggaatataacatactttgttctcttgtgcctctcctgtgttccctcttgtggctgcacctgactgaccatcacctaaaagaggacagaacaaaacacttgacagctagtgataaccttgaaaaaacagaactcagcagatggaaggagagagccctactgtatgagcatcgtgtgctgagacctgctattgactcccagcacagctgtgcccccagaagaatccagggtcatctggtatgcggaagtgatctcactggtttcatggatgatgtggctgtcatcctgattgatgtctcccctttctga

SEQ ID NO: 4468 - DNA, 721 bp, Homo sapiens
  SIMILAR (378)..(500): 921254mologous to Homo sapiens 60S ribosomal protein L12,accession number AF037643,Smith-Waterman Score=198.
ccagagggcaaacccagtcttaagaatcaaattgctctcggctttcggctcggaggaggccaaggtgcaactttcttccggtcggtcccgaatccggtgtttattcgacaccagccgcctccaccatgccgccgaagttcgaccccaacgagatcaaagtcgtatacctgaggtgcaccggaggtgaagctcggtgccacttctgccctggcccccaagtatcggccccctgggtcctgtctccaaaaaaagttggtgatgacattgccaaggcaacggtgtgactggaagggcctgatgattacagtgaaactgaccattcagaacagacaggcccagattgaggtggttgctttctgcctctgccctgatcatcaaagccctcaagggaaccaccaagagacagaaagaaacagaaaaacattaaacacagtgggaatatcacttttgatgagattgtcaacattgctcgacagatgcggcaccgatccttagccagaagaactcttttgggaaccatttaaagagattcctgggggacttgcccagtcagtggggctggtaaggttgattggccgccatcctcatgacatcatcgatgacatcaacagtggtgctgtggaatgccccaccagttaagcacaaaggaaaacatttcaataaaggatcatttgacaaaggaaaaaagaaaggggggggccgtttaaaggatccctccttc

SEQ ID NO: 4469 - DNA, 1768 bp, Homo sapiens
  SIMILAR (317)..(973): 921254mologous to Homo sapiens vacuolar protein sorting,accession number AJ133421,Smith-Waterman Score=1016.
aaaagggggcgggaagggctgtagggtacttgtcaattcgccgccatgaacgtggtttttgctgtgaagcagtacatttccaaaatgatagaggacagcgggcctggtatgaaagtacttctcatggataaagagacgactggcatagtgagtatggtatacacacaatcggagattctacagaaggaagtgtacctctttgaacgcattgattctcaaaatcgagagatcatgaaacacctgaaggcaatttgttttcttcgacctacaaaggagaatgtggattatattattcaggagctccgaagacccaaatacactatatatttcatttatttcagtaatgtgatccagcaagagtgacgtggaagtcattgggctgaagctgattgaacaggaagttgtggctgaggttcaggaattttatggtgattacattgctgtgaacccacatttgttttccctcaatattttgggttgctgccagggtcgaaattgggatccagcccagctatctagaacaactcaagggcttacagctctccttttatctctgaagaagtgtcccatgattcgttatcagctctcatcagaggcagcaaagagacttgcagagtgcgttaagcaagtgataactaaagaatatgaactgtttgaattccgtcggacagaggttcctccattgctccttattttagatcgcttggatgatgccatcaccccattgctaaaccagtggacatatcaggccatggtccacgaactactaggcataaacaacaatcggattgatctttccagagtgccgggaatcagtaaagacttaagagaagtggtcctatctgctgaaaatgatgaattctatgctaataatatgtacctgaactttgctgagattggtagcaatataaagaatctcatggaagattttcagaagaagaaaccaaaagaacagcaaaaactagaatcaataggaagccatgaaggcggtttgttgagaattatccacagttcaagaaaatgtctgggactgtttcaaagcatgtgacagtggttggagaactgtctcgattggtcagtgaacggaatctgctggaggtttcagaggttgagcaagaactggcctgtcaaaatgaccattctagtgctctccagaatataaaaaggcttctgcagaaccccaaagtgacagagtttgatgctgcccgcctgggtgatgctttatgctttacattatgagcgacacagcagcaatagcctgccaggactaatgatggacctcaggaataaaggtgtttctgagaagtatcgaaagctcgtgtctgcagttgttgaatatggtggtaaacgagtcagaggaagtgacctcttcagccccaaagatgctgtggctatcaccaaacaattcctcaaaggactgaagggagtaggaaatgttttatacacagcttcaaccttttcctacatggaaaccctggatcatctcatcaaaggaaggcttaaggaaaacctatatccttatttaggccccagcacactcagagacagacctcaggatatcattgtgtttgtaattggaggagccacctatgaagaggctctaacagtttataacctgaaccgcaccactcctggagtgaggattgtcctgggaggcaccacagtgcacaacacgaaaagtttcctagaggaagttctggcttctggactgcacagccgaagcaaggagagctctcaagtcacatcaaggtcagcgagcagaagatga

SEQ ID NO: 4470 - DNA, 1338 bp, Homo sapiens
  SIMILAR (364)..(1212): 521254mologous to Homo sapiens vacuolar protein sorting 45 isoform,accession number AF165513,Smith-Waterman Score=560.
atggcccctgttacaatgatgggctataggtcaggtaaaatggggattctggctgatgtccagcttcaagtgggtccaccggggccgtggctccacctggtggtcattgccccagtccctgagtgtataactgggattggtatattcagcagttggggaagccccgatgtggggcccctgctttatgatataagagctatcatgtggggaagcctggcccctgcagaaaacacatggatcctgggaaataaccatagacgattcctagctcagctcaagccccgagtgatcatgcaggatttcagtaatgtgatcagcaagagtgacgtgaagtcattggctgaagctgatgaacaggaagttgtggctgaggttcagcaagtgataactaaagaatatgaactgtttgaattccgtcggacagaggttcctccattgctccttattttagatcgctgtgatgatgccatcaccccattgctaaaccagtggacatatcaggccatggtccacgaactactaggcataaacaacaatcggattgatctttccagagtgccgggaatcagtaaagacttaagagaagtgggtctcatctgctgaaattgatgaattctatgctaataatatgtacctgaactttgctgagattggtagcaatataaagaatctcatggaagattttcagaagaagaaaccaaaagaacagcaaaaactagaatcaatagcagacatgaaggcgtttgttgagaattatccacagttcaagaaaatgtctggggactgtttcaaaggcatgtgacagtggttgggagaactgtctcgattgggtcagtgaacggaatctggctgggaggttttcagaggttgaggcaaggaactgggcctgttcaaaatgaccattcttagtgctctccagaatattaaaaggcttctgcagaaccccaaagtgacagagtttgatgctgcccgcctggtgatgcttttatgcttttacattatgagcgacacagcagcaatagccttcccaggacttaatgatggacctcaggaattaaaggtgttttctggaggaagtattcgaaagctcgtgttctggcagttgttgaatatggtggtaaacgagtcagaggaagtgacctcttcagccccaaagatgctgtggctatcaccaaacaattcctcaaaggactgaagcagcaagaaatagtcaactgtgttctggctgctgccaatgtctacattaaacagctgcctctgagcatccaacctagtgccagcctaaatggctgcatatcactagagaagaagcctctagtttctacgcagagaaactga

SEQ ID NO: 4471 - DNA, 819 bp, Homo sapiens
  SIMILAR (731)..(781): 471254mologous to Homo sapiens Human secreted protein, SEQ ID NO: 7141,accession number G03060,Smith-Waterman Score=42.
atgaaaggctacatgcctcccccatattttgcccacagggaaattatggccaggccagcctatgggtcttggagagctcaaaccaatcaggagctgaagggatccccaacacagcacagctgctctaccaaaaagcagccagactgcttctttaagtgggcccctgatcctgttcctcctgactgggtgtgtttgggccagcaacaggtcagtacccatctgggatggaccttccagaggaaagggcaggctgccatctttgctgttttgcagccttcgctggtggtacctctaagtatggaaaaagttgagggcagggctcgggacctgcagcccgccatgcctgagcctacccccaccatgctgtgggctcctgtgccgcccgagcctccccaacaagtgccgccccctgctccacggcgcccagtcccattgaccacccaagggctgaggagtgcaggcacatggaaggtctgcagcttcactcctgaaaccagtgagaccatgaacccactgggaggaatgaacaactccagacgcaccgccttgagagctgtaacactcatcgcgaaggtccacagcttcactcctgagccagcgagaccgcaaacccaccagaaggaagaaactctgaacacatccgaacatcagaaggaacaaactccggacacgccgcctttaagaactgtaacactcatggcgagggtccgcggcttcattcttgaagtcagcgagaccaagaacccaccaattcaggacacaaaaccaagttggaaaacatatgttaggaccttatccaggagaactttcccaacctag

SEQ ID NO: 4472 - DNA, 481 bp, Homo sapiens
  SIMILAR (48)..(152): 511254mologous to Homo sapiens Human secreted protein encoded by gene 36,accession number Y36259,Smith-Waterman Score=70.
ctgtcggccagtggaaagcgactagcgcggccgctggactaaagacatgggtgtcaggctttccaggaaagggctctctaacaacccccaactctttggagttgggaccgttgatttgcctagaaacagcttcctcttttcctttacttctgggctgagccgagggttgacagagaggaaagccatgcagctctggggtcccaacaacatgttggttgacccttcctcggtcctccatgtggtctgggaggaaaactaatgtttctgctgctgcgtaggtgagtgcagctattccgatcagcagggtccagggaccgttgtgggttcttgggcaggggttgtttctgctgctgcgttggtgagcacaactattccgatcagcagggtccagggaccgttgtggattcttgggcagggggagaaacaaaataaaccaaaaccacgggcggttttgtctttcagatgggaaacactcaggcat

SEQ ID NO: 4473 - DNA, 478 bp, Homo sapiens
  SIMILAR (130)..(213): 961254mologous to Homo sapiens Human secreted protein, SEQ ID NO: 7141,accession number G03060,Smith-Waterman Score=150.
  misc_feature (1)...(478): n = a,t,c or g
tttctgggatttctgcaaccacatgatagtggctttctcttcttgaggccggcangaccacgagcccaccgggaggaaggaacaactccagacgcgtcgccttaagagctgtaacactcaccacggaacgtctgcagcttcactcctgagccagcgagaccacgaacccaccagaaggaagaaactccgaacacatccgaacatcagaaggaacaaactccggacacgccaccattaagaactgtaacactcaccgcgagggtccgaggcttcattcttgaagtcagtgagaccaagaacccaccaattccagacacacatatatgctaatcttagaaagacatggatactatctcccctctccactccatccttaaacatctcatgactattaagaatgagaaagggaccaagtggcaagagaacatcttcatatgcatacaactttctgagaaaataaaaatttgccaagttgtca

SEQ ID NO: 4474 - DNA, 373 bp, Homo sapiens
  SIMILAR (4)..(135): 881254mologous to Homo sapiens Human secreted protein, SEQ ID NO: 7102,accession number G03021,Smith-Waterman Score=203.
atgaacaacttgagacgcgctgccttaagagctgtaacactcaccgcgaaggtctgcagcttcactcctgagccagcgagaccacaaacccaccagaaggaagaaactccgaacacatctgaacatcagaaggaacaaactccggacacgccacctttaagaactgtaacactcaccgcgagggtccacggcttcattcttgaagtcagtgagaccaagaacccaccaattccggacacaccagctactagggaggctgagggcctacgttcaaggctagcagtgtactcaacaagggacagtccctgtgtggcctgttcaggatcctatacacaggctcagggctctttgggcaggaaattccaggatccgg

SEQ ID NO: 4475 - DNA, 358 bp, Homo sapiens
  SIMILAR (64)..(99): 661254mologous to Mus musculus nitric oxide synthase,accession number AF045940,Smith-Waterman Score=43.
ctgccgtttcttccttctggccttcggggtcttgctgctgaaaataagataagacggccacattcagctgggagcttccttggtcctccatgtggtctgagaggaaaactagtgtttctgctgctgcgttgatgagcacaactattccgatcagcagggtacagggactgttgcagtttctcaactcgaaatcccccatcagccgggcagaaaggtcctggagcacttttggggcgtccgccgcgtttctcacgacgctagcttcgcttttatttcttttcccccctttggcgatatcgtcacttgccaatagcttcgctaaggtgttcccccccacaccctgcgcgggcagccccat

SEQ ID NO: 4476 - DNA, 2559 bp, Homo sapiens
  SIMILAR (1)..(1080): 921254mologous to Homo sapiens putative p150,accession number U93568,Smith-Waterman Score=1701.
atgaacatcgatgcaaaaatcctcaataaaatactggcaaaccgaatccagcagcacatcaaaaagcttatccaccaggatcaagtgggcttcatccctgggatgcaaggctggttcaacatacgcaaatcaagaaacgtaatccagcatataaacagaaccaatgacaaaaaccacatgattatctcaatagatgcagaaaaggcctttgacaaaattcaacaacacttcatgctaaaaactctcaataaattaggtattgacgggatgtatctcaaaataataagagctatctatgacaaacccacagccaatatcatactgaatgggcaaaaactggaagcattccctttgaaaactggcacaagacagggatgccctctctcaccactcctattcaacatagtgttggaagttctggccagggcaatcaggcaggagaaggaaataaagggtattcaattaggaaaagaggaagtcaaattgtccctgtttgcagatgacatgattgtatatctagaaaaccccactgtctcagcccaaaatctccttaagctgataagcaacttcagcaaagtctcaggatacaaaatcaatgtggaaaaatcacaagcattcttatacaccaataacacacaaacagagagccaaatcatgagtgaactcccattcacaattgcttcaaagagaataaaatacctaggaatccaacttacaagggacgtgaaggacctcttcaaggagaactacaaaccactgttcaatgaaataaaagaggatacaaacaaatggaagagaattccatgctcatgggtaggaagaatcaatattgtgaaaatgcccatactgcccaaggtaatttatagattcaatgccatccccatcaagctaccaatgagtttcttcacagaattggaaaaaactactttaaagttcatatggaaccaaaaaagagcccacattgccaagacaatcctaagccaaaagaacaaagctggaggcttcacgctacctcacttcaaactatactacaaggctacagtaaccaaaacagcatgcccgtctttcaaaacaaaagactataatttcatcaaagctgtttgctttgcccttggtcggcttctcagaataatcacctctacagtctgcaacgtgtcttggaaatgtgggctttcccggggttgtaaagcgttacagctactgctagaaggaggcttttcagggcatgccattctgcacatggtttctgagacttttaaatcggagagggagctcaaagaccacgaaatcatacctgttaactttacaggtgaggaaaggaaggctcagaggcactgtggggagccgctgaaagattttaaacagggatgggccaacggggctctctggtctgcggcttcattcctgaagtcagtgagaccacgaacctactggaaggaagaaactccagacacatctgaacatctgaagaaaccaactccagacacatcatctttaagaactgtaacactcactgtgaggttccgcggcttcattcttgaagtcagcgagaccaagaacccaccagaaggaaccaattccagacacattttggcaaccacaaagggactattgactatcgccaagtggaggaaaactagcgtttctgctgctgcgtcagtgagcgcaactattccgatcagcagggtccagggaccgttgcgggttcttgggcaagaggtgtttctgctgcttcatcgcctccctatagctccccttcctattaatgataagcctcctctaatcttccccacccagaaggaaataaacaaagacatctccaaaggaccacaaaaccctctgggctatcagttatgtccccttcatgctatagggggaggagaatttggcgcaacctggaattggaaaaaactacttaagttcatatggaaccaaaaaagagcctacattgccaagacaatcctaagccaaaagaacaaagctggaggcttcatgctacctgacttcaaactatactacaaggctacagtaaccaaaacagcattgtactggtaccaaaagagagatatagaccaatggaacagaacagagcccttagaaataataccacacatctacaaccttctgatctttgacaaacctgacaaaaacaagaaacggggaaaggattccctacttaataaatggtgctgggaaaactggctagccatatgtagaaagctgaaactggatcctttccttacaccttatacaaaaactaattcaagatggattaaagacttaaatgttagacttaaaaccataaaaaccctagaagaaaacctaggcaataccattcaggacataggcatgggcaaggacttcatgactaaaacaccaaaagcaatggcaccaaaagcaatggcaacaaaagccaaaattgacaaatgggatctaattaacctaaaaagcttctgcacagcaaaagaaactaccatcagagtgaacaggcaacctacagaatgggagaaaatttttaccatctacccatctgacaaagggctaatatccagaatctaa

SEQ ID NO: 4477 - DNA, 1056 bp, Homo sapiens
  SIMILAR (868)..(1053): 701254mologous to Homo sapiens gag,accession number AF156961,Smith-Waterman Score=243.
atggcctccgccgcgcggcgttcaagcggccgccatactttccggcccaccacgcccggcgccgcccaaaggcgctgcgtcccagcgactctgcgggggtttcgtcgaggcccggcaggcttgggtcgggagacgcggcggccggcggggtcccgtcggggagacgcagccgccgccatcagtcatccagccgccctcccgcggggcagggctcgggaccagcagcccgccatgcctgagcctcccaccccctccgtgggctcctgtgcggcccgagcctcccagattagcgcggccccctgctccacggcgcccagtcccatcgaccacccaagggctgaggagtgccggcgcaccgtgtgggactggcaggcagctccacctgcagcccaggtgcgggatccattgggtgaagccagctgggctcctgagtctggtggagatgtggagaacctttatgtcttgctcagggattgtaaatacaccagtcagcaccctgtgtctagctcagggtctgtgaatgcaccaatcgacactctgtatctagctactctgctcagggattgtaaatacaccaatcggcactctgtatctagctcaaggtttgtaaacacaccaatcagcaccgtgtctagctcagagtttgcgaatgcaccaatcgacactctgcatctagctactctgaaggaagaaactccgaacacatctgaacatcagaaggaacaaactccggacatgccgcctttaagaactgtaacagtcacggcgagggtccgcggcttcattcttgacgtcagtgagaccaagaacccaccaattccagacacattttggcgacccagatgggaccttcgccaatcaccaagcaatcaaaccctggcgtttaatgaaaagaatgcggctttagctgcagcccaagagtttggagatacctggtatcttagtcaagtaaatgacagaatgacagccgaagaaagggacaaattcccgactggtcagcaagccatccccagtatggatccccactgggaccttgactcagatcatggggactga

SEQ ID NO: 4478 - DNA, 687 bp, Homo sapiens
  SIMILAR (22)..(687): 981254mologous to Homo sapiens unnamed protein product,accession number AK001927,Smith-Waterman Score=1131.
tacgcctagcttggcacgagggagaagatcagagctatttatgcagatctcaatcagaatgactttgccatcagcaaagaggacatgcaggagcttctctcctgtacaaacataatatttcactgtgcagccactgtacgctttgacgacactctcagacatgctgtgcaacttaacgtcactgccacccggcagctcttgcttatggctagtcagatgccaaagctggaagcctttatacatatctctactgcctattcaaattgtaacctgaagcacatcgatgaagttatctatccgtgccctgtggagccaaaaaaaatcattgattcccttgagtggttagacgatgctattattgacgagattacacccaagctgatcagagattggcccaatatttatacctacaccaaggccttgggagaaatggtggtgcagcacgagagcaggatcctgaacattgccatcataaggccctccattgtgggagcaacttggcaggagcctttcccaggttgggttgataatataaatggacctaatggaatcattattgcgactgggaaagggtttcttcgggccataaaagctactccaatggctgtggcagacgtaattccagttgatacagtcgtcaatctcatgctagctgtatgatggtatactgctgtctacagacctaag

SEQ ID NO: 4479 - DNA, 1095 bp, Homo sapiens
  SIMILAR (412)..(495): 851254mologous to Homo sapiens Human secreted protein, SEQ ID NO: 7678,accession number G03597,Smith-Waterman Score=121.
atgaaatatgaatgtgaaagtaaagatgtggtttctatgaagacaataaaaataagtttgctaaaaaaattgctgtcaaatgagtgggccttagctgccttcccgtggggcagggctcgggacccgcagcccaccatgcctgagcctccccgctgctccgtgggctcctgtgcggcccgagcctcccctacgagcgctgccccctgctccaaggcgcccagtcctatcaaccacccaagggctgaggagtgcgggcacatggcgcgggactggcaggcagctccacctgcggccccagtgcgggatccactggcttcactcctgagccagcgagaccacgaaccccaccagaaggaagaaactccgaacacatccgaacatcagaaggaaaaaactccggacacgccgcctttaagaactgtaacactcaccgtgagggtccacggcttcattcttgaagtcagtgagaccaagaacccaccaattccagacacaaaactgagaggcggaggttgcaagggttcggtctcgctggctttaggagtgaagctgcagaccttcgccgtgagtgttacagctcataaaggcagtgtggacccaaagagtgagcagcagcaagatttattgcaaagagcgaaagatcaaagcttccgcagtgtggaaggggacccgagcggcccttgggtggttgatgggactgggtgctgtggagtgggggcggcactcgttggggaggctcgggccacacaggagcccacggagcagcggggaggctcaggcatggcgggctgcaggtcccgagccctgccccatgcgaaggcagctaaggcctggcgagaaattgagcacagcagctgctggcccagagccatgtttccagatagacctctcatgctgggagtggacagtgccttatgtggcaaaagccctggtaccttgacaatcccagcccagtgcttgttgaaccaggacacccaggtgagagatgtgacacagtcttttaggtcttcctctttcacagtcactgggatccccagtcctgcagaaaaagctgtggtcacagagctaatgccggtacaaagccctgttcaatga

SEQ ID NO: 4480 - DNA, 536 bp, Homo sapiens
  SIMILAR (504)..(433): 791254mologous to Homo sapiens Human secreted protein, SEQ ID NO: 7678,accession number G03597,Smith-Waterman Score=94.
atcttcctgactcagcctctcaaatacctcaaaggactaccggagctccccatgcatcgcgcttttttctactttttcgtaagctattggtttcaccagaggtgtggtgttttttttttttcatcacttaagctttaggcccctgccaagcccttgtacctgattttataatttcctacctgtgtaattagagaaagctataaatgtgtaggcttcaaacccacaaaacctgtgtttgcctctgctcctaataaggctgtcctcaaggtaagcctttttatctcgttccaaatctctcatgtcccacgtcattaatcatacaattccctgtcagttctaattacctttgtataacacctcaagtatgttctgtgcctagaactctcaggaagtaagaaggcaaataattctgtgtctggaattggttccttctggtggattcttggtctcgctgacatcaagaatgaagccgcagaccctcgcagtgactgttacagttcttaatacagttctgaaaagtaaaaaaaaaaaaaaaa

SEQ ID NO: 4481 - DNA, 2754 bp, Homo sapiens
  SIMILAR (940)..(2733): 901254mologous to Homo sapiens dJ97P20.1 (novel gene),accession number AL031297,Smith-Waterman Score=2813.
attggttgtcattatttattttatttttatttatttatttatttttagagacacggtctgactttgttaccccggctggagtgcagtggtgcaatcatggctcactgcagccttaacctcctgggctcaagtgatcctctcgccaaggctaggataagtagctaggactacagatgcgccccatcacgcccagctaattttacaacttctgtagagatggagtgttgctgggttgcccaggctggtcttgaattcctgggctcaagcgatcctcctgtgtccggaattggtgggttcttggtctcactgacttcaagaatgaagccgcggaccctcgcggtgagtgttacagttcttaaagacagcgtgtccagagtttgttccttctgatgttcagatgtgttcagagtttcttccttctggtgggttcgtggtctcgctggcttaggggtgaagctgcagaccttcgcggtgagtgttacagctcttaaggtggtgcgtctggagttgttcattcctcccggtgggttcatggtctcgatggcttcaggagtgaagctgcagaccttcgcggtgagtgttacagctcgtaaaagcagtgtggacccaaagagtgagcagcaacaagatttattgcaaagagcgaaaggacaaagcttccacaatgtggaagcggacctgagagggttgccactgctggctgggcagcctgcttttattctcttatccggcccgacccacatcctgctgactgactcaggagcccagctggcttcacccagtggatcccgcactggggctgcaggtggagctgcctgccagtcccacgccatgtgcccgcactcctcagccctttgggtggtcgatgggactgggctccgtggagcagggggcggcgctggtcagggaggctggggtcgcacaggagcccagggagggcatttgaagacacttcgtcacccttgcttgctaagatttttatcttgtactgtggaagcggatggcattcatcttgtcactgagcgagtacagcccctggaagtggctttggaaacattgtcttctgcagaggtctgtgctgggatctatgacatattgctggctcttatcttccttcatgacagaggacacctaacacacaataatgtctgtttatcatctgtgtttgtgagtgaagatggacactggaagctaggaggaatggaaactgtttgtaaagtttctcaggccacaccagagtctccagaattcacaactctcccagagtgtcatggacatgcccgggatgccttttcatttggaacattggtggaaagtttgctcacaatcttaaatgaacagggtgagttggagttatactactgcatctatagaataagtaggaaaatcatccatgacgtattctgtgtggaattcaaaggactacagtctttgagcacagtaaggaatcttttgcttaccagaaatgattttctggaagttgtgaatttcttgaaaagtttaacattgaagagtgaagaggagaaaacggaattctttaaatttctgctggacagagtcagctgcttgtcagaggaattgatagcttcaaggttggtgcctcttctgcttaatcagttggtgtttgcagagccagtggctgttaagagttttcttccttatctgcttggccccaaaaaagatcatgcgcagggagaaactccttgcttgctctcaccagccctgttccagtcacgggtgatccccgtgcttctccagttgtttgaagttcatgaagagcatgtgcggatggtgctgctgtctcacatcgaggcctacgtggagcacttcactcaggagcagctgaagaaagtcatcttgccacaggttttgctgggcctgcgtgatactagcgattccattgtggcaattactctgcatagcctagcagtgctggtctctctgcttggaccagaggtggttgtgggaggagaacgaaccaagatcttcaaacgcactgccccaagttttactaaaaatactgacctttctctagaaggcgatccattttctcagcctattaaatttcccataaatggactctcagatgtaaaaaatacttcggaggacagtgaaaacttcccatcaagttctaaaaagtctgaggagtggcctgactggagtgaacctgaggagcctgaaaatcaaactgtcaacatacagatttggcctagagaaccttgtgatgatgtcaagtcccagtgcactaccttggatgtggaagagtcatcttgggatgactgcgagcccagcagcttagatactaaagtaaacccaggaggtggaatcactgctacaaaacctgttacctcaggggagcagaagcctattcctgctttgctttcactcactgaagagtctatgccttggaaatcaagcttaccccaaaagattagccttgtacaaaggggggatgacgcagaccaaatcgagccgccaaaagtgtcatcacaagaaaggccccttaaggttccatcagaacttggtttaggagaggaattcaccattcaagtaaaaaagaagccagtaaaagatcctgagatggattggtttgctgatatgatcccagaaattaagccttctgctgcttttcttatattacctgaactgaggacagaaatggtcccaaaaaaggatgatgtctccccagtgatgcagttttcctcaaaatttgctgcagcagaaattactgaggtgagtacttttatggagtaa

SEQ ID NO: 4482 - DNA, 519 bp, Homo sapiens
  SIMILAR (331)..(477): 931254mologous to Homo sapiens unnamed protein product,accession number AK001324,Smith-Waterman Score=242.
atgccgcctttaagaactgtaacagtcacggcgagggtccgcggcttcattcttgacgtcagtgagaccaagaacccaccaattccagacacattttggcgacccagatgggaccttcgccaatcaccaagcagaggacaggcaagggtgcaggttttcgagaatgcgtcggtaaggaccgctaaatctgactttccttggtcctccatgtggtctgggaggaaaactagtgtttctgctgctgcgttggtgagcgcaactattccgatcagcagggtccagggactgttgcgggttcttgggcaggggttgtttctgctgctgtgttggtggttagacgatgctattattgacgagattacacccaagctgatcagagattggcccaatatttatacctacaccaaggccttgggagaaatggtggtgcagcaagagagcaggaacctgaacattgccatcataagccctccattgtgggagcaacttggcaggagcctttcccagatttatagctaa

SEQ ID NO: 4483 - DNA, 1489 bp, Homo sapiens
  SIMILAR (1477)..(1067): 611254mologous to Homo sapiens putative p150,accession number U93570,Smith-Waterman Score=412.
gagtcattgaccgatcgaatacaggtctggaagtctgaggtccaatataataaaaaatctagtcttcaccttctatcctagggatagacattaggaatatttgaggatgttgttcttggtcttcacgttcatgcattttccctctatttttataattggatcaatgaatcaataagcaaatatattttaactgcataaagataaaaataggcgttgtccaattatggaaatatatggtgaaataagaaatactattcacatttattaaaaacactgaggtcttctttctattaacaaataaatgactcagaggtattactcgcttgctgcaggatggcatatacagtaaaaaataataataacgtatgtgaggtcattttgggtcaggaccatgttcatggatgtttgttttctcaagaaaaaatagtttcacacatacttacatgactaatagaatgaaaggagaaatgcgcggataaatggacagaatatttccatctttttatcttttttgctttgtactctcacaatgaacaccctcaagttgacttaagcacccttccatggtcatgaggtttctggttgcctctgtgtgttagaagcttggagaccaatgccttctgctgtgatcgcgttctccacagttgcctctgggtaggagcctggacactaatagaaaatggatgcacttgagccgacctaagcattcatggtcatgagatttgtggttgccactgttggttaggagcatagagatcagtaatggacacacctgggctggcagaacatcttgccttgatctggagccccatgtctgcccctctgtagaggtgcacatgggccaatgatggatgcaatgagctgatcattttgctgtgatcaaggctatgttgcctctgtgttaggccaatggttgatgttcatgggtgattgatcatcctgtagcgacggtggtattgactgttccccagaggacaaggagtgtgttcttatgtaagtcatagttgacattcttgtttttgattgggtagtttgcctgttcattgatgttcatagtactatagaaggtagataaatggccacatacccttagaatggatacgctcaggtgatttaagcagtcttccatggccacgagctctgtggttgccttgtggttttgatttgtatttctctgatgatcagtgatgttgagccttttttcttgtttgttggctgcatgtatgtcttcttttgagaagtgtttgttcatgtcctttgcccattttttaatggggttgttggtttttttcttgtgaatttgcttaagttccttgtagattctggatattagacctttgtcagatggatagattgcaaaaattttctcccattctgtaggttgtctcttcactctgatgatagtttcttttgctgtgcagaaactcattagtttaattagattccacatgtcaatttttgcttttgttgcaattgcaaaggcatccat

SEQ ID NO: 4484 - DNA, 1587 bp, Homo sapiens
  SIMILAR (139)..(510): 651254mologous to Cloning vector pEH1 lac repressor,accession number AJ007659,Smith-Waterman Score=363.
atgcaaaacactgacaacaccaaatgctgggaatttgccgatttcggaaccaccatcaaacaggattttcgcctgctggggcaaaccagcgtggaccgcttgctgcaactctctcagggccaggcggtgaagggcaatcagctgttgcccgtctcactggtgaaaagaaaaaccaccctggcgcccaatacgcaaaccgcctctccccgcgcgttggccgattcattaatgcagctggcacgacaggtttcccgactggaaagcgggcaggattttgccgatttcggaaccaccatcaaacaggattttcgcctgctggggcaaaccagcgtggaccgcttgctgcaactctctcagggccaggcggtgaagggcaatcagctgttgcccgtctcactggtgaaaagaaaaaccaccctggcgcccaatacgcaaaccgcctctccccgcgcgttggccgattcattaatgcagctggcacgacaggtttcccgactggaaagcgggcaggattttgccgatttcggaaccaccatcaaacaggattttcgcctgctggggcaaaccagcgtggaccgcttgctgcaactctctcagggccaggcggtgaagggcaatcagctgttgcccgtctcactggaaaaggcagcaaagtggaaaaaccccgacggccacatggatgggctcactactaatggcgtcctggtgatgcatccacgagggggcttcaccgaggagtcccagcccggggtctggcgcgagatctctgtctgtggagatgtgtacaccttgcgagaaaccaggtcggcccagcaacgaggaaagctggattttcgcctgctggggcaaaccagcgtggaccgcttgctgcaactctctcagggccaggcggtgaagggcaatcagctgttgcccgtctcactggtgaaaagaaaaaccaccctggcgcccaatacgcaaaccgcctctccccgcgcgttggccgattcattaatgcagctggcacgacaggtttcccgactggaaagcgggcaggattttgccgatttcggaaccaccatcaaacaggattttcgcctgctggggcaaaccagcgtggaccgcttgctgcaactctctcagggccaggcggtgaagggcaatcagctgttgcccgtctcactggtgaaaagaaaaaccaccctggcgcccaatacgcaaaccgcctctctccgcgcgttggccgattcattaatgcagctggcacgacaggtttcccgactggaaagcgggcatggattcttgctcccaaactggaacaacaatcaaaccctatctcgggcgtattcttttgatttaaaagggattttgcggaattcggaaccaccatcaaacaggaatttcggcctgctgcggcaaaccagcgtggaccgcttgctgcaattctctcagggccaggcggtgaagggcaatcagctgttgcccgtctcactggtgaaaagaaaaaccaccctggcgcccaatacgcaaaccgcctctccccgcgcgttggccgattcattaatgcagctggcacgacaggtttcccgactggaaagcgggcagtga

SEQ ID NO: 4485 - DNA, 723 bp, Homo sapiens
  SIMILAR (1)..(675): 911254mologous to Homo sapiens pellino 2,accession number AF302502,Smith-Waterman Score=1074.
ggtgctttacccaatggagatagaggacggaggaaaagtagatttgccctctacaagcggcccaaggcaaatggtgtcaaacccagcaccgtccatgtgatatccacgccccaggcatccaaggctatcagctgcaaaggtcaacacagtatatcctacactttgtcaaggaatcagactgtggtggtggagtacacacatgataaggatacggatatgtttcaggtgggcagatcaacagaaagccctatcgacttcgttgtcacagacacgatttctggcagccagaacacggacgaagcccagatcacacagagcaccatatccaggttcgcctgcaggatcgtgtgcgacaggaatgaaccttacacagcacggatattcgccgccggatttgactcttccaaaaacatatttcttggagaaaaggcagcaaagtggaaaaaccccgacggccacatggatgggctcactactaatggcgtcctggtgatgcatccacgagggggcttcaccgaggagtcccagcccggggtctggcgcgagatctctgtctgtggagatgtgtacaccttgcgagaaaccaggtcggcccagcaacgaggaaagctggggttgcaaactggggatatggcagaaaacaccaagtccacgctctgccctctaattgcatggtctggaggaggtcacagactaggcagcagatcagcagatactgtgtga

SEQ ID NO: 4486 - DNA, 404 bp, Homo sapiens; identical to SEQ ID NO: 1190
  SIMILAR (37)..(333): 1001254mologous to Homo sapiens deleted in oral cancer 1 (doc -1, alias DORC1),accession number AB006077,Smith-Waterman Score= 498.

SEQ ID NO: 4487 - DNA, 1604 bp, Homo sapiens; identical to SEQ ID NO: 1191
  SIMILAR (523)..(786): 971254mologous to Homo sapiens deleted in oral cancer 1 (doc- 1, alias DORC1),accession number AB006077,Smith-Waterman Score=438.

SEQ ID NO: 4488 - DNA, 693 bp, Homo sapiens
  SIMILAR (147)..(326): 381254mologous to Homo sapiens Human bcl2 proto-oncogene mutant protein fragment 14,accession number Y21166,Smith-Waterman Score=84.
atggcggggcctgctgagtcttccccgcagggggctcatcctaacagtccatttgccttacagcatcacagctccttgacagtgaaacccctgcacaggcaaaatgtcatccaacaccaagtggcagggcaggaaaacaggagagggcaccaagcgggatcctcgacttctccccagcccttagaagccctcaaaaggccaaacctcagggcgcccttccactcacagagccgtcgaatcctcattccccctgcaggaaacccaacaccaggcgctgcagcccctgcagacccctccacccagaggcgcgaccgctggggctgcgcgttacccatgcccagagtggcggcgggctccgcacatcaccaacaggctggaccgaccgcagctgctcagcaccgcacccccgtggctctcttctcacctcccttatccctagtctatggccaacagcagaggaaggaatcagaaacgccgaccgtgccaacccctccagcccgggcaagagggtggacagagactggcgtagagcatgtgcccgcatataacaggactagagcacccgaaaaatgtgacattgcgtcccctccccccattcatctccggatgctgaaacctcgcatcctagacacatctcaccctgcccaggctgaaaaacactgcaaggacaatgcctttgcagccatgtattaa

SEQ ID NO: 4489 - DNA, 432 bp, Homo sapiens; identical to SEQ ID NO: 4245
  SIMILAR (148)..(432): 981254mologous to Homo sapiens L7a protein,accession number X52138,Smith-Waterman Score=480.

SEQ ID NO: 4490 - DNA, 2076 bp, Homo sapiens
  SIMILAR (1306)..(2073): 841254mologous to Homo sapiens L7a protein,accession number X52138,Smith-Waterman Score=1080.
atgaagccatgtgctcattcttggaacgcagagctgtcaagaaacatcatcagacatagttttaacctggtaatggtggctgccagtcaggtggctgtcagtcagctccttggttcttatgaaattcttctgctggtttccatagagttgatgttctgttttggtctggggtatttctttataccaatgcaagaatggcctaacacatatggagaaagggtctttgtagatgtggaatcatcagtatttaaatggaatcataagtgtctacataagacagaggcagagagagattacacaaagaagagattaaagttatgtggccacaagccagggaatgctgttggccaacagaagctggaagaagcaagaaaccgattctttactagagcccctggagggagtgcagccctgccgacacttcgatttcagcccagtgataccgatttcagacttctagcctccagaactattttaacctttgagaccaagaacccgtcggaattagcagaacgtttgcgctctgtttgtgggaatcagagcaatgcctatgcccggctgctggaataccgcctgaatgccttgcgaggactgtggaatgcccagcgccagctggccttagaagaacagcatgaaagggaaagttcaggtgatgaggaaactttggccctgctcaaacgccagggcttgttgcagcaacctgagcaagcgcccttcacatcgaggatggggctcctgctggtcttcccccttattcagtcccagagtagaacagacccctctctctgtaacataactgctgaggtgctattgaactgccttcgtgactgccagcctttgagcttgaccaaggagcctgctgactgtctcaatggaattgaaactttgctgtgctcttggctagaggagacttctgacacaggccgacacatcccacataagcaaaaagaaaatgctgctgctgccctggtggctttggcttgtgccagaggttttgtgtactgccggaacgaggagttggaaccaggatgggtggcttttggcagcggcagtcttctccaccggcctgtctctttcgataataaacctcactcccttttccaggtcattgaccagaacacccttcaggtgtgccaggtggtgccaatgccagccaatcacctccccattggcagcaccatgagcactgtgcacctgtcttcagatggcacttacttctattggatctggtctcctgccagcctgaatgagaaaacaccgaagggacattctgtcttcatggacatttttgaacttgtgacgctgaaaggaaagaaggccaaggggaagaaggtggccccggcccctgctgttgtgaagaagcaggaggccaagaaagtggtgaattccctgtttgagaaaaggcgacatccagcccaaaagagaactcacctactttgtgaaatggcccgctatgtcaggttgcagcagcagagagccatcctctataagcagctgaaagtgcctcctgctattaaccagttcacccaggccctgaactgccaaacagttactcaactgcttaagctggcccacaaatacagaccagagacaaagcaagagaagaagcagaggctgttggcccaggctgagaagaaagctgctggcaaagggggcgtccccactaagagaccacctgcccttcgagcaggagttaacaccatcaccaccttggtggagaacaagaaagctcagctggtggtgattgcacacgatgtggattccatcgagctggttgtcttcttgcctgccctgtgttgtaaaatgggagtcccttactgcattatcaaggggaaggcaagactgggccgtctagtccacaggaagacctgcaccactgtcgccttcacacaggtgaacttggaagacaaaggcgctttggctaagctggtggaaggtatcaggaccaatgacaatgacagatacgatgagatctgctgtcactggggaggcaatatcttgggtcccaagtctgtggcttgcattgccaagctcgaaaaggcaaaggctaaagaacttgccactaaactgggttaa

SEQ ID NO: 4491 - DNA, 2568 bp, Homo sapiens
  SIMILAR (7)..(1416): 1001254mologous to Cloning vector pBACe3.6 levansucrase,accession number U80929,Smith-Waterman Score=2472.
atgaacatgaacatcaaaaaaattgtaaaacaagccacagttctgacttttacgactgcacttctggcaggaggagcgactcaagccttcgcgaaagaaaataaccaaaaagcatacaaagaaacgtacggcgtctctcatattacacgccatgatatgctgcagatccctaaacagcagcaaaacgaaaaataccaagtgcctcaattcgatcaatcaacgattaaaaatattgagtctgcaaaaggacttgatgtgtgggacagctggccgctgcaaaacgctgacggaacagtagctgaatacaacggctatcacgttgtgtttgctcttgcgggaagcccgaaagacgctgatgacacatcaatctacatgttttatcaaaaggtcggcgacaactcaatcgacagctggaaaaacgcgggccgtgtctttaaagacagcgataagttcgacgccaacgatccgatcctgaaagatcagacgcaagaatggtccggttctgcaacctttacatctgacggaaaaatccgtttattctacactgactattccggtaaacattacggcaaacaaagcctgacaacagcgcaggtaaatgtgtcaaaatctgatgacacactcaaaatcaacggagtggaagatcacaaaacgatttttgacggagacggaaaaacatatcagaacgttcagcagtttatcgatgaaggcaattatacatccggcgacaaccatacgctgagagaccctcactacgttgaagacaaaggccataaataccttgtattcgaagccaacacgggaacagaaaacggataccaaggcgaagaatctttatttaacaaagcgtactacggcggcggcacgaacttcttccgtaaagaaagccagaagcttcagcagagcgctaaaaaacgcgatgctgagttagcgaacggcgccctcggtatcatagagttaaataatgattacacattgaaaaaagtaatgaagccgctgatcacttcaaacacggtaactgatgaaatcgagcgcgcgaatgttttcaaaatgaacggcaaatggtacttgttcactgattcacgcggttcaaaaatgacgatcgatggtattaactcaaacgatatttacatgcttggttatgtatcaaactctttaaccggcccttacaagccgctgaacaaaacagggcttgtgctgcaaatgggtcttgatccaaacgatgtgacattcacttactctcacttcgcagtgccgcaagccaaaggcaacaatgtggttatcacaagctacatgacaaacagaggcttcttcgaggataaaaaggcaacatttgcgccaagcttcttaatgaacatcaaaggcaataaaacatccgttgtcaaaaacagcatcctggagcaaggacagctgacatcgatagtggctccaagtagcgaacgggcaggactgggcggcggccaaagcggtcggacagtgctccgagaacgggtgcgcatagaaattgcatcaacgcatatagcgctacagcacgccatagtgactggcgatgctgtcggaatggacgatatcccgcaagaggcccggcagtaccggcataaccaagcctatgcctacagcatccagggtgacggtgccgaggatgacgatgagcgcattgttagatttcatacacgggtcaccgtcgacagcgacacacttgcatcggatgcagcccggttaacgtgccggcacggcctgggtaaccaggtactacctgaagcacgggtggatataagggtaaacaagacatggtccctgccctcaattaaagaatcagcaaatgcaaaggcacaaatgagtgaaatgttacggtatgttgagagaataacaagaattttaggaccagtggagtgtacagtgcagggtgggagagaagaaaagctgaggagagcacatctcaatttggtcagccacatttcaagtgctcaacagacccactggctagtagctaccatattggataatgcagggccagagggactaattgaggaggcaatttcagcagaatttgttgatttaatcaatgtggaggaggaggaacaaggagattccactgtcatcactttagttcaagatgtcattaggtcttttggttggtctttcaatgctgtttctcctgtgacattgccagcttcccaagagaagaagcagaggctgtttgtccaggccaagaagaaagctgctggcaaaggggacgtccccactaaaagaccacctgtccttcgagcaggagttaacaccatcaccaccttggaggagaacaagaaggctcagctggtggtgactgcacatgaagtggatcccatcaagctagttgtcttcctgcttgccttgtgtcataaaatgggggtcccttactgcattatcaaggggaaggcaagactgggacatctagtccacaggaagacctgcaccactgtcaactttacacaggttaactcggaagacaaagacactttggctaagctggtggaagctatcaggaccaattacaatgacagatatgatgaaatccgccatcactag

SEQ ID NO: 4492 - DNA, 644 bp, Homo sapiens
  SIMILAR (1)..(561): 741254mologous to Mus musculus surfeit 3 protein,accession number M14689,Smith-Waterman Score=688.
atgccaaaaggaaagaaggccaaggagaagaaggtggctccagcccctgctgtcgtgaagaagcaggaggccaagaaagtggtaaatcccttgtttgagaaaaggcctaagaattttggcactggacaggatatccagcccaaaagagacctcacccactttgtgaaatggccctgctatatcaggttgcagcagcagagaaccatcctctataagtggctgaaagtgcctcctgagattaaccagttcacccaggcaccagacagccaaacagctactctgctgcttaagctggcccacaatacagaccagagacaaaccaagagaagaagcagaggctgttggcccgggccaagaagaaagctgctggcaaaggggacattccccactaagagtccacctgtccttcgagcaggagttaacaccatcaccaccttggtggagaacaagaaagctcagctggtggtgatagcacatgatgtagatcccatcaagctggttgtcttcttgcctgtcctgtgtcataaaatggggtcccttactgcattatcaaagggaaggcaagactgggacatctagtccataggaagacctgcaccactgtcaccttcacacaggttaactcggaagacaaaggtgctttg

SEQ ID NO: 4493 - DNA, 1020 bp, Homo sapiens
  SIMILAR (61)..(708): 451254mologous to Homo sapiens L7a protein,accession number X52138,Smith-Waterman Score=312.
  misc_feature (1)...(1020): n = a,t,c or g
aaaagtatacaaaagggtttaaaaatgtgcctaagtagctctctcctcccgccgtccaagatgccgaaaggaaagaaggccaagggaaagaaggtggctccggccccagctgtcgtgaagaagcaggaggctaagaaagtggtgaatcccctgtttgagaaaaggccttaagaattttggcattggacaggacattcagccccaaaagagacttcacccgctttgtgaaatggccccggctattatcaggttgcatgcgcgangagagccatcctctataaagcgggctgaaagttgcctcctgcggattaaccagtttcacccagggccctgggaccccgcaaacaagctacttcagctgctttaagcttgggcccacaagttacagacccagagacaaaagcaaagaggaagaagcagagactgtttggcccgggccgacgaagaaggctgcttggcaaaggggacgtccccaacgaaagagacccacctgtcccttcgagccaggagttaacaccgtcacccacctttggtggaggaacaagaaagctccagcctgggtggtgattgccacacgacggtggatcccattcgagcttggtggtcttcttgcctgccctggtgtcgtgaaaaatgggggtccccttactgcattatcaagggaaaggcaagactgggacgttttagtccaccagaaggccctgcacccactgtcggctttcacaccaggtgaaactcgaaagacaaaaggcggcttttggcttaagctgggttggaagctatcaggacccaatttacaattgaccagatacgatggagatccggccgtcacttggggttggcaatgtcctggggtcctaagtctgtggctcgtattcgccaagcttcgaaaaggcaaaggctaaaagaacttgccactaaactgggttaaatgttacactgttgagttttctgtactataaaaataattgaaataatacaaattttcccttcaaaaaaaaaaaaaaaagggcggccgct

SEQ ID NO: 4494 - DNA, 227 bp, Homo sapiens
  SIMILAR (149)..(226): 691254mologous to Mus musculus Pro-Pol-dUTPase polyprotein,accession number Y12713,Smith-Waterman Score=94.
ctgctgtagcagatgtggtttcattgcttgagcaaattaacacatctcctggtacctggtatgcagccattgacttggcaaatgcctttttctctattcctgtccataaagcccaccagaagcaatttgccttcagctgccataaagtgggtcgtgcacagcagcatccatcatcaaatggaagtggtatatatgtgatcaggcttgagcaggtcctgaaggcacaa

SEQ ID NO: 4495 - DNA, 338 bp, Homo sapiens
  SIMILAR (1)..(189): 761254mologous to Mus musculus Pro-Pol-dUTPase polyprotein,accession number Y12713,Smith-Waterman Score=287.
aaggagaaatggccagatgtgcgattatgtactgattcatgggctgtagccaatggtttggcggtatggtcagggacttggaagaagcgtgattggaaaattggtgacaaagaaatttggggaagaattatgtggatagacctctctgaatggtcaaaaactgtgaagatatttgtatcccatgctgacctgactgtggccattgctgagtgcccaatttgccaggagcagacacctacactgagctctcgatatgacaccatttctcagggtgatcagccggctacctggtggcaggtggattatattggacgtcttccatcacggaaatggcagag

SEQ ID NO: 4496 - DNA, 352 bp, Homo sapiens
  SIMILAR (1)..(213): 851254mologous to Mus musculus Pro-Pol-dUTPase polyprotein,accession number Y12713,Smith-Waterman Score=322.
aagacagatagatcttggagaatgacagtggattatcataagcttaacaaggtggtgactcctcttgcagctactgtaccagatgtggtttcattgcttgagcaaattaacacatctcctcgtacctggtgtgcagccattgacttggcaaatgcctttttctccattcctgtccacaaggcccaccagaagcaatttgccttcagctggcaagagaaggctctgcaacaggtccaggctgctgtgcaagctgctctgccacttgggccctatgacccagcagatccaatggtacttgaggtgtcactggcagatagggatgctgtttggagcctttggcaggcccccttag

SEQ ID NO: 4497 - DNA, 368 bp, Homo sapiens
  SIMILAR (86)..(367): 771254mologous to Mus musculus Pro-Pol-dUTPase polyprotein,accession number Y12713,Smith-Waterman Score=411.
ccatagagtgggccgtgcacagcagcattccatcagcaaatggaagtggtatatacatgattggtctcaagtaggtcctgaaggcacaaatgattctgcacgatatccagataccacccaaaagtggacagctgcagcactacagcccctttctaggacatccctgaaggacagccatgaagggaaatcttcccagtgggcagaacttagagcagtgcacctggttttgcgctttgcatggaaggagaaatggccagatgtgcaattatatactgattcatgggctgtagccagtggtttggctggatggtcagggacttggaagaagcatgattggaaaattggtgacaaagaaatttggggaagag

SEQ ID NO: 4498 - DNA, 468 bp, Homo sapiens
  SIMILAR (6)..(311): 721254mologous to Mus musculus Pro-Pol-dUTPase polyprotein,accession number Y12713,Smith-Waterman Score=418.
atgattctgcacgatatccagataccacccaaaagtggacagctgcagcactacagcccctttctaggacatccctgaaggacagccatgaagggaaatcttcccagtgggcagaacttagagcagtgcacctggttttgcgctttgcatggaaggagaaatggccagatgtgcaattatatactgattcatgggctgtagccagtggtttggctggatggtcagggacttggaagaagcatgattggaaaattggtgacaaagaaatttggggaagagccacccctgtcatcgcccaatgggcccatgaacaacgtggccatggtggcagggatggagattatgcatgggctcagcaacatgggcttccactcaccagggatgacctggctacagccactgctgagtgccccatttgccagcagcagagaccaacactgagccctcaatatggcaccattcctcagg

SEQ ID NO: 4499 - DNA, 838 bp, Homo sapiens
  SIMILAR (188)..(547): 541254mologous to Mus musculus Pro-Pol-dUTPase polyprotein,accession number Y12713,Smith-Waterman Score=282.
accacgtggtagaaataggaggagaaagacattccaagagagaagaatgacactgaatgaaagcccagagaaaataggcaaatggattgaatgctatgggcacccacctgcctctaagctggtggaaatttatattcatacagtctttgtggaagacaaattgtcaatatgtatcagaagctttaacaagaaggcagatggatcttggagaatgacagtggattattgtaagcttaaccaagtggtgactgcaattgcagctgctataccagatgtggtttcattgcttgagcaaattaatacatctcctgatacctggtatgcagccattgacttggcaaatgcccttttctccattcctgtccataaggggtatatcaactctctggctttgtgtcataatgttatttggagagaacttgattgcttttcacttccacgagataccacactggtccattacattgatgacattatgctgattggatccagtgtgcaagaagtagaaaacaaactggacttactggtgaaggataaattgctgcatttggctcctcctacaaccaaggaagaggtacaacacatggtgggcctgtttggattttggaggcagcacattcctcatttgggtgttttacaccagcccatttatcgagtgatccgaaaggctgccagtttgagtggggtccagaacaggagaaggctctgcaacaggtccaggctgctgttggtgggaaacaatctgaaaacaacctgggtcaccagaggtcaccaggcctctggttttcctgaagaccccactgcttctccagaagctgccatggccaccttgctctga

SEQ ID NO: 4500 - DNA, 1219 bp, Homo sapiens; identical to SEQ ID NO: 3629
  SIMILAR (499)..(621): 731254mologous to Mus musculus Pro-Pol-dUTPase polyprotein,accession number Y12713,Smith-Waterman Score=152.

SEQ ID NO: 4501 - DNA, 2520 bp, Homo sapiens
  SIMILAR (2023)..(2517): 691254mologous to Mus musculus Pro-Pol-dUTPase polyprotein,accession number Y12713,Smith-Waterman Score=589.
atgctcacagcagctggaccatatagccaaatactggaatcaaaccaaatatccatcaactttcactgtcaccgagcctcccctcctccccgtgacgaggttcctggtgacctcacagatgcagccctcagacatacaggcacccgtgtcagggctcccactcggcaagggaggaaaataaaaggagaatcaagtgaagggaaaggagaaaggaggcagaagagaacacaagaagttccctttaacaggaggaaaagtaaaggggagacattggagatcgttgatcaagagggaaaaagtcttaagagcgtcccagacgttggtgcggctgatggtgggggggccatcacagactctgatcagatgcacaggacttggggtttcgaggacattctctggggagcttcctgcactctattgcgcacagaaactaccgtggatcttgttacaaggcagcttttgttttgggtctctgctgggagtagtgagggtgtagacagaatgaatgaactaagtcacttccgagctttctggctacacattgcgcacccagcaatgtgggtgacgggtcttgacatgggcacatgtgccgagcttaaggaagaggccttggatggtgaaacggaaaatgaaatgagcacttttctattttaccggatcacacatgcagggacagtcgccttcgctcctctcctcagtggtttcctgcactgtgaatctctgctcacttttcttttgccttttatgctccagttagcacctcctcattcttgcgttttctggaacaaggagcaccggtgtcttacaaggtctctgtggtccgccttgcacggaagcactggcagtcaggaagcagtggctgtcgcagcacctgccactcaagaagctgatggtgaaaagcaaaacaagggggtccagatgctgcccgaccccagcactcagccacaggaggggtgtcctcagcctgccttctatgttctagcttcgtccaactggctgcttagtatgattagacctcaaaatgctaaggattctactgctaatggtatgcagaacactgagaatccttggtatgaatggttcagagagttacacaaaataaatgcatttgacactcctgattcattgctcgtgagaggcaaggagtttgttgactctatacataacacctttgaccatatgtggagaacccaggaacataatgaagctggttggttcctcctaagttcactggacaaagtgatgaaagaaaatgatgaactcagagattctaactcctgccttcagaagcagatactgagcctcaaatctaagattgccctgagtcagagtcttatttcctgtagagaaagagctgacattgtggcaaatcaaacagaagctcttatcattgccagatgtgtaattatcagagatatacttagcagctggcagaacccccatgttggctccatgactgggagggtgagggctgctatgatgggaaaggccaaatggaagccattagagctgcctttacttagaaaaatagtaaataaaaaacaatatcatatccctggaggaactgtggagattagtgccaccatcaaagacttgaaagacccaggggtggtgatttccactacatccccattcaactctcctatttggcctgtgcagaagacagctgctgtaccagatatggtttcattgcttgagcaaatgaactcatctcctggtacctggtatgcagccattgacttggcaaatgcctttttctccattcctgtccataagccccaccagaagcaatttgccttcagctgccactcctgtcatcgcccaatgggccctgaacaaagtggccacggtggcagggatggaggttacacatgggctcagcaacatggacttgcattcaccaatactgatctggctacggtcaatgccaagattgggtttgcctatcctgtgtgcgatgcttctgccaagactaccatccgtggactcttggaatgccttatccgctgtgatggtattccacacagcattgcctctgaccaagccaggattcacaggtccaggaatcaagaggtggaagtggaagtggcaccactcaccatcacccctagtgatcccctagcaaaatttttgctttctgttcccgtgacattacgttctgctggcctagaggtcttagttccaggggaaggaatgctgccaccagggaacacaaggacaattccattaaactggaagttaagattgccacctggacactttgggctcctcctaactttaagtcaagaggctaagaacggagttacagtgttggctggggtgattgacctggactatcaagatgaaatcagtctactactccacaatgggggtaagaaagagtatgcaaggaatacaggagatccattagggcgtctcctagtattaccatgccctgtgattaagatcaatgggaaactacaacagcccaatccaggcgggactacaaatggctcagacccttcaggaatgaaggtttag

SEQ ID NO: 4502 - DNA, 367 bp, Homo sapiens
  SIMILAR (158)..(319): 721254mologous to Mus musculus Pro-Pol-dUTPase polyprotein,accession number Y12713,Smith-Waterman Score=186.
gagacctctggccttttaccagggtaactgtgcattgggaaaggcaaatgatcagacatttcagggactactggacactggctctgagctgacattgattccagggtacccaaaacgtcattgctgtcccccagttaaagtacgggtttatggaggtcagacagatggatcttggagaatgacagtgggttatcataagcttaaccaagtggtgactccaattgcagctgctgtaccagatgtggtttcattgcttgagcaaattaacacgactcctgccataaagtgggttgtgcacagcagcattccatcatcaaatggaagtggtgtatatgtgatcaggcttgagcaggtcctgaaggcacaa

SEQ ID NO: 4503 - DNA, 541 bp, Homo sapiens
  SIMILAR (408)..(440): 811254mologous to Mus musculus Pro-Pol-dUTPase polyprotein,accession number Y12713,Smith-Waterman Score=45.
tgccagatgtgtaattatcagagatatacttagcagctggcagaacccccatgttggctccatgactgggagggtgagggctgctatgatgggaaaggccaaatggaagccattagagctgcctttacttagaaaaatagtaaataaaaaacaatatcatatccctggaggaactgtggagattagtgccaccatcaaagacttgaaagacccaggggtggtgatttccactacatccccattcaactctcctatttggcctgtgcagaagacagctgctgtaccagatatggtttcattgcttgagcaaatgaactcatctcctggtacctggtatgcagccattgacttggcaaatgcctttttctccattcctgtccataagccccaccagaagcaatttgccttcagctgccactcctgtcatcgcccaatgggccctgaacaaagtggccacggtggcagggatggaggttacacatgggctcagcaacatggacttgcattcaccaatactgatctggctacggtcaatgccaag

SEQ ID NO: 4504 - DNA, 681 bp, Homo sapiens
  SIMILAR (1)..(417): 871254mologous to Cloning vector pZC320 SopA,accession number U26464,Smith-Waterman Score=605.
atgaaactcatggaaacacttaaccagtgcataaacgctggtcatgaaatgacgaaggctatcgccattgcacagtttaatgatgacagcccggaagcgaggaaaataacccggcgctggagaataggtgaagcagcggatttagttggggtttcttctcaggctatcagagatgccgagaaagcagggcgactaccgcacccggatatggaaattcgaggacgggttgagcaacgtgttggttatacaattgaacaaattaatcatatgcgtgatgtgtttggtacgcgattgcgacgtgctgaagacgtatttccaccggtgatcggggttgctgcccataaaggatacctctggccttttaccagggtaactgtgcaatgtggaaagaaaaatgatcagacatttcagggactactggacactggctctgagctgacgttgattccagaggacccaaaacgtcattgtggtcctccagttaaagtaggggcttatggaggtcaggtattacacagcaagtgggcaccaatatatcatttcctcagtagtcataactgcaatggattttgttacatcagtatagccaatttaccaaagaagtttggtcaaaacatcaaagaatgccttaccaataatcggatagtgccttttaactgtgtccaagaccctacatactaa

SEQ ID NO: 4505 - DNA, 1093 bp, Homo sapiens
  SIMILAR (545)..(826): 841254mologous to Mus musculus Pro-Pol-dUTPase polyprotein,accession number Y12713,Smith-Waterman Score=433.
accacgtggtagaaataggaggagaaagacattccaagagagaagaatgacactgaatgaaagcccagagaaaataggcaaatggattgaatgctatgggcacccacctgcctctaagctggtggaaatttatattcatacagtctttgtggaagacaaattgtcaatatgtatcagaagctttaacaagaaggcagatggatcttggagaatgacagtggattattgtaagcttaaccaagtggtgactgcaattgcagctgctataccagatgtggtttcattgcttgagcaaattaatacatctcctgatacctggtatgcagccattgacttggcaaatgcccttttctccattcctgtccataaggggtatatcaactctctggctttgtgtcataatgttatttggagagaacttgattgcttttcacttccacgagataccacactggtccattacattgatgacattatgctgattggatccataaaatttctaggggtccagtggtgtggggcctgtcgagatattccttctaaggacccagcagatccaatggtgctcgaggtgtcagtggcagatagggatgctgtttggagcatttggcaggctcttatagatgaatcacagcagaggcctctaggattttggagcaagtctctaccatcttctgcagataactactctccttttgagagacagctcttggcctattactgggctttggtggaaactgaacgttcaactatgggtcatcaagtcaccatgctacctgaactgcctgtcatgaactgggtgctttctgacccatctagccataaaccaatggtttggctggatggtcagggactgggaagaagcatgattggaaaattggtgacaaagaaatttggagaagaggtatgtggatggacctctctgagtggtcaaaaactgaagatatttgtgtcccatgtgagtgctcaccaacgagtgacctcagcagaggaggagtttaataatcaagtggataggatgacccgttctatggacaccactcagcctctttacccaaccacccctgtcatcgcccaatgggctcatgaataa

SEQ ID NO: 4506 - DNA, 1239 bp, Homo sapiens
  SIMILAR (406)..(741): 751254mologous to Mus musculus Pro-Pol-dUTPase polyprotein,accession number Y12713,Smith-Waterman Score=495.
atgctgattggatccagtgagcaagaagtagctaacacactggacttatttgtgagacatttgcatgccagagaatgggaaataaaactgactaaaattcagggaccttctacctcagtaaaatttctaggggtccagtggtatggggcctgtcaagatattccttctaatgtaaaggatacgttgctgcatttggcccctcccataaccaagaaagaggcacaatgcctactgggcctatttggattttggaggcaacacattcctcatttggaattgcctatcaagaactgggtgctttctgacccatctagctataaagtgggttgtgcacagcagtattccatcatcaaatggaagtggtatatatgtgattgggctcaagcaaatccagaaggcacaatcaatggtttggctcgatggtcagggacttggaagaagcacaattggaaaattggtgacaaagaaatttggggaagaggcatgtggatggacctctctgagtggtcaaaaactgtgaagatatatgtatcccatgtaagtgctcaccaacagatgacctcagcagaggaggattttaataatcaagtggataggatgacccgttctatggacaccacacagcctctttccccaaccactcctgtcatcacccaatgggcccatgaacaaagtgaccatggtggcagggatggagattatacatgggctcagcaacatggacttccactcaccaagtcattcacttttgctaaagaagtgtggcagtgggctcatgctcatggaattcactggtcttatgttccccatcatcctgaagcagctggattgatagaacgatggaatggccttttgaagtcacaattaaaatgccaactaggtgacaatactttgcagggctggggcaaagttctccagaaggctatgtatgctctgaatcagcatccaatatatggtactgtttctcccatagccaggcttcatgggtccaggaatcaaggggaggaagtggaagtggcaccactcatcatcacccctggtgacctactagcaaaatttttgcttcctgtttccacgacattacattctgctggcctaggagttgtgtatgggttcaagttgacaagggatggacttgtgatggttaatactgagtgtcaacttgatcggattgaaggatgcaaagtattgttcctgggtgtgtctgtgagagtgtcgccaaaggagattaacatttga

SEQ ID NO: 4507 - DNA, 1467 bp, Homo sapiens
  SIMILAR (450)..(494): 661254mologous to Mus musculus Pro-Pol-dUTPase polyprotein,accession number Y12713,Smith-Waterman Score=41.
ggggaaaaaggaaatgatcagacatttcggaaactactggacactggctctgagctgatgttgattccactcagggtggtgattcctaccacatccctgttcaactctcccatttggcctgtgcagaagacagatggatctggaagaatgagagtggattatcataagcttaaccaagtgatgactccaactgcagctgctgtaccagatgtggtttcattgtttgagccaattaacacatttcttggtacctggtatgcagccattgacttggcaaatgcccttttctccattcctgtctgtaaggcccaccagaagcaatttgccttcagctggcaaggccagcaatatacctttactgttctacctcagaggtatattaactgtttggctttgtgtcataatcttattcagagagaccttgatcactttttgcttccacaaggtatcacactggtccattacattgattccggcccatttatcaagtgacctgaagctgccagttttgagtggggtccagaacaggagaaggctctacaacaggtccaggctgctgtgcaagctgctctgtcaattgggccatatgacccagcagatccaatggtacttgaggtgtcagtggcagatggcgatgctgtttggagcctttggcaggcccccaaaggtgaatcacagtggaggcctctaggattttggagcaaggctctgccatcttctacagataattactcttcttcagatgtgcaattatatactgattcatgggctgttgccagtagtttggctggatagtcagggacttggaagaagcatgattggaaaattggtgacaaagaaatttggggaagaggtatgtggatggacctctctgagtggtcaaaaactggaaagatatttgtatcccatgtgaatgctcaccaactggtgacctcagcagaggaggattttaataatcaagtggataggatgacccgttctgtggacaccactcagcctctttccccagccacccctgttgtcgcccaatgggcccatgaacaaagtggccatggtggcaggaatgaaggttatgcatggactcagcaacatggacttccactcaccaaagctgacctgactacagccactgctgagtgcccaatttgccagcagcagagaccaacactgagacctcgatatggcaccacttctcagggtgatcagccagctacctgctggcaggttgattacattgaacctcttccatcatggaaaaggcagaggtttctcctcactggaataaacactcactctggatatgggtttgcctatcctccatgcaatgcttctgccaagactaccatccatggactcatagcatgccttatccactgtcatggtattccacacagcattgcctctctttacagagagagaggcactcactttacagataaagaagtgcagcagtgggcgcatgctcat

SEQ ID NO: 4508 - DNA, 1605 bp, Homo sapiens
  SIMILAR (796)..(1602): 771254mologous to Mus musculus Pro-Pol-dUTPase polyprotein,accession number Y12713,Smith-Waterman Score=1137.
gaatctttctcccatccttccccaagacctctggccttttaccagggtaactgtgcactggggaaagggaaatgatcagacatttcagggactacaggatactggctctgagctgatgctgattccaggggacccaaaacgtcactgtagtcctccagttaaagtagggtcttatggaggtcaggtaattaatggagttttagctcaggtgcgacttacagtgggtacagtgggtccccggactcatcctgtggtcatttccccagtgccagaatgcataattgacatagacatacttaacagctggcagaacccccacattgactccctgactggtagggtgaaagctattatggtgggaaaggccaaatggaagccatttgagccgcttcttcctataaaaatagtaaatcaaaaacaatatcgcatccctggagggattgcagagattagtgccaccatcaaggatttgaaagacgcaggggtggtgattcccatcacactgccgttcaactctcctttttggcctgtgaagaagacagatggatcttggagaatgaaagtggtttattgtaagcttaaccaagttgtgactccaattacagctgctgtaccagatgtggggtttcattgcttgagcaaattaacacatctcctggtacctggtatgcagccattgatttggcaaatgccattttctccattcctgtccataaggcccaccagaagcaatttgccttcagctggcaaggccaccaaaatacctttactgtctttactatcctacttcacatccataaagtgggtcacgcacagcaacattccatcatcaaatggaagtggtatatacatgatggggctcgagcaggttctgaaggcacaagtaagttaaatgaggaagtgcctcaaatgcccatggtcaccacctctgccgccttaccttctctcccgcggcctgcaccgatggcctcatggggagttctctatgatcagttgacagaggaagagaagactagggcctggttcacagatggttctgcacgatatgcaggcaccacccaaaagtggacagctgcagcactacagcccctttctaggacatcactgaagggcagtggtgaagggaaatcttcccagtgggcagaacttcaagcagtgcacctggttgtgcacttttcatggaaggataaatggccagatgtgcgattatatattgattcatgggctgtagccaatggtttggctggatggtcagggacttggaagaagcatgattggaaaattggtgacaaagaaatttggggaagaggtatgtggatggacctctctgagtggccaaaacctgtgaagatatttggatcccatgtgagtgctcaccaatgggtgatctcagcagaggaggattttaataatcaagtggataagatgacctgttctgtggacatcactcagcctctttccccagccacccctgttatcacccaatgggcccataaacaaagtggccatggtggcagggatggaggttatacatgggctcagcaacatggacttccactcaccaaaactggcctggctatggctacagctgagtgcccaatttga

SEQ ID NO: 4509 - DNA, 2097 bp, Homo sapiens
  SIMILAR (1348)..(1806): 661254mologous to Homo sapiens Multi-drug resistance protein alternative splice form 2,accession number R96953,Smith-Waterman Score=545.
atgctctccagtacgcagaacgcgggcggctcctatcagcgggtccgcggggcgcttgatacacaggagtggaagtggggagaggtgagtcctcgaaccctgaacgtggacggacgagcccttgtttcagtagccaacacacacgggacagacagaccggcgtacacactcaatcctcagagcagagatcagagatcaggagtaattactttaggctataagagacctttggaaagagaggatctttttgaactaaaggaaagtgattccttctgcactgcgtgtcccatctttgaaaaacaatggagaaaggaagttttaaggaatcaagagaggcaaaaagtaaaggccctcaacaaattggatgaggcactatgccctgggatcatccttactcagtctactgattcaaatgctaatctcttccagaaacagcctcacagacacacccagacatctggtagatggcaaattatcattttctgtgaacacagctcagattttggctggaatggctatggctatgcagtggcacttcttgttgtagtctttttgcaaactctgattcttcagcaatatcaacgttttaacatgctcacctcagcaaaagttaagacagctgtaaatggactgatctacaaaaagctaggatggtcaggaaaagtgtcatggttaatattgcatgatgtgggtcatggaataatggaaggatacattgcatggggtaaaggctctgatgttagaataacttgggagaaaaaaagtacagaaatgcgtacaaggcctgctcagaaaatggccttacttttatcaaatgtttctcgacaaaagttttccactggggaaattattaacttgatgtcagcaactcatggacttgacagcaaacctcaatctcctctggtctgccccttttcaaatcctaatggccgtatatctcctttggcaagagctggattggcagatcattatcgtgtgactcatttacagatcctcaaactttatgcatgggaaccctcctataaaaataagattatcaaaattcgagatcaggaattggaatttcaaaaatcagctaggtatcttactgtattttccatgttgacattaacctgcattccattcttgacaaagatatccctgggccgtttggaagactttctcaacactgaggagcttcttcctcaaagtattgaaacgaactatacaggagatcatgctattgggtttacagatgcttctttctcctgggataaaacaggaatgccagttctaaaagagtcaataagaataagaattgaacaagttcttaatcagctttctctttttgaaacagtagactacccgggctctgtggcttatgtttctcagcaggcctggattcagaattgcattttgcaagaaaacattctctttggctccatcatgaagaaagagttttatgagcaagtattggaagcctgtgctctccttccagatttggagcagttgccaaagggagatcaaactgagattggagaaagagctgtgaatataagtgggggccagcagcatcgagtaagcctggccagagctgtctacagtggggccgacgtctacctcctggatgatcccttgtctgctattgatgttcatgttggaaagcagctttttgaaaaagtgatagggtccttgggccttttgaaaaaccggactcatattttagtgacacacaatctcacacttctgccacaaatgaatcttattgttgtaatgaaaagtggcagaatagctcaaatgggaatataccaggagctgctgtgtaaaaccaaaaatctcactaatttgcaccaagtcatcagtgaacaagaaaaaggtgggagagtgggaagagtctggacgtggcagctgaggtatctgcagatgtacagagcttctgagagtgcaaagtggagcttgggagggggagaagagcagcaaaagccttggctgagactgactcatcaaggactgccatgtcccccagaggaagtctcaggaatccagacattctcatcagatccttgccttccaggtggcttggaaggtgtattggtcagagaaagcaatataatttga

SEQ ID NO: 4510 - DNA, 887 bp, Homo sapiens
  SIMILAR (53)..(346): 471254mologous to Rattus norvegicus ABC-type transporter MRP3,accession number AF072816,Smith-Waterman Score=212.
gctcacctcagcaaaagttaagacagctgtaaatggactgatctacaaaaaggtgtccctggcaaccttgtgtgtctatttcttactggatgaacgaatcattttaacagcgcctaaagtgttcacatcgatgtctttgtttaatattttaaggattcctctgtttgagttaccaagcgtgatctcagctgtggtccagacaaagatatccctgggccgtttggaagactttctcaacactgaggagcttcttcctcaaagtattgaaacgaactatacaggagatcatgctattgggtttacagatgcttctttctcctgggataaaacaggaatgccagttctaaaagaggctctgaggcttatgtttctcagcaggcctggattcagaattgcattttgcaagaaaacattctctttggctccatcatgaagaaagagttttatgagcaagtattggaagcctgtgctctccttccagatttggagcagttgccaaagggagatcaaactgagattggagaaagagtaaggaaactgtaatttatcatgtagagaaatataatcccattcagctgcgctaataaaatgtttatggcctttttcttgaagtctcgaagagctatacaactataattttaaaaaactattatgcaattcctatgtaagagatggcagtattaaggacaagttattatatataattgactgtctgcaacacagattaaaaatcagtccgaaattctgttgttagtatccacggggggggaataaaagcccaataattagatcatcatacctttgggttggggggctgggcaccaatgccagttcactttcttaagagtgacctaataagttgtggctaattcctggaccctcggtcc

SEQ ID NO: 4511 - DNA, 668 bp, Homo sapiens
  SIMILAR (61)..(267): 601254mologous to Homo sapiens Multiple drug resistance gene MRP1 (partial),accession number AC003026,Smith-Waterman Score=210.
attgaaacgaactatacaggagatcatgctattgggtttacagatgcttctttctcctgggataaaacaggaatgccagttctaaaagagagctctgtggcttatgtttctcaacaggcctggattcaaaattgcattttgcaagaaaacattctctttggctccatcatgaagaaagagttttatgagcaagtattggaagcctgtgctctccttccagatttggagcagttgccaaagggagatcaaactgagattggagaaagagtaaggaaacggctgtgaatataagtgggggccagcagcatcgagtaagcctggccagagctgtctacagtggggccgacgtctacctcctggatgatcccttgtctgctattgatgttcatgttggaaagcagctttttgaaaaagtgatagggtccttgggccttttgaaaaaccggacatcgcattctgtttgtcattataccttgctggctgttcctcatctccttgaggtacaaatactgactggcaatttcatccagtctctaggttttaactaccacgaatatgccaataattctaatgcctatatcgtcaacctagacctcttccctggattccagacttgtgtgtacaaactcctatctcctattagatgcctaatatgcaaatcggaatga

SEQ ID NO: 4512 - DNA, 460 bp, Homo sapiens; identical to SEQ ID NO: 3392
  SIMILAR (435)..(49): 481254mologous to Mus musculus Gag polyprotein,accession number Y12713,Smith-Waterman Score=270.
  misc_feature (1)...(460): n = a,t,c or g

SEQ ID NO: 4513 - DNA, 515 bp, Homo sapiens
  SIMILAR (48)..(515): 511254mologous to Mus musculus Gag polyprotein,accession number Y12713,Smith-Waterman Score=383.
tttgtggtgataactgtgtgtttgaaagctggattggagacatcatattggacatggacaatgagtttagtgactctatacataatacctttggccatatgtggagaaccaaggaacataatgaagctggttggttgctcctaagttcagtggacaaagtaatgaaagaaaatgatgaactcagggattctatctcctggcttcagaagcagatactgagtctcaaatctgctaagattgccctgagtgagagtcttatctcctgcagggaaagagctgaaattgtggaaaaacagacacaagctgttatcatgcgaatggctgacccgcaaggaaaggtgcatgcgcagcctcaacaggtgtctactgttaaagggaggacattgattggaaaagaatgggaccccgcaacttggaatggggacgtgtgggaggaccctgatgaagctggggacactgagtttgtaaactctgatgaaccttttttgccagaagtaacagcttccccatcccca

SEQ ID NO: 4514 - DNA, 852 bp, Homo sapiens
  SIMILAR (789)..(851): 761254mologous to Mus musculus Pro-Pol-dUTPase polyprotein,accession number Y12713,Smith-Waterman Score=77.
atgccctgcactacctcaggactcgacaaagtccccaccagcaagaaagctctcaccagatatggttatggttccttgaccttagacttctcaggctccataattccatgtaagatgtgcctttcaccttccaccaggattgtgaggccttcccaaccacgtggaactgaggaccctgatgaaactggggacactgagtttgtaaactctgatgaatcctttttgctagaaggaacagcttccccatccccagtagtggcagtatcccctcccagacccatgctaccatcagcctttccacctttgtctgaggacataaaccctgtactgcctgaggcaacagtgctggcctcccctgaggtggttgccaagcaaactcatgttgattctcctcggaagccactctcaacattcctgtttgcttctagacctgtaactaaactaaagtcccggcagacccctggaggtgaggttgacagtgtgacctgtgaggagaagacagatggaccttggagaaagacagtggattattgtaagcttaaccaagtggtaactccaattgcagctcttgtaccagatatggtttcattgcttgtgcaaattaacacatcttctgatacctcgtatgcagccattgacttggcaaaagcctttttctccattcctgtctataaggcccaccagaagcaatttatcttcagctggcaagcccagcaatatacctttactgtcctacctcaagggtatattatctctcccgctttgtgtcataatcttattcggagagccttgatcactttttgcttccacaggatatcacactggtccattacattgatgacattaggctga

SEQ ID NO: 4515 - DNA, 366 bp, Homo sapiens
  SIMILAR (275)..(213): 951254mologous to Homo sapiens 16.7Kd protein,accession number AF078845,Smith-Waterman Score=107.
  misc_feature (1)...(366): n = a,t,c or g
cccagatcctacagagtagggacaccccccacttcccatttcaattctgaagcaaggaagctaggaatgacaggagaggtttaactgatggtacactttataccctcactatcaantctanttttatactaaattaacttagttatgagagctnattttccatctctccaggttgaacttcttcattaggccaatccgtttgcaagtcggcactgtttgatctcanagaggcaaggctgctgctgctgtgctggctgggttccctgaggctcctggccggaggggccatgcgggaggtgcggcttcggcttccacgcggcatcctaggtangcgacggctaggccntncacngccgaantcggnac

SEQ ID NO: 4516 - DNA, 940 bp, Homo sapiens
  SIMILAR (215)..(589): 411254mologous to Homo sapiens 16.7Kd protein,accession number AF078845,Smith-Waterman Score=124.
cggacgcgtgggcggacgcgtgggttccggtctcctcagaagtcgcttagctcttcggtggttgtcacacgtccggaggcctagccgtgcgcgtacctaggatgccgcgtggaagccgaagccgcacctcccgcatggccccttcgggcaagccgggcccccttaaaatgagagcttgaaccaaggcaagcacaagtcgctcagccaccagcaagcggcacccccatctgcagttggctcttctgtctgctgcgccccggcagccagggtctttatggcccagatggcaaccactgcagctggcgtggcttgtggggttctgttgtggggggcacacattgggtcacggcatttactggggggctttcagtgggagggaagttaattgcttgagccttgcgaaggccttgacatcaatttaaccaagggagcttcaggggaacccaagccaagcacagcaagcagcagccagccttgcccctcctatggaggatcaaaaccagtttccgggaagtggtgcccccagaaccccgggtgaccatccaaggcttctgtggagggtttccaatgaggttgctggaaacagtgcccgacttgrcaaacggatttgggcctaaatgaaagaaagttcaacctttggagagattggaaattcagctctcataactaaggttaatttagtataaaactagatttgatagtgagggtataaagtgtaaccatcaggttaaacctctcctgtcgattcctaggcttccttgcttcgagaattgaaatggaagtggggggtgtccctaactactgtagaatctgggacttgggcaaatgttttgtgtggcctccttaaaactagctgtttatgttatgatttttattctttgtgagttaattaggaataaagtcattttcttccaaaaaaaaaaaaaaaaaaagtcgacgc

SEQ ID NO: 4517 - DNA, 10437 bp, Homo sapiens
  SIMILAR (2143)..(6975): 761254mologous to Homo sapiens Human placental calcium sensor protein,accession number R97209,Smith-Waterman Score=6522.
atgacagttatccgaagtggcattgcttacatactgcatttgaaatcgtatgatgtcaacatccagactggttctaacgcctgtaatcaacccacgcatcctaacggtgactgcagccacttctgcttcccggtgccaaatttccagcgagtgtgtgggtgcccttatggaatgaggctggcttccaatcacttgacatgcgagggggacccaaccaatgaaccacccacagagcagtgtggcttattttccttcccctgtaaaaatggcagatgtgtgcccaattactatctctgtgatggagtcgatgattgtcatgataacagtgatgagcaactatgtggcacacttaataatacctgttcatcttcggcgttcacctgtggccatggggagtgcattcctgcacactggcgctgtgacaaacgcaacgactgtgtggatggcagtgatgagcacaactgccccacccacgcacctgcttcctgccttgacacccaatacacctgtgataatcaccagtgtatctcaaagaactgggtctgtgacacagacaatgattgtggggatggatctgatgaaaagaactgcatattaaactgtactgcttctcaattcaagtgtgccagtggggataaatgtattggcgtcacaaatcgttgtgatggtgtttttgattgcagtgacaactcggatgaagcaggctgtccaaccaggcctcctggtatgtgccactcagatgaatttcagtgccaagaagatggtatctgcatcccgaacttctgggaatgtgatgggcatccagactgcctctatggatctgatgagcacaatgcctgtgtccccaagacttgcccttcatcatatttccactgtgacaacggaaactgcatccacagggcatggctctgtgatcgggacaatgactgcggggatatgagtgatgagaaggactgccctactcagccctttcgctgtcctagttggcaatggcagtgtcttggccataacatctgtgtgaatctgagtgtagtgtgtgatggcatctttgactgccccaatgggacagatgagtccccactttgcaatgggaacagctgctcagatttcaatggtggttgtactcacgagtgtgttcaagagccctttggggctaaatgcctatgtccattgggattcttacttgccaatgattctaagacctgtgaagacatagatgaatgtgatattctaggctcttgtagccagcactgttacaatatgagaggttctttccggtgctcgtgtgatacaggctacatgttagaaagtgatgggaggacttgcaaagttacagcatctgagagtctgctgttacttgtggcaagtcagaacaaaattattgccgacagtgtcacctcccaggtccacaatatctattcattggtcgagaatggttcttacattgtagctgttgattttgattcaattagtggtcgtatcttttggtctgatgcaactcagggtaaaacctggagtgcgtttcaaaatggaacggacagaagagtggtatttgacagtagcatcatcttgactgaaactattgcaatagattgggtaggtcgtaatctttactggacagactatgctctggaaacaattgaagtctccaaaattgatgggagccacaggactgtgctgattagtaaaaacctaacaaatccaagaggactagcattagatcccagaatgaatgagcatctactgttctggtctgactggggccaccaccctcgcatcgagcgagccagcatggacggcagcatgcgcactgtcattgtccaggacaagatcttctggccctgcggcttaactattgactaccccaacagactgctctacttcatggactcctatcttgattacatggacttttgtgattataatggacaccatcggagacaggtgatagccagtgatttgattatacggcacccctatgccctaactctctttgaagactctgtgtactggactgaccgtgctactcgtcgggttatgcgagccaacaagtggcatggagggaaccagtcagttgtaatgtataatattcaatggccccttgggattgttgcggttcatccttcgaaacaaccaaattatgatcaacctttcttaataactgtaaggcaacatataatttttggaatctcccttaatcctgaggtgaagagcaatgatgctatggtccccatagcagggatacagaatggtttagatgttgaatttgatgatgctgagcaatacatctattgggttgaaaatccaggtgaaattcacagagtgaagacagatggcaccaacaggacagtatttgcttctatatctatggtggggccttctatgaacctggccttagattggatttcaagaaacctttattctaccaatcctagaactcagtcaatcgaggttttgacactccacggagatatcagatacagaaaaacattgattgccaatgatgggacagctcttggagttggctttccaattggcataactgttgatcctgctcgtgggaagctgtactggtcagaccaaggaactgacagtggggttcctgccaagatcgccagtgctaacatggatggcacatctgtgaaaactctctttactgggaacctcgaacacctggagtgtgtcactcttgacatcgaagagcagaaactctactgggcagtcactggaagaggagtgattgaaagaggaaacgtggatggaacagatcgaatgatcctggtacaccagctttcccacccctggggaattgcagtccatgattctttcctttattatactgatgaacagtatgaggtcattgaaagagttgataaggccactggggccaacaaaatagtcttgagagataatgttccaaatctgaggggtcttcaagtttatcacagacgcaatgccgccgaatcctcaaatggctgtagcaacaacatgaatgcctgtcagcagatttgcctgcctgtaccaggaggattgttttcctgcgcctgtgccactggatttaaactcaatcctgataatcggtcctgctctccatataactctttcattgttgtttcaatgctgtctgcaatcagaggctttagcttggaattgtcagatcattcagaaaccatggtgccggtggcaggccaaggacgaaacgcactgcatgtggatgtggatgtgtcctctggctttatttattggtgtgattttagcagctcagtggcatctgataatgcgatccgtagaattaaaccagatggatcttctctgatgaacattgtgacacatggaataggagaaaatggagtccggggtattgcagtggattgggtagcaggaaatctttatttcaccaatgcctttgtttctgaaacactgatagaagttctgcggatcaatactacttaccgccgtgttcttcttaaagtcacagtggacatgcctaggcatattgttgtagatcccaagaacagatacctcttctgggctgactatgggcagagaccaaagattgagcgttctttccttgactgtaccaatcgaacagtgcttgtgtcagagggcattgtcacaccacggggcttggcagtggaccgaagtgatggctacgtttattgggttgatgattctttagatataattgcaaggattcgtatcaatggagagaactctgaagtgattcgttatggcagtcgttacccaactccttatggcatcactgtttttgaaaattctatcatatgggtagataggaatttgaaaaagatcttccaagccagcaaggaaccagagaacacagagccacccacagtgataagagacaatatcaactggctaagagatgtgaccatctttgacaagcaagtccagccccggtcaccagcagaggtcaacaacaacccttgcttggaaaacaatggtgggtgctctcatctctgctttgctctgcctggattgcacaccccaaaatgtgactgtgcctttgggaccctgcaaagtgatggcaagaattgtgccatttcaacagaaaatttcctcatctttgccttgtctaattccttgagaagcttacacttggaccctgaaaaccatagcccacctttccaaacaataaatgtggaaagaactgtcatgtctctagactatgacagtgtaagtgatagaatctacttcacacaaaatttagcctctggagttggacagatttcctatgccaccctgtcttcagggatccatactccaactgtcattgcttcaggtatagggactgctgatggcattgcctttgactggattactagaagaatttattacagtgactacctcaaccagatgattaattccatggctgaagatgggtctaaccgcactgtgatagcccgcgttccaaaaccaagagcaattgtgttagatccctgccaagggtacctgtactgggctgactgggatacacatgccaaaatcgagagagccacattgggaggaaacttccgcgtacccattgtgaacagcagtctggtcatgcccagtgggctgactctggactatgaagaggaccttctctactgggtggatgctagtctgcagaggattgaacgcagcactctgacgggcgtggatcgtgaagtcattgtcaatgcagccgttcatgcttttggcttgactctctatggccagtatatttactggactgacttgtacacacaaagaatttaccgagctaacaaatatgacgggtcaggtcagattgcaatgaccacaaatttgctctcccagcccaggggaatcaacactgttgtgaagaaccagaaacaacagtgtaacaatccttgtgaacagtttaatgggggctgcagccatatctgtgcaccaggtccaaatggtgccgagtgccagtgtccacatgagggcaactggtatttggccaacaacaggaagcactgcattgtggacaatggtgaacgatgtggtgcatcttccttcacctgctccaatgggcgctgcatctcggaagagtggaagtgtgataatgacaacgactgtggggatggcagtgatgagatggaaagtgtctgtgcacttcacacctgctcaccgacagccttcacctgtgccaatgggcgatgtgtccaatactcttaccgctgtgattactacaatgactgtggtgatggcagtgatgaggcagggtgcctgttcagggactgcaatgccaccacggagtttatgtgcaataacagaaggtgcatacctcgtgagtttatctgcaatggtgtagacaactgccatgataataacacttcagatgagaaaaattgccccactcacacgtgcagcagcagtgagttccaatgcgcatctgggcgctgtattcctcaacattggtattgtgatcaagaaacagattgttttgatgcctctgatgaacctgcctcttgtggtcactctgagcgaacatgcctagctgatgagttcaagtgtgatggtgggaggtgcatcccaagcgaatggatctgtgacggtgataatgactgtggggatatgagtgacgaggataaaaggcaccagtgtcagaatcaaaactgctcggattccgagtttctctgtgtaaatgacagacctccggacaggaggtgcattccccagtcttgggtctgtgatggcgatgtggattgtactgacggctacgatgagaatcagaattgcaccaggagaacttgctctgaaaatgaattcacctgtggttacggactgtgtatcccaaagatattcaggtgtgaccggcacaatgactgtggtgactatagcgacgagaggggctgcttataccagacttgccaacagaatcagtttacctgtcagaacgggcgctgcattagtaaaaccttcgtctgtgatgaggataatgactgtggagacggatctgatgagctgatgcacctgtgccacaccccagaacccacgtgtccacctcacgagttcaagtgtgacaatgggcgctgcatcgagatgatgaaactctgcaaccacctagatgactgtttggacaacagcgatgagaaaggctgtggcattaatgaatgccatgacccttcaatcagtggctgcgatcacaactgcacagacaccttaaccagtttctattgttcctgtcgtcctggttacaagctcatgtctgacaagcggacttgtgttgatattgatgaatgcacagagatgccttttgtctgtagccagaagtgtgagaatgtaataggctcctacatctgtaagtgtgccccaggctacctccgagaaccagatggaaagacctgccggcaaaacagtaacatcgaaccctatctcatttttagcaaccgttactatttgagaaatttaactatagatggctatttttactccctcatcttggaaggactggacaatgttgtggcattagattttgaccgagtagagaagagattgtattggattgatacacagaggcaagtcattgagagaatgtttctgaataagacaaacaaggagacaatcataaaccacagactaccagctgcagaaagtctggctgtagactgggtttccaggtacctctactgggcagactggggtcaccgcgcatacattgggagagtaggcatggatggaaccaacaagtctgtgataatctccaccaagttagagtggcctaatggcatcaccattgattacaccaatgatctactctactgggcagatgcccacctgggttacatagagtactctgatttggagggccaccatcgacacacggtgtatgatggggcactgcctcaccctttcgctattaccatttttgaagacactatttattggacagattggaatacaaggacagtggaaaagggaaacaaatatgatggatcaaatagacagacactggtgaacacaacacacagaccatttgacatccatgtgtaccatccatataggcagcccattgtgagcaatccctgtggtaccaacaatggtggctgttctcatctctgcctcatcaagccaggaggaaaagggttcacttgcgagtgtccagatgacttccgcacccttcagctgagtggcagcacctactgcatgcccatgtgctccagcacccagttcctgtgcgctaacaatgaaaatgcctctctagcccgtggacagacattgaccttcaaggctccaagggatgggagttttctaggccacgagagagctcatgcatgtcatttcttggaattcagtgttgacttcttctctccagataactgttgcccctggtgctttgctaaagaagtgctgtatgttctctgtgcaggtgcattcctatctggtggaaatgtgatggacagaaagactgctcagatggctctgatgaactggccctttgcccgcagcgcttctgccgactgggacagttccagtgcagtgacggcaactgcaccagcccgcagactttatgcaatgctcaccaaaattgccctgatgggtctgatgaagaccgtcttctttgtgtgcgccaacaaacgttgcatcccagaatcctggcagtgtgacacatttaacgactgtgaggataactcagatgaagacagttcccactgtgccagcaggacctgccggccgggccagtttcggtgtgctaatggccgctgcatcccgcaggcctggaagtgtgatgtggataatgattgtggagaccactcggatgagcccattgaagaatgcatgagctctgcccatctctgtgacaacttcacagaattcagctgcaaaacaaattaccgctgcatcccaaagtgggccgtgtgcaatggtgtagatgactgcagggacaacagtgatgagcaaggctgtgaggagaggacatgccatcctgtgggggatttccgctgtaaaaatcaccactgcatccctcttcgttggcagtgtgatgggcaaaatgactgtggagataactcagatgaggaaaactgtgctccccgggagtgcacagagagcgagtttcgatgtgtcaatcagcagtgcattccctcgcgatggatctgtgaccattacaacgactgtggggacaactcagatgaacgggactgtgagatgaggacctgccatcctgaatattttcagtgtacaagtggacattgtgtacacagtgaactgaaatgcgatggatccgctgactgtttggatgcgtctgatgaagctgattgtcccacacgctttcctgatggtgcatactgccaggctactatgttcgaatgcaaaaaccatgtttgtatcccgccatattggaaatgtgatggcgatgatgactgtggcgatggttcagatgaagaacttcacctgtgcttggatgttccctgtaattcaccaaaccgtttccggtgtgacaacaatcgctgcatttatagtcatgaggtgtgcaatggtgtggatgactgtggagatggaactgatgagacagaggagcactgtagaaaaccgacccctaaaccttgtacagaatatgaatataagtgtggcaatgggcattgcattccacatgacaatgtgtgtgatgatgccgatgactgtggtgactggtccgatgaactgggttgcaatatcaatgaatgtgaacaatttgggacttgtccccagcactgcagaaataccaaaggaagttatgagtgtgtctgtgctgatggcttcacgtctatgagtgaccgccctggaaaacgatgtgcagctgagggtagctctcctttgttgctactgcctgacaatgtccgaattcgaaaatataatctctcatctgagaggttctcagagtatcttcaagatgaggaatatatccaagctgttgattatgattgggatcccaaggacataggcctcagtgttgtgtattacactgtgcgaggggagggctctaggtttggtgctatcaaacgtgcctacatccccaactttgaatccggccgcaataatcttgtgcaggaagttgacctgaaactgaaatacgtaatgcagccagatggaatagcagtggactgggttggaaggcatatttactggtcagatgtcaagaataaacgcattgaggtggctaaacttgatggaaggtacagaaagtggctgatttccactgacctggaccaaccagctgctattgctgtgaatcccaaactagggcttatgttctggactgactggggaaaggaacctaaaatcgagtctgcctggatgaatggagaggaccgcaacatcctggttttcgaggaccttggttggccaactggcctttctatcgattatttgaacaatgaccgaatctactggagtgacttcaaggaggacgttattgaaaccataaaatatgatgggactgataggagagtcattgcaaaggaagtgcccaacctttgcaaacagatctgcagccacctctgccttctgagacctggaggatacagctgtgcctgtccccaaggctccagctttatagaggggagcaccactgagtgtgatgcagccatcgaactgcctatcaacctgccccccccatgcaggtgcatgcacggaggaaattgctattttgatgagactgacctccccaaatgcaagtgtcctagcggctacaccggaaaatattgtgaaatggcgttttcaaaaggcatctctccaggaacaaccgcagtagctgtgctgttgacaatcctcttgatcgtcgtaattggagctctggcaattgcaggattcttccactatagaaggaccggctcccttttgcctgctctgcccaagctgccaagcttaagcagtctcgtcaagccctctgaaaatgggaatggggtgaccttcagatcaggggcagatcttaacatggatattggagtgtctggttttggacctgagactgctattgacaggtcaatggcaatgagtgaagactttgtcatggaaatggggaagcagcccataatatttgaaaacccaatgtactcagccagagacagtgctgtcaaagtggttcagccaatccaggtgactgtatctgaaaatgtggataataagaattatggaagtcccataaacccttctgagatagttccagagacaaacccaacttcaccagctgctgatggaactcaggtgacaaaatggaatctcttcaaacgaaaatctaaacaaactaccaactttgaaaatccaatctatgcacagatggagaacgagcaaaaggaaagtgttgctgcgacaccacctccatcaccttcgctccctgctaagcctaagcctccttcgagaagagacccaactccaacctattctgcaacagaagacacttttaaagacaccgcaaatcttgttaaagaagactctgaagtatag

SEQ ID NO: 4518 - DNA, 852 bp, Homo sapiens
  SIMILAR (624)..(487): 321254mologous to Bacteriophage phi-C31 gp48,accession number AJ006589,Smith-Waterman Score=57.
atgggcactggcttggtctttaggccacaggcaggtgttgttgtgggttggcaccgggctttccattgtgttgggttctttaccccggtggcaggggttctgcttgatccagaaccccatgtgctgaggactggttcacctctccagagggaacagagaactaatggaagaacagacctaagcagtctattaccgaacctcaacttcgattctccgcctcgttgtaaacataagaaccagttggctataactttacgaaaacgaatccgcaagctggctactagtctgttctcatcaaccatatttcgcatctctggcaccagtgtaattattagcgctcccggagccgggctgcctctacctgcgctttttccaacgagatgtcaaccgaagttcagtaggtcaatagaccctactggcaaagctgttcaaactgcggatatccggctatctgctagagctacgctatggttaggcggttcgatagaggagagtccggttctgtgttcgactctccgactgctgctgcggcggcttccgccaccccttacctggaccagtccgaacagaccgactcaaccctgtaccgcgcaaacacagaccaaccagagcgtcggaatcgccgcacctagtgcaatacgcgttatttatccagagtcggttgtactcaacgctgttatttatttaccaggagacccagaagtatccgggttgcccagggccttcaaaaggcgttttagtgtcgaagtacggctcgattgtggaaccttcaaactcctattagtttattgtactcatccgggcgataaaaaagtgaatacgtgtaaaactggtgcattggttgcattttag

SEQ ID NO: 4519 - DNA, 477 bp, Homo sapiens
  SIMILAR (322)..(233): 431254mologous to Homo sapiens Human parathyroid calcium sensor protein,accession number W43314,Smith-Waterman Score=84.
tttttttttttttttttaccaagtacaaaggatttaatcagaaaattatccaatggtgatgtatttgaattcaattatggttaccccctacacagatgtgaactcatagaggaactgaaatccttcctacaaagctacacagtgactgtgacaatggtgatgcacaccaggctactgttcagaatgagtttatggccagtaaactgtggtcaggaaacttactgcaaagtggggactcatctgtcccattggggcagtcaaagatgccatcacacactacactcagattcacacagatgttatggccaagacactgccattgccaacttaggacagcgaaagggctgagtagggcagtccttctcatcactcatatccccgcagtcattgtcccgatcacagagccatgccctgtggatgcagtttccgttgtcacagtggaaatatgatgaagggcaagtcttggggacacaggca

SEQ ID NO: 4520 - DNA, 789 bp, Homo sapiens
  SIMILAR (143)..(175): 541254mologous to Mogurnda adspersa ATPase8,accession number AF046110,Smith-Waterman Score=39.
atggaaactcatagaagccctggcaggacaagttcaagggcacttgagtacagccctcgaaggcaagcctttgagcagggtaatgtggatattgcagtccgggagcggaggcactggccagattaccctgctcaaagggtggccgtggctggtgctactcgtggactgctggttgcggcggcggttgactggctatcgcaggattcaaagtggctgcaggattcgcacatagtacctgacgtaaaactgtgtgtcgtagccagtgcctaccggcaatcgtatcagtctctgggtaacgatatttcgctaggctatcgatgtcaaccgaagttcagtaggtcaatagaccctactggcaaagctgttcaaactgcggatatccggctatctgctagagctacgctatggttaggcggttcgatagaggagagtccggttctgtgttcgactctccgactgctgctgcggcgcttccgccaccccttacctggaccagtccgaacagaccgactcaaccctgtaccgcgcaaacacagaccaaccagagcgtcggaatcgccgcacctagtgcgaatacgcgttatttatccagagtcggttgtactcaacgctgttatttatttaccaggagacccagaagtatccgggttgcccagggccttcaaaaggcgttttagtgtcgaagtacggctcgattgtggaaccttcaaactcctattagtttattgtactcatccgggcgataaaaaagtgaatacgtgtaaaactggtgcattggttgcattttag

SEQ ID NO: 4521 - DNA, 14392 bp, Homo sapiens
  SIMILAR (105)..(14069): 1001254mologous to Homo sapiens gp330 precursor,accession number U33837,Smith-Waterman Score=26187.
gcagacctaaaggagcgttcgctagcagaggcgctgccggtgcggtgtgctacgcgcgcccacctcccggggaaggaacggcgaggccggggaccgtcgcggagatggatcgcgggccggcagcagtggcgtgcacgctgctcctggctctcgtcgcctgcctagcgccggccagtggccaagaatgtgacagtgcgcattttcgctgtggaagtgggcattgcatccctgcagactggaggtgtgatgggaccaaagactgttcagatgacgcggatgaaattggctgcgctgttgtgacctgccagcagggctatttcaagtgccagagtgagggacaatgcatccccagctcctgggtgtgtgaccaagatcaagactgtgatgatggctcagatgaacgtcaagattgctcacaaagtacatgctcaagtcatcagataacatgctccaatggtcagtgtatcccaagtgaatacaggtgcgaccacgtcagagactgccccgatggagctgatgagaatgactgccagtacccaacatgtgagcagcttacttgtgacaatggggcctgctataacaccagtcagaagtgtgattggaaagttgattgcagggactcctcagatgaaatcaactgcactgagatatgcttgcacaatgagttttcatgtggcaatggagagtgtatccctcgtgcttatgtctgtgaccatgacaatgattgccaagacggcagtgatgaacatgcttgcaactatccgacctgcggtggttaccagttcacttgccccagtggccgatgcatttatcaaaactgggtttgtgatggagaagatgactgtaaagataatggagatgaagatggatgtgaaagcggtcctcatgatgttcataaatgttccccaagagaatggtcttgcccagagtcgggacgatgcatctccatttataaagtttgtgatgggattttagattgcccaggaagagaagatgaaaacaacactagtaccggaaaatactgtagtatgactctgtgctctgccttgaactgccagtaccagtgccatgagacgccgtatggaggagcgtgtttttgtcccccaggttatatcatcaaccacaatgacagccgtacctgtgttgagtttgatgattgccagatatggggaatttgtgaccagaagtgtgaaagccgacctggccgtcacctgtgccactgtgaagaagggtatatcttggagcgtggacagtattgcaaagctaatgattcctttggcgaggcctccattatcttctccaatggtcgggatttgttaattggtgatattcatggaaggagcttccggatcctagtggagtctcagaatcgtggagtggccgtgggtgtggctttccactatcacctgcaaagagttttttggacagacaccgtgcaaaataaggttttttcagttgacattaatggtttaaatatccaagaggttctcaatgtttctgttgaaaccccagagaacctggctgtggactgggttaataataaaatctatctagtggaaaccaaggtcaaccgcatagatatggtaaatttggatggaagctatcgggttacccttataactgaaaacttggggcatcctagaggaattgccgtggacccaactgttggttatttatttttctcagattgggagagcctttctggggaacctaagctggaaagggcattcatggatggcagcaaccgtaaagacttggtgaaaacaaagctgggatggcctgctggggtaactctggatatgatatcgaagcgtgtttactgggttgactctcggtttgattacattgaaactgtaacttatgatggaattcaaaggaagactgtagttcatggaggctccctcattcctcatccctttggagtaagcttatttgaaggtcaggtgttctttacagattggacaaagatggccgtgctgaaggcaaacaagttcacagagaccaacccacaagtgtactaccaggcttccctgaggccctatggagtgactgtttaccattccctcagacagccctatgctaccaatccgtgtaaagataacaatgggggctgtgagcaggtctgtgttctcagccacagaacagataatgatggtttgggtttccgttgcaagtgcacattcggcttccaactggatacagatgagcgccactgcattgctgttcagaatttcctcattttttcatcccaagttgctattcgtgggatcccgttcaccttgtctacccaggaagatgtcatggttccagtttcggggaatccttctttctttgtcgggattgattttgacgcccaggacagcactatctttttttcagatatgtcaaaacacatgatttttaagcaaaagattgatggcacaggaagagaaattctcgcagctaacagggtggaaaatgttgaaagtttggcttttgattggatttcaaagaatctctattggacagactctcattacaagagtatcagtgtcatgaggctagctgataaaacgagacgcacagtagttcagtatttaaataacccacggtcggtggtagttcatccttttgccgggtatctattcttcactgattggttccgtcctgctaaaattatgagagcatggagtgacggatctcacctcttgcctgtaataaacactactcttggatggcccaatggcttggccatcgattgggctgcttcacgattgtactgggtagatgcctattttgataaaattgagcacagcacctttgatggtttagacagaagaagactgggccatatagagcagatgacacatccgtttggacttgccatctttggagagcatttattttttactgactggagactgggtgccattattcgagtcaggaaagcagatggtggagaaatgacagttatccgaagtggcattgcttacatactgcatttgaaatcgtatgatgtcaacatccagactggttctaacgcctgtaatcaacccacgcatcctaacggtgactgcagccacttctgcttcccggtgccaaatttccagcgagtgtgtgggtgcccttatggaatgaggctggcttccaatcacttgacatgcgagggggacccaaccaatgaaccacccacggagcagtgtggcttattttccttcccctgtaaaaatggcagatgtgtgcccaattactatctctgtgatggagtcgatgattgtcatgataacagtgatgagcaactatgtggcacacttaataatacctgttcatcttcggcgttcacctgtggccatggggagtgcattcctgcacactggcgctgtgacaaacgcaacgactgtgtggatggcagtgatgagcacaactgccccacccacgcacctgcttcctgccttgacacccaatacacctgtgataatcaccagtgtatctcaaagaactgggtctgtgacacagacaatgattgtggggatggatctgatgaaaagaactgcaattcgacagagacatgccaacctagtcagtttaattgccccaatcatcgatgtattgacctatcgtttgtctgtgatggtgacaaggattgtgttgatggatctgatgaggttggttgtgtattaaactgtactgcttctcaattcaagtgtgccagtggggataaatgtattggcgtcacaaatcgttgtgatggtgtttttgattgcagtgacaactcggatgaagcgggctgtccaaccaggcctcctggtatgtgccactcagatgaatttcagtgccaagaagatggtatctgcatcccgaacttctgggaatgtgatgggcatccagactgcctctatggatctgatgagcacaatgcctgtgtccccaagacttgcccttcatcatatttccactgtgacaacggaaactgcatccacagggcatggctctgtgatcgggacaatgactgcggggatatgagtgatgagaaggactgccctactcagccctttcgctgtcctagttggcaatggcagtgtcttggccataacatctgtgtgaatctgagtgtagtgtgtgatggcatctttgactgccccaatgggacagatgagtccccactttgcaatgggaacagctgctcagatttcaatggtggttgtactcacgagtgtgttcaagagccctttggggctaaatgcctatgtccattgggattcttacttgccaatgattctaagacctgtgaagacatagatgaatgtgatattctaggctcttgtagccagcactgttacaatatgagaggttctttccggtgctcgtgtgatacaggctacatgttagaaagtgatgggaggacttgcaaagttacagcatctgagagtctgctgttacttgtggcaagtcagaacaaaattattgccgacagtgtcacctcccaggtccacaatatctattcattggtcgagaatggttcttacattgtagctgttgattttgattcaattagtggtcgtatcttttggtctgatgcaactcagggtaaaacctggagtgcgtttcaaaatggaacggacagaagagtggtatttgacagtagcatcatcttgactgaaactattgcaatagattgggtaggtcgtaatctttactggacagactatgctctggaaacaattgaagtctccaaaattgatgggagccacaggactgtgctgattagtaaaaacctaacaaatccaagaggactagcattagatcccagaatgaatgagcatctactgttctggtctgactggggccaccaccctcgcatcgagcgagccagcatggacggcagcatgcgcactgtcattgtccaggacaagatcttctggccctgcggcttaactattgactaccccaacagactgctctacttcatggactcctatcttgattacatggacttttgcgattataatggacaccatcggagacaggtgatagccagtgatttgattatacggcacccctatgccctaactctctttgaagactctgtgtactggactgaccgtgctactcgtcgggttatgcgagccaacaagtggcatggagggaaccagtcagttgtaatgtataatattcaatggccccttgggattgttgcggttcatccttcgaaacaaccaaattccgtgaatccatgtgccttttcccgctgcagccatctctgcctgctttcctcacaggggcctcatttttactcctgtgtttgtccttcaggatggagtctgtctcctgatctcctgaattgcttgagagatgatcaacctttcttaataactgtaaggcaacatataatttttggaatctcccttaatcctgaggtgaagagcaatgatgctatggtccccatagcagggatacagaatggtttagatgttgaatttgatgatgctgagcaatacatctattgggttgaaaatccaggtgaaattcacagagtgaagacagatggcaccaacaggacagtatttgcttctatatctatggtggggccttctatgaacctggccttagattggatttcaagaaacctttattctaccaatcctagaactcagtcaatcgaggttttgacactccacggagatatcagatacagaaaaacattgattgccaatgatgggacagctcttggagttggctttccaattggcataactgttgatcctgctcgtgggaagctgtactggtcagaccaaggaactgacagtggggttcctgccaagatcgccagtgctaacatggatggcacatctgtgaaaactctctttactgggaacctcgaacacctggagtgtgtcactcttgacatcgaagagcagaaactctactgggcagtcactggaagaggagtgattgaaagaggaaacgtggatggaacagatcggatgatcctggtacaccagctttcccacccctggggaattgcagtccatgattctttcctttattatactgatgaacagtatgaggtcattgaaagagttgataaggccactggggccaacaaaatagtcttgagagataatgttccaaatctgaggggtcttcaagtttatcacagacgcaatgccgccgaatcctcaaatggctgtagcaacaacatgaatgcctgtcagcagatttgcctgcctgtaccaggaggattgttttcctgcgcctgtgccactggatttaaactcaatcctgataatcggtcctgctctccatataactctttcattgttgtttcaatgctgtctgcaatcagaggctttagcttggaattgtcagatcattcagaaaccatggtgccggtggcaggccaaggacgaaacgcactgcatgtggatgtggatgtgtcctctggctttatttattggtgtgattttagcagctcagtggcatctgataatgcgatccgtagaattaaaccagatggatcttctctgatgaacattgtgacacatggaataggagaaaatggagtccggggtattgcagtggattgggtagcaggaaatctttatttcaccaatgcctttgtttctgaaacactgatagaagttctgcggatcaatactacttaccgccgtgttcttcttaaagtcacagtggacatgcctaggcatattgttgtagatcccaagaacagatacctcttctgggctgactatgggcagagaccaaagattgagcgttctttccttgactgtaccaatcgaacagtgcttgtgtcagagggcattgtcacaccacggggcttggcagtggaccgaagtgatggctacgtttattgggttgatgattctttagatataattgcaaggattcgtatcaatggagagaactctgaagtgattcgttatggcagtcgttacccaactccttatggcatcactgtttttgaaaattctatcatatgggtagataggaatttgaaaaagatcttccaagccagcaaggaaccagagaacacagagccacccacagtgataagagacaatatcaactggctaagagatgtgaccatctttgacaagcaagtccagccccggtcaccagcagaggtcaacaacaacccttgcttggaaaacaatggtgggtgctctcatctctgctttgctctgcctggattgcacaccccaaaatgtgactgtgcctttgggaccctgcaaagtgatggcaagaattgtgccatttcaacagaaaatttcctcatctttgccttgtctaattccttgagaagcttacacttggaccctgaaaaccatagcccacctttccaaacaataaatgtggaaagaactgtcatgtctctagactatgacagtgtaagtgatagaatctacttcacacaaaatttagcctctggagttggacagatttcctatgccaccctgtcttcagggatccatactccaactgtcattgcttcaggtatagggactgctgatggcattgcctttgactggattactagaagaatttattacagtgactacctcaaccagatgattaattccatggctgaagatgggtctaaccgcactgtgatagcccgcgttccaaaaccaagagcaattgtgttagatccctgccaagggtacctgtactgggctgactgggatacacatgccaaaatcgagagagccacattgggaggaaacttccgggtacccattgtgaacagcagtctggtcatgcccagtgggctgactctggactatgaagaggaccttctctactgggtggatgctagtctgcagaggattgaacgcagcactctgacgggcgtggatcgtgaagtcattgtcaatgcagccgttcatgcttttggcttgactctctatggccagtatatttactggactgacttgtacacacaaagaatttaccgagctaacaaatatgacgggtcaggtcagattgcaatgaccacaaatttgctctcccagcccaggggaatcaacactgttgtgaagaaccagaaacaacagtgtaacaatccttgtgaacagtttaatgggggctgcagccatatctgtgcaccaggtccaaatggtgccgagtgccagtgtccacatgagggcaactggtatttggccaacaacaggaagcactgcattgtggacaatggtgaacgatgtggtgcatcttccttcacctgctccaatgggcgctgcatctcggaagagtggaagtgtgataatgacaacgactgtggggatggcagtgatgagatggaaagtgtctgtgcacttcacacctgctcaccgacagccttcacctgtgccaatgggcgatgtgtccaatactcttaccgctgtgattactacaatgactgtggtgatggcagtgatgaggcagggtgcctgttcagggactgcaatgccaccacggagtttatgtgcaataacagaaggtgcatacctcgtgagtttatctgcaatggtgtagacaactgccatgataataacacttcagatgagaaaaattgccctgatcgcacttgccagtctggatacacaaaatgtcataattcaaatatttgtattcctcgcgtttatttgtgtgacggagacaatgactgtggagataacagtgatgaaaaccctacttattgcaccactcacacatgcagcagcagtgagttccaatgcgcatctgggcgctgtattcctcaacattggtattgtgatcaagaaacagattgttttgatgcctctgatgaacctgcctcttgtggtcactctgagcgaacatgcctagctgatgagttcaagtgtgatggtgggaggtgcatcccaagcgaatggatctgtgacggtgataatgactgtggggatatgagtgacgaggataaaaggcaccagtgtcagaatcaaaactgctcggattccgagtttctctgtgtaaatgacagacctccggacaggaggtgcattccccagtcttgggtctgtgatggcgatgtggattgtactgacggctacgatgagaatcagaattgcaccaggagaacttgctctgaaaatgaattcacctgtggttacggactgtgtatcccaaagatattcaggtgtgaccggcacaatgactgtggtgactatagcgacgagaggggctgcttataccagacttgccaacagaatcagtttacctgtcagaacgggcgctgcattagtaaaaccttcgtctgtgatgaggataatgactgtggagacggatctgatgagctgatgcacctgtgccacaccccagaacccacgtgtccacctcacgagttcaagtgtgacaatgggcgctgcatcgagatgatgaaactctgcaaccacctagatgactgtttggacaacagcgatgagaaaggctgtggcattaatgaatgccatgacccttcaatcagtggctgcgatcacaactgcacagacaccttaaccagtttctattgttcctgtcgtcctggttacaagctcatgtctgacaagcggacttgtgttgatattgatgaatgcacagagatgccttttgtctgtagccagaagtgtgagaatgtaataggctcctacatctgtaagtgtgccccaggctacctccgagaaccagatggaaagacctgccggcaaaacagtaacatcgaaccctatctcatttttagcaaccgttactatttgagaaatttaactatagatggctatttttactccctcatcttggaaggactggacaatgttgtggcattagattttgaccgagtagagaagagattgtattggattgatacacagaggcaagtcattgagagaatgtttctgaataagacaaacaaggagacaatcataaaccacagactaccagctgcagaaagtctggctgtagactgggtttccagaaagctctactggttggatgcccgcctggatggcctctttgtctctgacctcaatggtggacaccgccgcatgctggcccagcactgtgtggatgccaacaacaccttctgctttgataatcccagaggacttgcccttcaccctcaatatgggtacctctactgggcagactggggtcaccgcgcatacattgggagagtaggcatggatggaaccaacaagtctgtgataatctccaccaagttagagtggcctaatggcatcaccattgattacaccaatgatctactctactgggcagatgcccacctgggttacatagagtactctgatttggagggccaccatcgacacacggtgtatgatggggcactgcctcaccctttcgctattaccatttttgaagacactatttattggacagattggaatacaaggacagtggaaaagggaaacaaatatgatggatcaaatagacagacactggtgaacacaacacacagaccatttgacatccatgtgtaccatccatataggcagcccattgtgagcaatccctgtggtaccaacaatggtggctgttctcatctctgcctcatcaagccaggaggaaaagggttcacttgcgagtgtccagatgacttccgcacccttcaactgagtggcagcacctactgcatgcccatgtgctccagcacccagttcctgtgcgctaacaatgaaaagtgcattcctatctggtggaaatgtgatggacagaaagactgctcagatggctctgatgaactggccctttgcccgcagcgcttctgccgactgggacagttccagtgcagtgacggcaactgcaccagcccgcagactttatgcaatgctcaccaaaattgccctgatgggtctgatgaagaccgtcttctttgtgagaatcaccactgtgactccaatgaatggcagtgcgccaacaaacgttgcatcccagaatcctggcagtgtgacacatttaacgactgtgaggataactcagatgaagacagttcccactgtgccagcaggacctgccggccgggccagtttcggtgtgctaatggccgctgcatcccgcaggcctggaagtgtgatgtggataatgattgtggagaccactcggatgagcccattgaagaatgcatgagctctgcccatctctgtgacaacttcacagaattcagctgcaaaacaaattaccgctgcatcccaaagtgggccgtgtgcaatggtgtagatgactgcagggacaacagtgatgagcaaggctgtgaggagaggacatgccatcctgtgggggatttccgctgtaaaaatcaccactgcatccctcttcgttggcagtgtgatgggcaaaatgactgtggagataactcagatgaggaaaactgtgctccccgggagtgcacagagagcgagtttcgatgtgtcaatcagcagtgcattccctcgcgatggatctgtgaccattacaacgactgtggggacaactcagatgaacgggactgtgagatgaggacctgccatcctgaatattttcagtgtacaagtggacattgtgtacacagtgaactgaaatgcgatggatccgctgactgtttggatgcgtctgatgaagctgattgtcccacacgctttcctgatggtgcatactgccaggctactatgttcgaatgcaaaaaccatgtttgtatcccgccatattggaaatgtgatggcgatgatgactgtggcgatggttcagatgaagaacttcacctgtgcttggatgttccctgtaattcaccaaaccgtttccggtgtgacaacaatcgctgcatttatagtcatgaggtgtgcaatggtgtggatgactgtggagatggaactgatgagacagaggagcactgtagaaaaccgacccctaaaccttgtacagaatatgaatataagtgtggcaatgggcattgcattccacatgacaatgtgtgtgatgatgccgatgactgtggtgactggtccgatgaactgggttgcaataaaggaaaagaaagaacatgtgctgaaaatatatgcgagcaaaattgtacccaattaaatgaaggaggatttatctgctcctgtacagctgggttcgaaaccaatgtttttgacagaacctcctgtctagatatcaatgaatgtgaacaatttgggacttgtccccagcactgcagaaataccaaaggaagttatgagtgtgtctgtgctgatggcttcacgtctatgagtgaccgccctggaaaacgatgtgcagctgagggtagctctcctttgttgctactgcctgacaatgtccgaattcgaaaatataatctctcatctgagaggttctcagagtatcttcaagatgaggaatatatccaagctgttgattatgattgggatcccaaggacataggcctcagtgttgtgtattacactgtgcgaggggagggctctaggtttggtgctatcaaacgtgcctacatccccaactttgaatccggccgcaataatcttgtgcaggaagttgacctgaaactgaaatacgtaatgcagccagatggaatagcagtggactgggttggaaggcatatttactggtcagatgtcaagaataaacgcattgaggtggctaaacttgatggaaggtacagaaagtggctgatttccactgacctggaccaaccagctgctattgctgtgaatcccaaactagggcttatgttctggactgactggggaaaggaacctaaaatcgagtctgcctggatgaatggagaggaccgcaacatcctggttttcgaggaccttggttggccaactggcctttctatcgattatttgaacaatgaccgaatctactggagtgacttcaaggaggacgttattgaaaccataaaatatgatgggactgataggagagtcattgcaaaggaagcaatgaacccttacagcctggacatctttgaagaccagttatactggatatctaaggaaaagggagaagtatggaaacaaaataaatttgggcaaggaaagaaagagaaaacgctggtagtgaacccttggctcactcaagttcgaatctttcatcaactcagatacaataagtcagtgcccaacctttgcaaacagatctgcagccacctctgccttctgagacctggaggatacagctgtgcctgtccccaaggctccagctttatagaggggagcaccactgagtgtgatgcagccatcgaactgcctatcaacctgccccccccatgcaggtgcatgcacggaggaaattgctattttgatgagactgacctccccaaatgcaagtgtcctagcggctacaccggaaaatattgtgaaatggcgttttcaaaaggcatctctccaggaacaaccgcagtagctgtgctgttgacaatcctcttgatcgtcgtaattggagctctggcaattgcaggattcttccactatagaaggaccggctcccttttgcctgctctgcccaagctgccaagcttaagcagtctcgtcaagccctctgaaaatgggaatggggtgaccttcagatcaggggcagatcttaacatggatattggagtgtctggttttggacctgagactgctattgacaggtcaatggcaatgagtgaagactttgtcatggaaatggggaagcagcccataatatttgaaaacccaatgtactcagccagagacagtgctgtcaaagtggttcagccaatccaggtgactgtatctgaaaatgtggataataagaattatggaagtcccataaacccttctgagatagttccagagacaaacccaacttcaccagctgctgatggaactcaggtgacaaaatggaatctcttcaaacgaaaatctaaacaaactaccaactttgaaaatccaatctatgcacagatggagaacgagcaaaaggaaagtgttgctgcgacaccacctccatcaccttcgctccctgctaagcctaagcctccttcgagaagagacccaactccaacctattctgcaacagaagacacttttaaagacaccgcaaatcttgttaaagaagactctgaagtatagctataccagctatttagggaataattagaaacacacttttgcacatatattttttacaaacagatgaaaaaagttaacattcagtactttatgaaaaaaatatatttttccctgtttgcctataggtggaggtatcctgtgtgtctttttttacttatgccgtctcatatttttacaaataattatcacaatgtactatatgtatatctttgcactgaagttgtctgaaggtaatactataaatatattgtatatttgtaaattttggaaagattatcctgttactgaatttgctaataaagatgtctgctgaaaaaaaa

SEQ ID NO: 4522 - DNA, 1305 bp, Homo sapiens
  SIMILAR (127)..(627): 951254mologous to Homo sapiens gp330 precursor,accession number U33837,Smith-Waterman Score=967.
atgctccttcagacagcaactgttgactataatataagatacaaagggagaattgtcatgaggacactgctgaaaaacactgtgatagttctcctaccttacaagggttcagggaagctctatggagaaagtagcactgaactgaatgttgaagtattaaactgtactgcttctcaattcaagtgtgccagtggggataaatgtattggcgtcacaaatcgttgtgatggtgtttttgattgcagtgacaactcggatgaagcaggctgtccaaccaggcctcctggtatgtgccactcagatgaatttcagtgccaagaagatggtatctgcatcccgaacttctgggaatgtgatgggcatccagactgcctctatggatctgatgagcacaatgcctgtgtccccaagacttgcccttcatcatatttccactgtgacaacggaaactgcatccacagggcatggctctgtgatcgggacaatgactgcggggatatgagtgatgagaaggactgccctactcagccctttcgctgtcctagttggcaatggcagtgtcttggccataacatctgtgtgaatctgagtgtagtgtgtgatggcatctttgactgccccaatggacagatgagtccccactttgcactggttgcggcggcggttgactggctatcgcaggattcaaagtggctgcaggattcgcacatagtacctgacgtaaaactgtgtgtcgtagccagtgcctaccggcaatcgtatcagtctctgggtaacgatatttcgctaggctatcgatgtcaaccgaagttcagtaggtcaatagaccctactggcaaagctgttcaaactgcggatatccggctatctgctagagctacgctatggttaggcggttcgatagaggagagtccggttctgtgttcgactctccgactgctgctgcggcggcttccgccaccccttacctggaccagtccgaacagaccgactcaaccctgtaccgcgcaaacacagaccaaccagagcgtcggaatcgccgcacctagtgcaatacgcgttatttatccagagtcggttgtactcaacgctgttatttatttaccaggagacccagaagtatccgggttgcccagggccttcaaaaggcgttttagtgtcgaagtacggctcgattgtggaaccttcaaactcctattagtttattgtactcatccgggcgatataaaagtgaatacgtgtaaaactggtgcattggttgcatttaggtgttttttaccaggtaatctccgaagtaaaccttag

SEQ ID NO: 4523 - DNA, 684 bp, Homo sapiens
  SIMILAR (256)..(678): 821254mologous to Homo sapiens aspartate aminotransferase precursor (2.6.1.1),accession number M22632,Smith-Waterman Score= 641.
atgggacctccagatatcatcctggcagtcattgaagactttaagagggacaccaatagcaaaaagatgaatctgggagttggtgcctaccgggatgataacggaaagccttggaccgtccccaaggcagaggcccagattgccacaaaaagtttggacaaggaatacctgtccactgggggactggctgaattttgcaaggcatctgcagaactagcccttggtgagaacagcgaagtcttgaaaagtggccgctggggaaatcacacgcccatcttcagggacactggcatgcagctacaaggttatcggctttatgaccccaagacttgcgattttgacttcacaggcgctgtggagggcctttcaaaaataccagagcaaaatgttgttcttctgcatgcctgcacccacaatcccacgggagtggacccaggtctggaacagtggaaggatacagcaacaatggtgaagaagaagagtctctttgccttctttgacatagcctaccaaggctttaccagtggtgatggtgataaggatgcccgggctgtgcaccacttctttgaacagggcattaatgtttgtctctgccaatcatatgccaagaacatgggcttatattgtgagcgtgtaggagccttcactgtagtatgcaaagatgcgatgaaaccaaaagggtag

SEQ ID NO: 4524 - DNA, 1356 bp, Homo sapiens
  SIMILAR (1317)..(1355): 921254mologous to Homo sapiens putative p150,accession number U93563,Smith-Waterman Score=77.
atgggcagaaagtacaccttgaaatgggaattcgaggaaggcttcactgagaagaaagaattgaagaaggtgaccagtgaaggatatatcacaccggtcgagatctatgactaccgccagtactgttacgcccttcaacgacccatcgctacgacacagatcgatgacgtacgcgacggccatacgacccggctcgccaaactagaaaagcaagagcaaacacattcaaaagctagcagaaggcaagaaataattaagatcagagcagaaccgaaggaaatagagacacaaaaaacccttcaaaaaattaatgaatccaggagctggttttttgaaaagatcaacaaaattgatagactgctggcaagactaataaagaagaaaagagagaaaaatcaaatagacgcaataaaaaatgataaaggggatatcaccaccaatcccacagaaatacaaactaccatcagagaatactataaacacctctatgcaaataaactagaaaatctagaggaaatggataaattcctccacacatatatcctcccaagactaaaccaggaagaagttgaatctctgaatagaccaataacaggctctgaaattgaggcaataatcaatagcttaccaaccaaaaaaagtccaggaccagatggattcacagccgatttctaccagagtgttggaagttctggccagggcaatcatgcaggagaaggaaataaagggtattcaattaggaaaagaggaagtcaaattgtccctgtttgcagattacatgattgtatatctagaaaacgccatcatctcagcccaaaatctcctcaagctgataagaacttcagcaaagtctcaggatacaaaatcaatgtgcaaaaatcacaagcattcttatacatcaataacagacaaacagagagccaaatcatgagtgaacgcccattcacaattgcctcaaagagaataaaatacctaggaatccaacttacaagggatgtgaagaacctcttcaaggagaactacaaaccactgctcaatgaaataaaagaggatacaaacaaatggaagaaaattccatgctcatgggtaggaagaatcaatatcgtgaaaatggccatactgcccaaggtaatttatagattcaatgccatccccatcaagctaccaatgactttcttcacagaattggaaaaaactactttaaagttcatatggaaccaaaaaagagcctgcatcaccaagtcaatcctaagccaaaagaacaaagctggaggcatcatgctacctgaattcaaactatactccaagggtccagtacccaaacagcatggtactggtaccaaaacagagatatag

SEQ ID NO: 4525 - DNA, 1386 bp, Homo sapiens
  SIMILAR (1)..(969): 771254mologous to Homo sapiens CIS4,accession number AB006968,Smith-Waterman Score=1232.
atggccaactgcgatatcaacaggaaagacgaaaaaggtggaaaagaaaaaaaagacagatcaaaaagcaaaagcttgatggatacgttaaaaaggcagctttctgccaaacagaagccaaaaggcaaggcgggcaaaccctctgggagctctgccgatgaggacaccttctcctcctcctcagcaccgatagtctttaaagccgtgagagctcagaggccgataaggccacctccctccgcagccatcactgcagtcccatgccatggcctcttcgacccacaaactctgaggagacgtgcatcaagatggagtccgagtccacccctgaatggcgtccgaaaggatttccacgaccttcagtctgagaccgcgtgccaggaacaagccaattcactgaaaagctcggcttctcagaacggagacctgtatcttcgcctggatgaacatgtgcctgtcgttattggacttctgcctcaggactacattcagtatactgtgcctttagatgaggggatgtgtcctttggaaggatcaagtagctattgtctggacagttcttctaccatggaagtctctgtggttccttctcaagtgggagggcgctctttccccgaagatgagagtcaggcagaccagaacctagttgttgccccagagatctttgtggatcagtccatgaatgggttgttgactggcaccacgggagtcatgttgcagagccccagagtgggtccgcatcatgtccctccactctcaccattgctacctccaatgcaaaataatcaaatccaaaggaacttcagtggacttactggcacagaagcccacatggctgaaagtatgctctgtcatttgaattttgattttaactctgctcctggtgttgcaagagtttatgtctcagtgcaaagtagtggtcccatggtagtgacaagccttacagaggagctaaaaagatcttgcaaaacaaggatggctttggccaccactcaagagcgtcaggaggtgtgtgctggccaggcggagtttatacaccaagcagctcaaccaggaggagggaacagagctgaatttgggaagcagctgcctgctatgctgaaaacccctggaaacttgctaaagagctgtggccttcctcacacccatgtcttcagatacccaaggcctttaatacccaagtccttccaggattctgcacatctcattagcttcatattcccagctacgaaggtcacattggctgtcaaaggacatgtcttctggctagaagaagccctggtgaaatcttatgtgatatcggcacctttgcagaaaacttgtacttcatgtaaacaagcacctgacctggccagagactatgagcttcatgggggaaaggagtga

SEQ ID NO: 4526 - DNA, 661 bp, Homo sapiens
  SIMILAR (406)..(552): 321254mologous to Human immunodeficiency virus type 1 tat,accession number U11167,Smith-Waterman Score=65.
attgacctgatcgcctgcggaattccgcacgagccgaactccagatatgcgatggggcaaatcctgaagcgtacatggctatctctcacagctaaagcatccctcacccctatccagcgcttcttacccctggcgcaaggagaatcacctgcggggaggaaaactttcaaaatcccttaaacccaagttgtaaccgcacaactaaatcagaatccttggagctggatctgaaaaaaatacggttgaaagtcgtgcaggtgattacaatgtgtaggcaaaccagaaaaccatggctttaaccagcagcttttgttagaaatgatttctccaatgaatgtagaaacgtttgctgctgaattgtgacctttccattttacctgcttctcctgcaaagtatattttgcagacccaggcagtgctgctcgctctgttcctggttcacccagtgccgtgtgtgctcagtgcatcctgtgcacgggtcactgtgctgtgtgccctggcctgggtgagcatcattcttcggggagaaccttgatgaaaacaaagctgcattccaaaaagttaaaaccatgctacttactgtgttgaagtaaaaattaaaagacccaggggggctcacccaaaagttaaaacgtaaataaatatcttgtaacattaatat

SEQ ID NO: 4527 - DNA, 663 bp, Homo sapiens
  SIMILAR (336)..(464): 721254mologous to Homo sapiens cytokeratin 18 (424 AA),accession number X12883,Smith-Waterman Score=143.
tttcttataacaatgtaaacaataataatatctaagtgagataccgttttaatgcatttcaataattattcttccaggaccttcggcaaaaaccttgagtcctgtcctctcgctttcctccccgtacacagcgagctttcaacccacctttgtccgcaccttctcccatcaaactacttacctgtccctgggatctgtcccagtcgcccagctaaagtgctcagcaggtcagcagcgcggcgagcttctatgcaggcgtggggtctggggctcctggatctctgtgtcccatttcacagagattgccaccttacctgccgcctgcttagaagatggggagggacttcaatcttggtggtattctggacagcagcaaatacctgtaaagcatccaaaagaccaacacccacaggatagtggacggcaaagtggtgtctgagaccaacatcacagacgtcttgaggtgctaagccagcagaagcaaggtccctttgcggagcaggagggcaataaaaacttctgtggtcaaaaaaaaaaaaaaaaattaccctcgcatcacagaggtgttttcctcacgcaaacgtaatatagattcattaatacatagatgtggaaattagggcaatttccacaactactcacccagagaggattaaaaaaaaa

SEQ ID NO: 4528 - DNA, 1638 bp, Homo sapiens
  SIMILAR (1179)..(1229): 941254mologous to Homo sapiens putative p150,accession number U93563,Smith-Waterman Score=88.
atgggctggacctgcaagatcctcttcttggtggcagcagccacaggtgcccacttcctggtgcagctggtgcagtctggggctgaggtgaagaagcctggggcctcagtgaaggtctcctgcaaggcttctggatacaccttcacctactgctacttgcactggagagagcctgtctctttcatctgtggcaggtgcatcctgctgacacttttacttggtgattgtttgtggggtgaaggggcttggacacagggggatgttctccaaccttcggaccgagcctccttcttagctatgggtgtcaacaccacaggacagcaggtgggtgacttgtctggggatttccccaattctgtaggaaaagcctgcaagtgccgggagtttcacactctcacacccttagcacatacatcctcaacaactcatgaaacatttccaggcatgtcccacatcgccctggagctgtctcaggggagcagtctcctccagtgtttagaggcacagacacagggacaacgccaagaactcactgtatctgcaaatgaacagcctgagagccgaggacacggctgtgtattactgtgtgaaacacagagtgaggggaagtcagtgagagcccaggcacaaacctccctgaaggggtcccagaaacgactagggggcgccaggacactgtgcacggggctgtctccagggcagagaaagcaggaaagatctaaaattgacaccctaacatcacaattaaaagaactagagaagcaagagcaaacatattcaaaagctagcagaaggcaagaaataactaagatcagagcagaactgaaagagatagagacacaaaaaacccttcaaaaaatcaatgaatccaggagctggttttttgaaaagatctacaaaattgatagaccactagcaagactaataaagaagaaaagagagaaaaatcaaatagatgcaataaaaaatggtaaaggggatatcaccaccgatcccacagaaatacaaactaccctcagacaatactataaacacctctatgcaaataaactagaaaatctagaaggaatggataaattcctggacgcatacaccctcccaagactaaaccaggaagaagttgaatccctgaatagaccaataacaggccctgaaattgaggcaataattaatagactccaaccaaaaaaagtccaggaccagacagattcacagcggaattctaccagagtgtcggatgttctggccagggcaatcaggcagaagaaagaaataaagtgtattcaattaggaaaagaggaagtcaaattgtccctctttgcagatgacatgattgtatatttagaaatccccatcatctcagcccaaaatctccttaagctaataagcaacttcagcaaagtctcaggatacaaaatcagtgtgcaaaaatcacaagcattcttatacaccaataacagacaaacagagagccaaatcatgagtgaactcccattcacaattgcttcaaagagaataaaatacctaggaatccaacttacaaaggatgtgaaggatctcttcaaggataactgcaaaccactgctcaacgaaataaaagaggatacaaacaaatggaagaacattccatgctcatga

SEQ ID NO: 4529 - DNA, 435 bp, Homo sapiens
  SIMILAR (139)..(366): 381254mologous to Mus musculus Niban,accession number AB049355,Smith-Waterman Score=147.
atgggtgagacttgggtgttggggacctggccaggcggagggcttcctccccgggccatcgggagccaggcaggggagctaccagcaggcactgaggagcagcccctctcagtcctgcagcgaagccaggcccctgctgcccgggccttcctggacgccgtccgactctaccggcagcaccaaggccactttggcgacgacgacgtgaccctaggctcagacgccgaggtgctgaccgcggtgctgatgcgggagcaacttcccgcgctgcgagcccagacccttcctggcctgcggggggcaggccgcgcccgcgcctgggcctggaccgagtccctgagctcccagcacccacgggctccccacgtgccggtccggtcccaagtgctgtctgaggaccctcttgttgaaccctcaaagccctacatggtgtga

SEQ ID NO: 4530 - DNA, 900 bp, Homo sapiens
  SIMILAR (421)..(876): 611254mologous to Mus musculus domesticus ORF2,accession number AF081110,Smith-Waterman Score=446.
atggatttaaactataccttggaacaaatggacttaacagatatatacagaacattccatccaacaaccacagaatacacattctattcaacagggcatggaactttctccaagacagacgatgtgataggccataaaatgagcctcgataaatttaagaaaattgaaatgatatcaaacactgtctcagaccacagtggaataaaactggaaatcaactccgaaaggaaccttgaaaaccatgcaaatacatggaaattaaataacctgctcctgaatgagtgctgggtcaaaaacaaaatgaagatggaaattaaaaaattatttgaactgaatgacaataatgatacaacctatcacaacctctgggatagagcaaaggtggtgataagaggaaagtgcatagccctaaacacctacatcaaaaagtctgaaagagcacaaacagacaatctaagaattaaaaacaaaaatcacatgatcatctcaatagatgcagaaaaagcattcgacaaaatccagcatccctttatgattaaaactctcagcaaaatcagcatacgagggacctaccttaacctaataaaagacatctatgacaaacccacagccaacataatgctgaatggggaaaaattgaaagcattcactctgagaactggaacagaggatgaaccaagggtgcccactcccatcactcctcttcaacatatactggaagtcctagccagagcaatcagacaagagaaagaaataaagggcatccaaattggtaaagaggaagtcaaagtgtcactgtttgctgactatgtgatcgtttactttgaaaacccaacggactcctctagaaagctcctagaactgataaaagaattcagcagtttctggatacaagattaa

SEQ ID NO: 4531 - DNA, 1464 bp, Homo sapiens
  SIMILAR (1171)..(1461): 981254mologous to Homo sapiens ATP synthase subunit c precursor,accession number D13118,Smith-Waterman Score=470.
atggtcaccttgatgggacatgcagcactgtgcctgcattatgtcatgcaactaggcaccacaggaggggcctggtatttccccagagcctcctcccaggccagggagatgccacagtgcccgactttggaaagccaggaaggggaaaactccgaagagaagggggacagttccaaagaagatccaaaagaaaccgtcgcgctggcttttgtgagagagaacccaggggcacaaaacggacttcagaatgcccagcagcaaggcaagaagaagaggaagaaaaagaggatcatcattatatcaggcaaggtccttgaagattttctagccttagccatgcattttgctgatgaggaaacaggccagaaaaggtgtagtcttaatcagactattcaactcctcatcaccccagacactggtagtatctggcaccaggcctttctttcttcaatagtgcgcagggctgcccaacagtacggctttagagagggaggggaagacgatgactggactctctattggacagattactcagtgtcactggagcgggtgatggaaatgaaaagttaccagaagatcaatcacttccccgggatgagtgaaatctgccggaaggacttgctggccaggaacatgagccgcatgttaaagatgttccctaaagatttccgctttttccctaggacctggtgtcttcctgctgaccccgcgcagctggacctctggagccagacgttctggccgcgcccgcgcacggcgcccgacggcaccggcgcggatgggctgggactgcggcttggctcgctgggcaagggagtttctggtttccagcatgccatggcctcgggtgaccagaagccagctacactgcctcctggcctgtggttcccttccaggaagctctccaccttcagtgcatacttggaggaccacagctacaacgtggagcagatatggagggatattgaggacgtcatcatcaagaccctcatctcggcccaccccatcatcaggcataactaccacacctgcttccccaaccacacactcaacagcgcctgctttgagatcctgggctttgacattttgttggaccacaaactcaaaccctggctgctggagactgaaaaaatgcagaccgccggggcattattcatttctccagctctgccttcctacagcaacttcccactccaggtggccagacgggagttccagaccagtgttgtctcccgggacattgacacagcagccaagtttattggtgctggggcagccacagttggtgtggctggttcaagggctggcattggaaccgtgtttggcagcttgatcattggctatgccaggaacccgtctctcaagcagcagctcttctcctatgccattcttggctttgccctgtctgaggccatggggcttttctgtttgatggtcgccttcctcatcctcttcgccatgtga

SEQ ID NO: 4532 - DNA, 569 bp, Homo sapiens
  SIMILAR (67)..(363): 1001254mologous to Homo sapiens ATP synthase subunit c precursor,accession number D13118,Smith-Waterman Score=492.
agcgttgcgacggacctcccgaatcgacccacgcgtccgaagggctgaagctgggagactgaaaaaatgcagaccgccggggcattattcatttctccagctctgatccgctgttgtaccaggggtctaatcaggcctgtgtctgcctccttcttgaatagcccagtgaattcatctaaacagccttcctacagcaacttcccactccaggtggccagacgggagttccagaccagtgttgtctcccgggacattgacacagcagccaagtttattggtgctggggcagccacagttggtgtggctggttcaggggctggcattggaaccgtgtttggcagcttgatcattggctatgccaggtaagtttgggtggtctacagcatctcccactgtaaattccaccccgtttggggaagcctcagctggaggagctcccttcaggagccttcaggttgatttcatctacatcatagtttctccagagaaaacatgcatccagcctggctcacttaaacttaccaggttggtccactctgcttgtccatccaaatccccaggatctgtgc

SEQ ID NO: 4533 - DNA, 637 bp, Homo sapiens
  SIMILAR (120)..(530): 671254mologous to Homo sapiens ATP synthase subunit c precursor,accession number D13118,Smith-Waterman Score=390.
ggggaagctgagggctgagaccaagggctaaagctgggaggtgagtctgtcaccttgagccgggcgagcgctgtgggccaagcaggggttgcagggcagtaggagtgcagactgaaaaaatgcagaccgccggggcattattcatttctccagctctgatccgctgttgtaccaggggtctaatcaggcctgtgtctgcctccttcttgaatagcccagtgaattcatctaaacagccttcctacagcaacttcccactccaggtggccagacgggagttccagaccagtgttgtctcccgggacattgacacagcagccaagtttattgggtgctgggtcagccacagttggtgtggctgattcaggggctggcattggagcggtgtttggcagcttgattattgtctatgccaggaagctgtctctcaagcagcaactcctcttctatgccattcttggcttttgccctgtctgagggcatgtgggcttttctgtttgatggtcgccttcctcatcctcttcgccatgtgaggctccatggggggtcacctgcctgtccctgcagcagcaactccgcgccattcctggtgctggggtgtgctaagctttaccattaaacacaacgtttctctaaa

SEQ ID NO: 4534 - DNA, 686 bp, Homo sapiens
  SIMILAR (122)..(574): 301254mologous to Homo sapiens KKLF,accession number AB029254,Smith-Waterman Score=117.
agggggcggcgagtggaagctgcctgggtgtgtaccgcaccgatctgggccccggtggctgcacagcttccctgagcctcagtttccctacctgtgagactggtacagcagatctcaccctaaagagctgtgggagggttcgaagaagaaaagtattaaccacagcgcctgctccctgcaggcacatggcgggcccatctccacctccctgaacccccacagcaagccccgcgggagagtatcacccccgccagggaagaggcaacaagaatgcagagcccggcccgggcgctctcccgagctcgcgggtcctccgccggccaacgttcaggaaacaagccagaaaaatgcgtgcgcttcccgcctttctgagccgccgggcgagggtcccgcagcccgccgctcacccacagccgcaccgcggatccagctccggtccttgttcccggggcggctaccgacaacccctatttccgggtccagccgcttctggcgtccccgcgtccggttccgtggctcgcggattccgggagcaccccagggagtggcacttgcacgccgcggaccgcagggatccccaagccctgcacccagattcttccccgccacggagagacaatcatgacaattatcattacaatgattatgaaaactggcatgaaaacatttatgctgttaataattaa

SEQ ID NO: 4535 - DNA, 627 bp, Homo sapiens
  SIMILAR (1)..(210): 921254mologous to Homo sapiens Human secreted protein, SEQ ID NO: 6270,accession number G02189,Smith-Waterman Score=342.
atggctgaagataaaagcaagagagactccatcgagatgagtatgaagggatgccagacaaacaacgggtttgtccataatgaagacattctggagcagaccccggatccaggaagctcaacagacaacctgaagcacagcaccaggggcatccttggctcccaggagcccgacttcaagggcgtccagctaatgcggggatgcccaaggagcagctcactgtcacagacaccgcacagctcaccatcacaggcaccgcacagctcaccgtcacaggcaccgcacagctcaccgtcacaggcaccgcacagctcaccgtcacagacaccgcacagctcagtcacaggcactgcacagctcagtcacagacaccgcacagctcagtcacaggcaccgcacagctcaccgtcacagacaccgcacagctcaccgtcacagacagtgcacagctcagtcacagacaccgcacagctcaccgtcacagacaccgcacagctcaccgtcacaggcaccgcacagctcaccgtcacaggcaccgcacagctcaccgtcacaggcaccgcacagctcaccgtcacaggcaccgtacagctcactgtcacaggtggcggggcaacttggagctag

SEQ ID NO: 4536 - DNA, 363 bp, Homo sapiens
  SIMILAR (2)..(139): 971254mologous to Mus musculus putative pyroglutamyl- peptidase I,accession number AJ278829,Smith-Waterman Score=233.
ctttagccccggctcccagtgctgcgtggaggacgggcctgaaagcattgactccatcatcgacatggatgctgtgtgcaagcgagtcaccacgttgggtctggatgtgtcggtgaccatctcgcaggatgccggcaggaaaaaacccttccctgccaaaggtgactgtgttttctgccgccgaaggagggcccggtccctccaggctcagtgtggcttctccctgacccccgccctagaacttttgccagtgccttttctgaaactcctgtgtcccgggccccccaggcggagaaggatatgccggattctgcctggggctgggctttaggagaccccaaatttgacaccacagaaagcaaa

SEQ ID NO: 4537 - DNA, 1027 bp, Homo sapiens
  SIMILAR (370)..(717): 1001254mologous to Mus musculus putative pyroglutamyl- peptidase I,accession number AJ278829,Smith-Waterman Score=618.
atggcgccagtattgtcttggttcatcgttgtagatgcggttgctgcgtacaaattggccaatgagcctgctttggcaagagacaccccagatggccccgagccccggagctccccagcccttaacacccacctgcacctcctcggaagagaaacacagccagtgccccagtccaccctgagagatggggaaactgaggctcgtaaaggaaccaaggacgtcatgtggccttcccctatctcccgatgtcccggatacccgatgtgcctccacattctcagttgtgccatacttggtgtcttgttttctttggtatatcagggttgtaggcttgggtggtcggataatacggccctcacaaggtgcctggagctagaaaagctaggccttggcgacagcgtggacctgcatgtgtacgagattccggttgagtaccaaacagtccagagactcatccccgccctgtgggagaagcacagtccacagctggtggtgcatgtgggggtgtcaggcatggcgaccacagtcacactggagaaatgtggacacaacaagggctacaaggggctggacaactgccgcttttgccccggctcccagtgctgcgtggaggacgggcctgaaagcattgactccatcatcgacatggatgctgtgtgcaagcgagtcaccacgttgggcctggatgtgtcggtgaccatctcgcaggatgccggcagccttggaagtcagaagtccaaggtcaaggtggtagcaggactggttccttctggaggtgctgagggaaaaaacccttccctgccaaaggtgactgtgttttctgccgccgaaggagggcccggtccctccaggctcagtgtggcttctccctgacccccgccctagaacttttgccagtgccttttctgaaactcctgtgtcccgggccccccaggcggagaaggatatgccggattctgcctggggctgggctctaggagaccccaaatttgacaccacagaaagcaaataaaacacttgaaatacg

SEQ ID NO: 4538 - DNA, 510 bp, Homo sapiens
  SIMILAR (117)..(308): 951254mologous to Mus musculus putative pyroglutamyl- peptidase I,accession number AJ278829,Smith-Waterman Score=326.
ccggtcccccatcccgggtcgacgatttcgtggctgcagcggcagcagctgtcgcgccagtcgtattatatgcatgtccgaggcacagcccgatcccgccatggagcatccgaggaaggcgggtggtagtgacgggatttggcccttttggggaacacaccgtgaacgccaattggattgcagttcaggagctagaaaagctaggccttggcgacagcgtggacctgcatgtgtacgagattccggttgagtaccaaacagtccagagactcatccccgccctgtgggagaagcacagtccacagctgggtggtgcatgtgggggtgtcaggcatggcgaccacagtcacactggagaaatgtggacacaacaagggctacaaggggctggacaactgccgcttttgccccggctcccagtgctgcgtggaggacgggcctgaaagcattgactccatcatcgacatggatgctgtgtgcaagcgagtcaccacgttgggccagtgtatt

SEQ ID NO: 4539 - DNA, 285 bp, Homo sapiens
  SIMILAR (182)..(277): 621254mologous to Homo sapiens type II membrane protein,accession number AB015632,Smith-Waterman Score=124.
atggctccgggggctctgcctgcacttggggaagaggaaggacccggcgcgagcggcctctcggctgagctggggcatctgagcgcgggctcgcgggctttccgggagaccagtgtggacagcgccctggacacgcccttcccagctggaacatttgtgaggctggaatttaagctccggcagacagagaagcggccggaggaaagactggaagaaacccaagtgcaaagtccagcccgagaggaggaagcagaaatgcctgacctgcgtcaaactggaatgtga

SEQ ID NO: 4540 - DNA, 228 bp, Homo sapiens
  SIMILAR (1)..(195): 871254mologous to Gallus gallus chromobox protein (CHCB1),accession number AB005617,Smith-Waterman Score=299.
atggagaaaaaacaaaacaagaagaaagtggaggaggtgttagaagaggaggaacaggaatatgtggtggaaaaagttctctaccgtcgattggtaaagggcaaagtggagtacctcctaaagtggaagggattctcagatgaggacaacacatgggagtcagaagagaacttggattgccctgccctcatgagtttctgccgtcccagaaaccagcccatgagatag

SEQ ID NO: 4541 - DNA, 801 bp, Homo sapiens
  SIMILAR (292)..(735): 341254mologous to Homo sapiens IgG Fc binding protein,accession number D84239,Smith-Waterman Score=220.
atggggctagagaggccggtggacagggtaatgtggcttcctggggctttgtggaacagcgctgtggtctcagcacctgtgggagaagagtgggcactggcaggaactggcaaccaaggattacaagatattcagggaatgcattgcccagaggaaggtataagccagatccacggcagagaccacaggaatgcgaaggacagccatactggtgtgtggtgctcatgcaccctggggataatttctaccataataataaggcctaaatgtcgatttagcatagatcgcagtgattctgactacttgcccacatccagctgccggcgggaccctggtggcgctgagccctgccaggacaggccccgggtggagcagctctgcagtgttctggcaaaccgctccgggcccttggccaagtgccactggtatgagagccccgtgtcctacacgcaggtgtgtgtctctgacctctgccagtatggcacgggcaaccgcatgctgtgcaccatgctggaggcctacgtccaactctgcgccctgcgctgcgcgttgcctgcccgcgtggcgagccagcctgggatgcagttacgtgtggcgtgtccagccaacagctactatgactcctgtgggccacccttcccggccacctgtgctagcctcaactcctccgcgccctgcaccctccagtgcacagtgagctgcttctgcctcgagggctttgccctggaggcgggcatcttcggtgccccacgcttgctgcggctgccacctgcagggccgctatatccgcctgggtactga

SEQ ID NO: 4542 - DNA, 240 bp, Homo sapiens
  SIMILAR (209)..(238): 701254mologous to Homo sapiens adenosine deaminase, tRNA- specific 1,accession number BC002758,Smith-Waterman Score=39.
atgtggaccgcggatgagattgctcagctatgctatgaacactatgggatcaggctgcccaagaaggggaagcctgagccaaaccatgagtggacattattggcagcggtggtgaagatacaatctccagctgacaaggcctgcgacacccctgataagccggtgcaagtgacaaaggaagttgtgtcaatgggaacaggaccaaatggtaggacagtccatactgaggaagaacggtag

SEQ ID NO: 4543 - DNA, 230 bp, Homo sapiens
  SIMILAR (83)..(57): 601254mologous to Homo sapiens factor H,accession number M65294,Smith-Waterman Score=33.
cacttctcagggcctctttcatctgtgctcttccaggatgctgcctcttactccctgggcacctcggcctggtcccagcaggtatgggcagttgcttgaggctccagacatactcacctctacctcgaccacatcaaccccatcaccaagaggaggttcagggaagctgcattttgtggtcttgtcctcccagtccagggtggtagtgctgggctgttcccagcctccca

SEQ ID NO: 4544 - DNA, 3000 bp, Homo sapiens
  SIMILAR (95)..(1753): 1001254mologous to Homo sapiens zinc finger protein,accession number AF060503,Smith-Waterman Score=2976.
caggccacaccggtggtctgggctggggaccgcgggtcgggtccggtttccagggggttcctggtgctcgaggctggcggcgaggaaggaccagatggcctttgaggatgtggctgtgtacttctcccaggaggagtgggggctcctggacacagcccagagggccctgtaccgccgcgtgatgctagacaacttcgcacttgtggcctcgctgggactctccacctctcgacctcgtgtggtcatccaactggagcgtggcgaggagccctgggttcccagtggaacggacacaaccctgtccaggaccacctacaggaggcgcaaccctggttcctggagtttgacagaggatagagatgtttctggagaatggccacgagctttcccagataccccacctgggatgactactagcgtcttccctgttgccggtgcctgccacagtgtaaaaagcctgcagagacaacggggtgcctccccatctcgggagagaaaacccacgggggtgtcggtgatctactgggagaggctcctgctaggctcaggcagtgggcaagccagcgtcagcctgcgactgacctccccgcttaggcctcccgagggcgtccggcttagggaaaagacactcacagagcatgcgttgctggggaggcagcccaggacgcctgagcggcagaaaccatgtgcacaggaggtccctgggagaacctttgggagcgcccaggacctggaggctgccggcggtcggggacatcaccgaatgggtgcagtttggcaggagcctcatagactcctcggtggccaggagccctcgacctgggacgagctgggcgaggctcttcacgctggggagaagtccttcgaatgcagggcgtgcagcaaagtgttcgtgaagagctccgacctcctcaagcacctacgcacccacaccggggagcggccctacgagtgcgcccagtgcggcaaggccttcagccagacgtcgcacttgacgcagcaccagcgcatccacagcggcgagacgccctacgcgtgccccgtgtgcggcaaggccttccggcatagctcctcgctggtgcggcaccagcgcatccacacggccgagaagtccttccgctgctccgagtgcggcaaggccttcagccacggctccaacctcagccagcaccgcaagatccacgcgggtgggcgtccttatgcttgcgcacagtgtggccgccgcttctgccgcaactcgcacctgatccagcacgagcgtacgcacacaggcgagaagcccttcgtgtgcgcgctctgcggtgctgccttcagccagggctcctcgctctttaagcaccagcgcgtgcacacaggcgagaagcccttcgcctgcccacagtgcggccgcgcctttagccacagctccaacctcacccagcaccagctcctgcacacgggcgagcggcccttccgctgcgtggactgtggcaaggccttcgccaagggcgccgtgctgctcagccaccggcgcattcacacgggcgagaagcccttcgtgtgtacgcagtgtggccgcgccttccgtgagcgcccggccctcttccaccaccagaggatccataccggcgagaagaccgtccggcgatccagggccagcctgcacccccaggccaggtctgttgccggggcatcatcagaaggtgcgccagcgaaggaaaccgagcccactcccgcctcgggcccagccgccgtctcgcagccagcggaggtctgaggtcacaggttgcagccctggccttctgtgaatcccttccacagctaaagggcatatgtcctctgcagatccacagcagagaaaaagtcccgtgcttgctagtcagggacaagggaggccctttggctgtgatttcatttgcacgtggggacaggatttgccagttcacccacagatcacacctccatccccaaagaggtagcactgcagcaacatcagggggaggacgtggtggctgaactctagtggggccgagactattcagagccagtaggaggccgacagtcacagcactgcactgtggtgcggcttcatgtgatatgacagtggatgctaaggtgagagggatgcaggcatgggttgggggtggcccagagaaacttatgacagctgtacacaaactggccgctggagagatgcccgctgagggtattctcccctcaacccactgcctctgttcatccaagacttcctaggggccagcctagcagacaagagaccacaagggactggggatcagggtctgggctctgtcagccgccacctctgggaaagagaaaaggtttgggtccactgaacatcatgtttgtagacgctgacaggtggggtcctaatgagagccaacacatgctcactgccagctcctgtcctgagtactgggaagtttctcctgaagccctgtgagatggctctgtggctggtatcccgacttggaagatgaggaaactgaggcacacggcctggcctggcttcacacacatagccgactcaggagagggatgcccatgggggaacatgtgactctcagcattggaaggacagagctaggatgatggctttccggtggcactcgttcaggtttttgcccaagtctcagcttggccaaggcctgtcactgactggtttaccaaagtcgatgtgaggaggaggctttatacctgaggggatgatgttaacttcagacaagatggagctgctcacttttgccgggtttggtggccacttcacccccaaccctgtctcacccccattatccctcctcaattggaggctggacagagctgaataggaaagacttgctattgcctaaggctatgtgtgacaccctcctgaggacctccccaccccagtgtaatggcccttcatggcagggacagaaaggtggactgggggccatttgcttcctgtggccttcagcagaccaggccctgtccctacctggagcctcacctccaaggaaattc

SEQ ID NO: 4545 - DNA, 1084 bp, Homo sapiens
  SIMILAR (438)..(518): 851254mologous to Homo sapiens very long-chain acyl-CoA synthetase homolog 2; VLCS-H2,accession number AF064255,Smith- Waterman Score=115.
tactccaaaaggtggaattcggctggggctggccaagctgggctgcccaacagcctggatcaacccgtatggtcgggggatgcccctggcgcactctgtgctgagctctggggcccgggtgctggtggtggacccagacctccgggagagcctggaggagatccttcccaagctgcaggctgagaacatccgctgcttctacctcagccatacctcccctacaccaggggtgggggctctgggggctgccctggatgcagcgccctcccacccagtgcctgctgacctgcgtgctgggatcacatggagaagccctgccctcttcatctatacctcggggaccactggcctcccgaagccagccatcctcacgcatgagcgggtactgcagatgagcaagatgctggccttatctggggccacagctgatgatgtggttgtacaccgaggtcctgcctctgtaccacgtgatgggacttgtcgttgggatcctcggctgcttagatctcggcacttccctcgcgagttatggtcttcgggtgtattttatcctatggtctgtgctcggcccatcgcgtcgcacgctgtgtctttaattgtggtgtgggttattggtttgagtaagcctgagggtactgcactgtacgagcatggcttcagaatctgcttcttgctaggttctcaagaagcttacaatcatggcagaaggtgtgagccacagcacctggccaaccaacacttctcagggcctctttcatctgtgctcttccaggatgctgcctcttactccctgggcacctcggcctggtcccagcaggaccagatggcctttgaggatgtggctgtgtacttctcccaggaggagtgggggctcctggacacagcccagagggccctggactctccacctctcgacctcgtgtggtcatccaactggagcgtggcgaggagccctgggttcccagtggaacggacacaaccctgtccaggaccacctacaggaggcgcaaccctgcccctcctggaggctgcagccttagctgcccttgaaggtggagctccaagggcacaggagcggggttga

SEQ ID NO: 4546 - DNA, 576 bp, Homo sapiens
  SIMILAR (17)..(292): 461254mologous to Drosophila melanogaster CG2839 gene product,accession number AE003588,Smith-Waterman Score=218.
atgggtgagaagaagaagaaaggaagaagaagaagaaagaagaagaaggaggaggaggagggagaggaggagggaggggggatgggtgagaagaagaagaaggaggaggaggaggagggagaggaggagggagagaaagaaagagagaaagaaagagacaaaagagagaaagaaaaagaaagaagaaagaaaagaaaaagaaagagaaagaaagaaaaagagagaaagaaagaaagagaaagaaagggaaaggaaggaaggggagggagagagggaaagaaaatcaacagagtgcacttcttccagttatataaaaaaaagttagttgtaaaacagccacaggcagctccctcaggagaaattccagaagaaggcattgctgtcttagggggtgacagctccatgcctgttattgtccccgaagaccttccagtaggacaagatgtggaagtggaagacagtgatattaatgatcctgactccctgatcttggtgtcatcccaggctggaggcggtggtgtgatcacagcttactgtaaccttgagcacctaggctctagtgatcctcctacctga

SEQ ID NO: 4547 - DNA, 297 bp, Homo sapiens
  SIMILAR (160)..(297): 931254mologous to Homo sapiens PRTD-NY3,accession number AY009107,Smith-Waterman Score=212.
atttatgccaccaactctgccgaggtttgtcaatatgtcatcactcatgccaaagtgaacatcttgctggttgagaatgatcaacagttacagaaaatcctttcgattccacagagcagcctagagcccctaaaagcgatcatccagtacagactgccaatgaagaagaacaacaacttgtactcttgggatgatttcatggaacttggcagaagtatccctgacacccaactggagcaggtcatcgagagccagaaggcgaatcaatgcgcagtgcttcatcttacactttcaggg

SEQ ID NO: 4548 - DNA, 1472 bp, Homo sapiens
  SIMILAR (186)..(419): 481254mologous to Homo sapiens PRTD-NY3,accession number AY009107,Smith-Waterman Score=141.
atgaagcccacagggaactttctttcagattcccagagcagcctagagcccctaaaagcgatcatccagtacagactgccaagaagaagaacaacaacttgtactcttcctgagatggttcagcagctcctagagctacatctgactcattcacatacacagtctgtgtctcagaattcccagtggatgatttcatggaacttggcagaagtatccctgacacccaactggagcagtcatcgagagccagaaggcgaatcaatgcgcagtgctcatctacacttagggaccacaggcatacccaagggagtgatgctcagtcatgacaacatcacgtggattgcaggagcagtgacaaaggactttaaacgacagacaagcatgagacggtggttagctacctcccactcagccatattcagcacagatgatggacatctgggtacccataaagattggggcgctcactactttgctcaagcagatgctctcaaggtaagattgagtaaggacctgggctccgacttcatcctcttgggcagcccagtgggactgcgcccctcaaccaagagactgccagttctttctaagcttggacatacctataggcgagttgtatgggttgaggagagctcgggaccccacacgatatccaaccagaataactacaggcttcaaggtccaatgatgaaacttaagagacattttgtagcccagaaatacaaaaaacaaattgatcacatgtaccactgactgctttgatggagctgctctcagctgttctgatgaaagtaggaggcaatgaatcccaatgtctcattgggtcttatttggagaaggcctttgtcagaaactttagtgagaaagttctacttgccaggaactcaaggaatgaggtcatctgggggtctccggccgccgctgacccgcctgtccgcaggctgagctctcggaccacggagcgcgacggggaggcgcgactgcggctcagcaaggataagttagcaacaagacactcctcactgtgcacgacatggtcgcgagcaggccatcaagtacgccaacaacatcgcgcccggctccaacagctgccactgctcacctacatcgagtaccaccagcagtgtctcggcgtcgagaagtcttcttcaaagtaccgccaggcggtccgcgcctgcgcgcccctcccgccctcctgcgcctgcgcgcctcttctgcacccaccctcttgcgcctgcgcgcacttatttcacctcctgcgccagcgcagcgctccagggcctttcttccccgcccctccccgcgtcctgcgcctgcgcgcctttcttcccccggtaagctgcgcgccgctccggcccacttgcttctgcgcctgcgcgccgctgcaggccttcctcccccatctccccccgcctcctacgcctgcgcgccactacatccttctgcgcctgcgcagtgttactctcctgtga

SEQ ID NO: 4549 - DNA, 840 bp, Homo sapiens
  SIMILAR (341)..(736): 311254mologous to Mycobacterium tuberculosis proline-rich mucin homolog,accession number AF071081,Smith-Waterman Score=121.
atggtgacacagaaactccccaatgctcaggaaaacctgaaacacgccgagaggcaagcagcaggctgctgccctggaaggagccacattttccagcatgtcgggcctggggcctcagagtctctgcggggagaggggtgttcaactcacccagaagcccagggagcccaggagaggtgtgagcaatggaagaaagaccagcactggtgccttgccagccacaccgatgtcactcagcagtggggcaggcacatcgttcaggagggtgggacacacagagggccttctgcggtgctgtctcttcgaactgccttagacgagggggacgagggggctgctcccatccaatcactgcccagctccccctgcagctacgtcacctcccacggcctcctccggcgcctgcgcggctcttccccagctccccctgcagctacgtcacctcccacggcctcctccggcgcctgcgcggctcttccccagctccccctgcagctacgtcacctcccacggcctcctccggcgcctgcgcggctcttccccagctccccctgcagctacgtcacctaccccggcctcctccggcgcctgcgcggctcttccccagctccccctgcagctatgtcacctcccacggcctccggcgcctgcgcggccgcggctccgccgttcaaccgcatgcgcgacagcgctgaggcccggggagcgaggatctgccgccgctcagcccggagcccgctcagaaacctcgttctgccgactcggacggcagccgccgttttggatcctgcattcatttcctcccaggctctggcttgtcccgtcgttggtgtcatctag

SEQ ID NO: 4550 - DNA, 377 bp, Homo sapiens
  SIMILAR (4)..(60): 421254mologous to Homo sapiens heparan sulfate proteoglycan perlecan,accession number AL445795,Smith-Waterman Score=38.
tgggtttctacacttgcaatgccaccaatgccttgggatacgactctgtctccattgccgtcacattagcaggaaagccactagtgaaaacgtcacgaatgacagtgatcaacacggagaagcctgcagtcacagtcgatataggaagcaccatcaaaacagtgcagggagtgaatgtgacaatcaactgccaggttgcaggagtgcctgaagctgaagtcacttggttcaggaataaaagcaaactgggctccccgcaccatctgcacgaaggctccttgctgctcacaaacgtgtcctcctcggatcagggcctgtactcctgcagggcggccaatcttcatggagagctgactgagagcacccagctgctgatc

SEQ ID NO: 4551 - DNA, 1798 bp, Homo sapiens
  SIMILAR (1)..(162): 811254mologous to Homo sapiens Human TANGO 224 (form 2),accession number B01431,Smith-Waterman Score=236.
atgaatgaaacagtcatcctggctgatgagctgtgtcgccagcccaagcccagcacggtgcaagcttgtaaccgctttaattgccccccagcctggtaccctgcacagtggcagccgccctcctcaaaggaagatgcaggcagagtgcctgaagctgaagtcacttggttcaggaataaaagcaaactgggctccccgcaccatctgcacgaaggctccttgctgctcacaaacgtgtcctcctcggatcagggcctgtactcctgcagggcggccaatcttcatggagagctgactgagagcacccagctgctgatcctagacacccttcctcgagatgtaaacagatattactttgggaaatcagctgagtacatcggagggactccgacttgttcttgggtcttggttcacattgcatgcactgaggcaagggcagagatcaaaaaaacaatgttgagagcacggccaggactcggagcacttggtgaacccctcatactcccagtcatacagctcgtcgaaatcctgcaggccaccaaagagcccatctgtctcgtctgggttgaactcaggaatttccccgctgcatgggcctgcataacaggcacgctgggatgctggcttgggcccttcacactcgtcaataggcaggtcagccacggactgagagaaagacaggagcacctggcacctgactattcgcacctgggtccccacaccacaggtgactgtgcaggccgaccaggcctctgggatgaacctgcagtcggcaagcaaacaagaggacaggatgagaagccccaggcaggaagccatgggggctggagtcgtgctgcagaggcatgcaaacctggctccttaaccttgactttggcagacaatgaaagaactgataagaaggcatcactagctcatcgtgtgtttttgctcttcagcccttatgaatgtaactcggaatccgtatctgcacagtactccaggaaaactctgtcagtcattagatttggcttcaggatctcaaacctgtttgctaggtcctcatccttcaggatcaaaatggtgcctggttggctgaacacttctgttttaaaggcatcacaaggccatgctccttccttaatggccttcacatccttggatgctgacgtacgagttttagccatatgtcaggctctcctgttgtgtaagagctgccctcgtttactagacctgaacgaccggaagagagccgtgcagaagtctgtaggtggaagatgtcagggacagggaatggccagggctgatgtgctgctgtgttggaggaaaggaaggccagtgtgctggagcactgtgattgatggggagtgtgggctaagaaagccactagtgaaaacgtcacgaatgacagtgatcaacacggagaagcctgcagtcacagtcgatataggaagcaccatcaaaacagtgcagggagtgaatgtgacaatcaactgccaggttgcaggtgtccaggaggctgtggtgagctgcttgaacaaacagactcgggagcctgctgaggagaacctgtgcgtgaccagccgccggcccccacagcttctgaaagccctgcatttggaatccctgcccagcaagctctctagttgttgagcctaaatgtgtgggcaaagggcaccaacttttctatttgactacagtcctgtcatctaggaagaagcagtatcgactcagcatggaacgcctgcaacgttctttgttaggcaaccaagaggcctggcttctcatcctgctgtcaccaactagctctgtggcctag

SEQ ID NO: 4552 - DNA, 1580 bp, Homo sapiens
  SIMILAR (58)..(312): 291254mologous to Mus musculus type VI collagen alpha 3 subunit,accession number AF064749,Smith-Waterman Score=109.
atggatggaaccaacagattttacttgtacgtctgggagacagagcgccagcaggatgtggagcacgtggcccgctgtattctctgctatgacaaatgcagaccagacccagaatgcccggctggcacgccggggccccaggaggtggacgtggacttggtatttgtggtggacagctcctatggagtggatgccgacgtgtaccgcgggtctttgagtctagcggacgccgcgctagaagacctggaggtggctgagcagccgggcgcgtcccaccgtggggcgcgtgtggccctggtgacgcacacgacacccaacttctggccggggcttccacttgaccacctatggcaaccggaagcagatgcagagacatgtgcgcgaggcttcagcccgccccttacagggaaccgccccccctggccacgccctggagtggacgctggagaatgtgctcctggcagcccctcggccgcggaaggcacaagtcctcttcgccatcgtggccagcgagacaagtagctgggacagggagaagctatggactctgtccctggaggccaaatgcaagggcattaccctctttgtgctggccttgggtccgggtgtggggacccatgagctagccgagctagccgagctggtcagtgctccctctgagcagcatctactgcgcctacaaggggtctcagagccagaggttaactacgctcagggattcactcgggccttcctgaacctcctaaaaagtgagcagtccccgggaactggggcaccttgggtggagtggggagagggatttacagagcctggcatttgggcatgcaggtggacaaaccagtacccacccccagagctcactgaagaatgtgggggcctacaccgtggggacactgtgctgcaattagtcacacctgtcaacaggttcatgtatgcagctaaagaaaatagtttaaaaagaaagacaaaggctaactttcacctggctgtcgaactggagctggatgaaagttatttcagggcgtattatgaaggcacactctatgaagtgtctgcactacctttgcagagaagcaatgagttattgcagaagtggtccttgttccatggatccaatggaaggcgagtgtcaggatcacaccctgaagtggcattacaacaaggaggaacgggtttgccagcagttctggtgtggcagctgtggcggcaatgccaaccggtttgaaaccaaggaagaatgtgaggcttggtggcaaggatgtggagagctgtattttaccaaggtcaagttttcccagatgaatatggaggcagaaaagaggacaaggaaattgaaggtgcatataaggaaacgattacgatggtttctagaatctgagaagtggagacatgatgggaaaaggaggcagactgtgaaaaggttacaggatcaatggatcatagatctcagtgtggtcaacaaaacttgttggctctgggtaccagtagaagtgaggatctcagatccagtacacactgagcaagtggaaagtgcaaaggaagaggagttgggcactgggcaaagttgggatctaagataa

SEQ ID NO: 4553 - DNA, 556 bp, Homo sapiens
  SIMILAR (513)..(554): 921254mologous to multiple sclerosis associated retrovirus element gag polyprotein,accession number AF123881,Smith-Waterman Score=65.
agacatgaaccccaaaattcctgtcctctggatggcagaaaccaagagaaagtatccccacatggtcaaaaggttaagctcttaaggacacaaagcaagacagagaaatttcatccagtattggtttcaggaacctgtagcaaggtttgtaactgaccagcctgccaagctggcttgaaaagcgggcttataggggtcctaaacccacattctatcctgtgatacccctctctctattacagaacaaagaaaaacaaattcttagcacaaagtacagcagatttgctaccgcctaagactagtctcacaaatccttttttctattaatcaaacccttgcagagagacaaatagtgacatttactgtttacccagacacagaaagagatagagagactagaaacttggctgacttgaagcaaattaaaatagacctaggtaaattctctgataaccctgatggctatattgatattttacgagggttaagacagtcctttgatctgacatgggagagatataatgttactgctaaatcagacactagctccaaatga

SEQ ID NO: 4554 - DNA, 735 bp, Homo sapiens
  SIMILAR (76)..(459): 651254mologous to Homo sapiens gag,accession number AF156961,Smith-Waterman Score=395.
atggcttctaatagagctataacactcactgtatggcccaagatttcattccttggaatccatgaggccaagaaccccaggtcagagaacaagaggcttgccgccatcttggaagcggcccaccaccatcttgggagctctaagaacaaggaccacccgatgggaaacgttcccccccaaggcaaaaacacccctaagatgtattctggagaattcggcccagccagagtgtacgtaccttttttcctgtcagacttgaagcaaattaaaatagacctaggtaaattctcagataaccctgatggctatattgatgtttcacaagggttaagacagtcctttgatctgacatggagagatataatgttactgctagatcagacactaaccccaaatgaaagaagtgctgccataactgcagccagagagtttggcgatctctgttatctcagtcaggtagtggcagcagtagcaggcttagtatctgaagcagttaaaataatacagggatcttactgtgtggacatccatgatgtgaatggcatactaactgctaaaggagacttgtggctgtcagacaaccatttacttaaatatcaggctctattacttgaagggccagtgctgcgactgcgcacttgtgcaactcttaacccagccacatttcttccagacaatgaagaaaagatagaacataactgtcaacaagtaattgctcaaacatacgccacttga

SEQ ID NO: 4555 - DNA, 655 bp, Homo sapiens
  SIMILAR (79)..(234): 841254mologous to Mus musculus Similar to ribosomal protein S12,accession number BC002079,Smith-Waterman Score=206.
gccgtcgacgccgccgagtcgcgcggaggcggaggcttgggtgcgttcaagattcaacttcacccgtaacccaccgccatggtcgaggaaggcattgctgctggaggtgtaatggacgtgaatactgctgtacaagaggttctgaagactgccctcatccacgatggcctagcacgtggaattcgcgaagctgccaaagccttagacaagtacgtgtatcagtctcaatactgtgggttcttgcaaccggaccaaaaacttgccacccaagggaagaagggcatgggagttcatggtgttaagcgcaaaagttcttgaatggcatccgtcctacccggaaaccttaggaaaaggcgccaagcccattctttgtgtgcttgcatccaactgtgatgagcctatgtatgtcaagttggtggaggccctttgtgctgaacaccaaatcaacctaattaaggttgatgacaacaagaaactaggagaatgggtaggccttttgtaaaattgacagagaggggaaaccccgtaaagtggttggttgcagttgtgtagtagttaaggactatggcaaggagtctcaggccaaggatgtcattgaagagtatttcaaatgcaagaaatgaagaaataaatctttggctcacattcaaaaaaa

SEQ ID NO: 4556 - DNA, 706 bp, Homo sapiens
  SIMILAR (277)..(681): 471254mologous to Mus musculus Similar to ribosomal protein S12,accession number BC002079,Smith-Waterman Score=201.
gccgttgaatcccgcgcggaggcggaggcttgggtgcgttcaagattcagcttcacccgtaacccaccgtcatggccgatgaatggtgagcccatgggccgcggtcggagttggggtctgagtgcggctgatgcgtggggctagagctggcggaacaggactgtgtcaaacgggtcagccgtaagcgcgtctagcgtacacttatgttttgctgagtgcaaggccttatgcggtgagaggattttaactgatggttctgatgtgtcgcgtccaaccattgctgctggaggtgtaacggacgttaatactgctttacaagaggtgtctgaagactgccctcatccacgatggcctagcacggtggaatttcgcgaacgtggcccaaagccttagaacaagcgccaagcccattctttgtgtgcttgcatccaactgtggatgagcctatgtatgtccaagttgggtggaggccctttgtgctgaacaccaaatcaacctaatttaaggtttgatgacaaccaagaaacttaggagaaatgggttaggcctttgtaaaatttgacagagagggggaaaccccgtgaatagtggttggttggcagttgatgtagtagtttaaggactattggcaaggagtctcaggccaaggatgtcattgaagagtatttcaaatgcaaaaaatgaaaaaataaatctttggctcaca

SEQ ID NO: 4557 - DNA, 592 bp, Homo sapiens
  SIMILAR (389)..(493): 711254mologous to Homo sapiens Human GTPase regulator GRAF,accession number W97809,Smith-Waterman Score=123.
gcatgggatcatcacgttacaggccttctcagaagctaataggaaactctggcttgaagccatggatgggaaggaaccgcaagaggaagtgagaggctttcatgattcagaagaaggaagatgtagggcaaagaggacaaatgcctacattctgagactgaaagttgaaggaggtgagattcagacaagtaaagggaagtccaggaagatcaagccttttatgcttgcctgtaaagtctgcaacatcttagagaagcttggatttagtgtggtggcagctgagtggaggcttagcaggcagtgccaagccaaagccatgtactcctgtaaagcagagcacagtcatgagctttccttcccacaaggagcaatattttctaatggatggaaagaagaagttgacaaagagagtgaaaaatattactctatccttgaaaagcatttaaatttgtccgcaaagaaaaaggagtctcatttacaagagaacagctctggtccttctgtcagcaccaagcttattaacttgttctcaaaaaggctcctctgtgccttcctacctgcacagctgactccttattcattttgttcatga

SEQ ID NO: 4558 - DNA, 1665 bp, Homo sapiens
  SIMILAR (364)..(1050): 461254mologous to Sus scrofa pol protein,accession number AF038600,Smith-Waterman Score=512.
atcacagaaaatggtatggagaaatacttgcattgcttacccccaccgccaacgtatgtggacatagtcaagtaccccatgcttgctcaatctatcacgaccctgtcacgtggaaccctcagggtttgggaggatctggggtcaggtgtcaccactcagtacacttggacccggctcctccaagggttcaagaactcccccaccatctttggagaggcaatggctcgagacctccagaagtttcctgccagatacctaggctgtgtgctgctccagtacattgatgacctcctgctgggacaacccacagcagtcgggagtgccaagggaatggataccctgctccagcacctggaggacttattgcctaagtccctgtatggagtcacaaagtggggagataaggaacattttgaatgggggtcccaacagcaacgagctttttatgagttaaaaggaaaactcatttcggccccagccctggggctacctgacctgacaaaaccttttacactatatgtgtcagagagagaaaaaatggcagttgcagttttgacccagactgtggggccctggccgaggccagtggcctacttctctaaacaactagatggggtttctaagggttggcccccatgtttgagggccttggcagcaacagccctgctagcacgagaagtggataagctaactcttgggcaaaacctaaacataaaggccccccatgctgtggtgactttaatgaataccaaaggacaccattggctaatgaatgctagaataactagataccaaagtttgctctgtgacaaaccccatataaccattgaagtttgcaacaccctgaaccccaccaccttgctcctggtatcagagagcccagttgaacataactgtgtagaggtgttggactcagtttattctagcaggcccaacctccgagaccatccttggacatcagtagactgggagctgtatgtggacgggagcagcttcatcaacccacaaggagagagtgtatggggcattatacaaggaaaaaggcctattaaactctgggggaaaagacgtaaagtatcagcaagagatcttgcaattattggaggcagtgtggaagccccaaaactggtgcagcagtgtgtcacctactggcagcacaatgctaggcaaggtccaaatgtcctgcccggcatacaatcttatggagcagccccctttgaagatctccaagtagccctcactgagatgcccaaatgtggaggtaacaagtatttgctagttctagtgtgtgcatacgctgggtgggtggaagtctatccaacacagaccgagaaagctcatgaagtaacctgtgtgcttctccgagatctccttcctaggtttggactgcccttacaaatcagctcagacaacgggctgggatttgtggctgacttggtacagaagacagcaaagaatctcaccgacactggacagctcccactggactatactggatatgtgggcatagagcctacaccaaattacctgaccaatgggattaccctggatgttgtattaagaacagaatgtaaagaagtggaactatctcagggagaattattagtaggccactgcaataacaaagtgaagggaaatggtgacttagagcaggaagatggctga

SEQ ID NO: 4559 - DNA, 4904 bp, Homo sapiens
  SIMILAR (1)..(3096): 971254mologous to Homo sapiens unknown,accession number AF149422,Smith-Waterman Score=5241.
atggtaaagggatcaattcaacaagaggagctaactatcctaaatatttatgcacccaatacaggagcacccagattcataaagcaagtcctgagtgacctacaaagagacttagactcccacacattaataatgggagactttaacaccccactgtcaacattagacagatcaacgagacagaaagtcaacaaggatacccaggaattgaactcagctctgcaccaagcagacctaatagacatctacagaactctccaccccaaatcaacagaatatacatttttttcagcaccacaccacacctattccaaaattgaccacatacttggaagtaaagctctcctcagcaaatgtaaaagaatagaaattataacaaactatctctcagaccacagtgcaatcaaactagaactcaggattaagaatctcactcaaagccgctcaactacatggaaactgaacaacctgctcctgaatgactactgggtacataacgaaatgaagacagaaataaagatgttctttgaaaccaacgagaacaaagacaccacataccagaatctctgggacgcattcaaagcagtgtgtagagggaaatttatagcactaaatgcctacaagagaaaggaggaaagatccaaaattgacaccctaacatcacaattaaaagaactagaaaagcaagagcaaagacattcaaaacctagcagaaggcaagaaataactaaaatgagagcagaactgaaggaaatagagacacaaaaaacccttcaaaaaatcaatgaatccagtagctggttttttgaaaggatcaacaaaattgatagaccgctagccagactaataaagaaaaaaagagagaagaatcaaatagacacaataaaaaatgataaaggggatatcaccaccgatcccacagaaatacaaactaccatcagagaatactacaaacacctctacacaaataaactagaaaatctagaagaaatggatacattcctcgacacatacactctcccaagactaaaccaggaagaagttgaatctctgaatagaccaataacaggctctgaaattgtggcaataaccaatagcttaccaaccaaaaagagtccaggaccagaaggattcacagccgaattctaccagaggtacaaggaggaattggtaccattccttctgaaactattccaatcaatagaaaaagagggaatcctccctaactcattttatgaagccagcatcattctgataccaaagccgggcagagacacaaccaaaaaagagaattttagaccaatatccttgataaacattgatgcaaaaatcctcaataaaatactggcaaaccgaatccagcagcacatccaaaagcttatccaccatgatcaagtgggcttcatccctgggatgcaaggctggttcaatatacgcaaatcaataaatgtaatccagcatataaacagagccaaagacaaaaaccacatgattatctcaatagatgcagaaaaagcctttgacaaaattcaacaacgcttcatgctaaaaactctcaataaattaggtattgatgggacgtatttcaaaataataagagctatctatgacaaacccacagccaatatcatactgaatgggcaaaaactggaagcattccctttcaaaactggcacaagacagggatgccctctctcaccactcctattcaacatagtgttggaagttctggccagggcaatcaggcaggagaaggaaataaagggtattcaattaggaaaagaggaagtcaaattgtccctgtttgcagacgacatgattgtttatctagaaaaccccatcgtctcagcccaaaatctccttaagctgataagcaacttcagcaaagtctcaggatacaaaatcaatgtacaaaaatcacaagcattcttatacaccaacaacagacaaacagagagccaaatcatgagtgaactcccattcacaattgcttcaaagagaataaaatacctaggaatccaatttacaagggatgtgaaggacctcttcaaggagaactacaaaccactgctcaaggaaataaaagaggacacaaacaaatggaagaacattccatgctcacgggtaggaagaatcaatatcgtgaaaatggccatactgcccaaggtaatttacagattcaatgccatccccatcaagctaccaatgactttcttcacagaattggaaaaaactactttaaagttcatatggaaccaaaatagagcccgcatcgccaagtcaatcctaagccaaaagaacaaagctggaggcatcacactacctgacttcaaactatactacaaggctacagtaaccaaaacagcatggtactggtaccaaaacagagatatagatcaatggaacagaacagagccctcagaaataatgccgcatatctacaactgtctgatctttgacaaacctgagaaaaacaagcaatggggaaaggattccctatttaacaaatggtgctgggaaaactggctagccatatgtagaaagctgaaactggatcccttccttacaccttataccaaaatcaattcaagatggattaaagatttaaacgttagacctaaaaccataaaaaccctagaagaaaacctaggcattaccattcaggacataggcgtgggcaaggacttcatgtccaaaacaccaaaagcaatggcaacaaaagccaaaattgacaaatgggatctaattaaactaaagagcttctgcacagcaaaagaaactaccatcagagtgaacaggcaacctacaacatgggagaaaattttcgcaacctactcatctgacaaagggctaatatccagaatctacaatgaactcaaacaaatttacaagaaaaaaacaaataaccccatcaaaacgtgggcgaaggacatgaacagacacttctcaaaagaagacatttatgcagccaaaaaacacatgaagaaatgctcatcatcactggccatcagagaaatgcaaatcaaaaccactatgagatatcatctcacaccagttagaatggcaatcattaaaaagtcaggaaacaacaggtggaatattggtggacttgtccccaagttaaattatgatttaaagagacacttagaaaaagaggaaaagcctactaaaactgagcaggctatcagcaaagacaaaaatgcagagaagaacaaccgtttatctcttcagggagaaattattattgcaattatattgataacagaacctgggttgaaagggagaggaatcccaattttcataattgaagatggaggaacaagttatgtggttgctctgcagatactatgcaaattagttgaactaactcagaaaccagttgatcagccctttgattacatttgtggtgtgagcacagctttactcctgaagtcagcaagaccacgaacccactggaaggaagaagctccagacacatctgaacatctgaaggaacaaactccggacacaccatctttaagaactgtaacactcactgctagagtctgcggcttcattcttgaagtcagcgagaccaagaactcaccggaaggaaccaattccggacatattttgacatcccagatgggactatcacctattgccaagcggagggaaactagtgcttctgctgctgcgttggtgagtgcaactattccaatctgcagggtccagggaccattgcgggttcttgggcaagaggtgtttctgctgctgcttcgccttcctacagctccccttcctattaatgataagcctcctctaatctcccctgcccagaaggaaacaagcaaagaaatctccaaaggaccacaaaaacccctgggctatcggttatgtccccttcaagcagtagggggaggggaatttggcctaacccgggtacatgtccccttctccctctatgatttaaagcagatcaaggcagacttggggaagttttcagatgatcctgataggtacatagatgtcctacagggtctagggcaaactttctatctcacttggagagatgtcatgctattgttagatcaaaccctggcctttaatgaaaagaacgcagctttagctgcagcccgagagtttggagatatctgggaccaaggggaacagtccaaaaaggaaaagcaagatcagagaaagaccgtagccttagtcatggccctcagacaaataaaccttggtggttcagagaggacagaaaatggagcaggtcaatcagccgggtttagggatagccctcaactgtttggtcaggcactggcccaagatctaggccacttctcaagtccaggcactcttgtccttcaatatgtggatgatttacttttggctaccagtttggaagcctcatgccagcaggctactctagatctcttgaactttctagctaatcaagggtacaaggtgtctaggtcgaaggcccagctttgcctacagcaggtcaaatatctaggcctaatcttagccagagggaccagtgcccagttagcagaactactggcacttaccctagccttagaactgggaaatggaaaaagaataaatgtgtatacagatagcaagtatgcttatctaatcctgcatgatcatgctgcaatatggaaagaaagggcgttcttaacctctgggggaacccccattaaataccacaaggaaattatggagttattgcacacagtgcaaaaacccaaggaagtggcagtcttacactgccaaagccatcaaaaagagagttcccctctggaggacactacaactgcagggccccttcttcacccctatccggcaggaagtagcccagagcggtcatcacccagttcccaacagctgttgggtgacctgtttagagggataattgagag

SEQ ID NO: 4560 - DNA, 2632 bp, Homo sapiens
  SIMILAR (292)..(726): 491254mologous to Mus dunni endogenous virus pol polyprotein,accession number AF053745,Smith-Waterman Score=354.
atggagcaggccaatcacccagtaaggcttatcaatgtggtttgcaaggacactttaaaaaagattgtccaacaagaaacaagctgccccctcacccacgtccactatgccgaggcaatcactggaaggtgcactgccccagaggacaaaggctctctggaccagaagcccccaacagatgatccaacagggtgcccatggcaagtgccagctcatgtcatcaccctcactgagacctgggtatgtttaaccattgagggccaggaaattgacttcctcctggacactggagtacaaaaaccgaatggtcagtggagactagtgcaagatcttatacccatcaaagaggcagtaattcctttatatccagttgtaccaaacccctataccctgatctctcaaataccagagaaagcagaatggttcatggctctggacctcaaggatgccttcttctgtatctccctgcactctgactcccagtttctttttgcctttgaggatcccacaaaccacacatccaaaattacacggacagtcttgccccaagggtttagggatagccctcctctgtttggtcaggcactggcccaagatctaggccacttctcaagtccaggcactctagtctttcagtatgtggatgatttaattttggctaccagttcagaagcctcatgccagcaggccactctagatctcttgaacttcctagctaatcaaggaaaggtagttcctaatctttgggggaaactcccattaaataccacaaggaaatcatggagttattgcacgcagtgcaaaaacccaaggagatggcagtcttacactgccaaagccatcaaaaagcagctggcagaggcaggtcctgtgacagccatcttgctgctactcatctttgggccctgtatttttaacctccttattaaatttgtttcctccaggattgaggccatcatgctacagatggtcttacaaatggaaccccaaatgagctcaactaacaacttctaccaaggacccctggaccgatgcactgaccctttgtctggcctagagagttcccctagatgctcagaggccccatgcctgatgagtcagtggacaggggacattgaatatgacctgcttctgccacccattccacaccaaacaactctgtgtgacctacaaaatcttaaaggcatcttttcaagatatcacagaaaatggtatggagaaatacttgcattgcttacccccaccgccaacgtatgtggacatagtcaagtaccccatgcttgctcaatctatcacgaccctgtcacgtggaaccctcagggtttattgcctaagtccctgtatggagtcacaaagtggggagataaggaacattttgaatgggggtcccaacagcaacgagctttttatgagttaaaaagaaaaactcatgtcggccccagccctggggctacctgacctgacaaaactctttacactccatgtgtcagacagagaaaaaaaaatggcggttagagttttgacccagaccatggggccctggctggggccagtggcctacctctctaaacaactagatggcgtttctaagagttggcccccatgtttgagggctttggcagcaacagccctgctagcacgagaagtggataagctaactcttgggcaaaacctaaacataaaggccccccatgctgtggtgactttaatgaataccaaaggacaccattggctaatgaatgctagaataactagataccaaagtttgctctgtgacaaaccccatataaccattgaagtttgcaacaccctgaaccccaccaccttgctcctggtatcagagagcccagttgaacataactgtgtagaggtgttggactcagtttattctagcaggcccaacctccgagaccatccttggacatcagtagactgggagctgtatgtggacgggagcagcttcatcaacccacaaggagagagtgtatggggcattatacaaggaaaaaggcctattaaactctgggggaaaagacgtaaagtatcagcaagagatcttgcaattattggaggcagtgtggaagccccaaaactggtgcagcagtgtgtcacctactggcagcacaatgctaggcaaggtccaaatgtcctgcccggcatacaatcttatggagcagccccctttgaagatctccaagtagccctcactgagatgcccaaatgtggaggtaacaagtatttgctagttctagtgtgtgcatacgctgggtgggtggaagtctatccaacacagaccgagaaagctcatgaagtaacctgtgtgcttctccgagatctccttcctaggtttggactgcccttacaaatcagctcagacaacgggctgggatttgtggctgacttggtacagaagacagcaaagaatctcaccgacactggacagctcccactggactatactggatatgtgggcatagagcctacaccaaattacctgaccaatgggattaccctggatgttgtattaagaacagaatgtaaagaagtggaactatctcagggagaattattagtaggccactgcaataacaaagtgaagggaaatggtgacttagagcaggaagatggctga

SEQ ID NO: 4561 - DNA, 506 bp, Homo sapiens
  SIMILAR (260)..(409): 301254mologous to Homo sapiens angiotensin/vasopressin receptor AII/AVP,accession number AF054176,Smith-Waterman Score=55.
ttcctggcactcaccagccgcttcctgtttgtactcctgaacgaggagaccaggagccacctggagaagagtctctgctggaaggtctcgccgcacatcaagatggacctgttgcagtggatccaaagcaaagctcagagcgacggctccaccctgcagcagggctccttggagttcttcagctgcttgtacgagatccaggaggaggagtttatccagcaggccctgagccacttccaggtgatcgtggtcagcaacattgcctccaagatggagcacatggtcttcttcgttctgtctgaagcgctgcaggagcgcccaggtgctgcacttgtatggcgccacctacagcgcggacggggaagaccgcgcgaggtgctccgcaggagcgcacacgctgttggtgcagctaccagagaggaccgttctgctggacgcctacagtgaacatctggcagcggccctgtgcaccaatccaaacctgatagagctgtctctgtaccgaa

SEQ ID NO: 4562 - DNA, 381 bp, Homo sapiens
  SIMILAR (60)..(308): 1001254mologous to Homo sapiens glyceraldehyde-3-phosphate dehydrogenase,accession number X01677,Smith-Waterman Score=435.
ttcgacagtcagccgcatcttcttttgcgtcgccagccgagccacatcgctcagacaccatggggaaggtgaaggtcggagtcaacggatttggtcgtattgggcgcctggtcaccagggctgcttttaactctggtaaagtggatattgttgccatcaatgaccccttcattgacctcaactacatggtttacatgttccaatatgattccacccatggcaaattccatggcaccgtcaaggctgagaacgggaagcttgtcatcaatggaaatcccatcaccatcttccaggagcgagatccctcaacgaccactttgtcaagctcatttcctggtatgacaacgaatttggctacagcaacagggtggtggacctcat

SEQ ID NO: 4563 - DNA, 483 bp, Homo sapiens
  SIMILAR (207)..(482): 831254mologous to Oryza sativa glyceraldehyde-3-phosphate dehydrogenase,accession number U31676,Smith-Waterman Score=401.
gatttcgtgccgcatcttcttttgcgtcgccagccgagccacatcgctcagacaccatggggaaggtgaaggtcggagtcaacggatttggtcgtattgggcgcctggtcaccagggctgcttttaactctggtaaagtggatattgttgccatcaatgaccccttcattgacctcaactacatggtttacatgttccaatatgattccaccaactgcttagcacccctggccaaggtcatccatgacaactttggtatcgtggaaggactcatgaccacagtccatgccatcactgccacccagaagactgtggatggcccctccgggaaactgtggcgtgatggccgcggggctctccaaaacatcatccctgcctctactggcgctgccaaggctgtgggcaaggtcatccctgagctgaacgggaagctcactggcatggccttccgtgtccccactgccaacgtgtcaatggtggacc

SEQ ID NO: 4564 - DNA, 410 bp, Homo sapiens
  SIMILAR (72)..(410): 881254mologous to Homo sapiens glyceraldehyde-3-phosphate dehydrogenase,accession number X01677,Smith-Waterman Score=503.
ctgcggaattcggcacgagagccgcatcttattttgcgtggccagccgagccacatcgctcagacaccatggggaaggtgaaggtcggagtcaacgggaagctcgtcatcaatggaaatcccatcaccatcttccaggagcgagatccctacaaaatcaagtggggcgatgctggcgctgagtacgtcgaggagtccactggcgtcttcaccaccatggagaacgctggggctcatttgcaggggggagccacaagggacatcatctctgccccctctgctgatgcccccatgttcgacatgggtgtgaaccacgagaagtatgacaacagcctcaagatcatcagcagtgcctcctgcaccaccaactgcttagcacccctgtgcaaggtcatccatgacaactgtgga

SEQ ID NO: 4565 - DNA, 369 bp, Homo sapiens
  SIMILAR (157)..(246): 901254mologous to Amanita phalloides glyceraldehyde-3- phosphate dehydrogenase,accession number AF044199,Smith-Waterman Score=144.
ctctgctgatgcccccatgttcgatatgggtgtgaaccatgagaagtatgacaacagcctcaatatcatcacgtgatgaaggcagggcccgtggagaagcggccagcctggcaccctatggacacgctcccctgacttgcgccccgctccctctttctttgcagcaatgcctcctgcaccaccaactgcttagaacccctggccaaggtcatccatgacaactttggtatcgtggaaggactcatggtatgagagctggggaatggaactgaggctcccacctttatcatccaagactggctcctccctgccggagctgcgtgctaccctggggatggtggttctggggactggcttatccataatttc

SEQ ID NO: 4566 - DNA, 596 bp, Homo sapiens
  SIMILAR (129)..(464): 911254mologous to Homo sapiens glyceraldehyde 3-phosphate dehydrogenase (EC 1.2.1.12),accession number J02642,Smith-Waterman Score=520.
gttagcacccctggtcaaggaaatccatgacaactttggtatgggggaaggactcatgaccacaggccatgccatcactgccacccacaagactgcggatggcccctccggaaaactgtggcgtgacaggccgcggggctcaccaaaacatcatccctgcctctactggcgctgccaaggctgtgggcaaggtcatgcctgagctgaacgggaagctcactggcgtggccttccgtgtccccactgccaacgtgtcagtggtggacctgacctgccgtcgacaaaaacctgccaaatatgatgacatcgggaaggtggtgaggcaagcgcctgagggccccctcaagggcatcctgggctacactgagcaccaggtggtctcctctgacttcaacagcgacacccactcctccacctttgacgctggggctggcattgccctcaacgaccactttgccacactcagtcccccaccacactgaatctcccctcctcacagttgccatgtagaccccttgaagaggggaggggcctagggagccgcaccttgtcatgtaccatcaataaagtaccctgtgctcaacccaaaaaaaaaa

SEQ ID NO: 4567 - DNA, 381 bp, Homo sapiens
  SIMILAR (243)..(380): 1001254mologous to Homo sapiens glyceraldehyde 3-phosphate dehydrogenase (EC 1.2.1.12),accession number J02642,Smith-Waterman Score=230.
cagcgagatccctccaaaatcaagtggggcgatgctggcgctgagtacgtcgtggagtccactggcgtcttcaccaccatggagaaggctggggctcatttgcaggggggagccaaaagggtcatcatctctgccccctctgctgatgcccccatgttcgtcatgggtgtgaaccatgagaagtatgacaacagcctcaagatcatcagcaatgcctcctgcaccaccaactgcttagcacccctgcctctactggcgctgccaaggctgtgggcaaggtcatccctgagctgaacgggaagctcactggcatggccttccgtgtccccactgccaacgtgtcagtggtggacctgacctgccgtctagaaaaacctgcca

SEQ ID NO: 4568 - DNA, 1597 bp, Homo sapiens
  SIMILAR (98)..(337): 1001254mologous to Homo sapiens glyceraldehyde 3-phosphate dehydrogenase (EC 1.2.1.12),accession number J02642,Smith-Waterman Score=418.
  misc_feature (1)...(1597): n = a,t,c or g
cccatcgaccgcctgcaggaattcggcacgagcctgttcgacagtcagccgcatcttcttttgcgtcgccagccgagccacatcgctcagaacacctatggggaaggtgaaggtcggagtcaacggatttggtcgtattgggcgcctggtcaccagggctgcttttaactctggtaaagtggatattgttgccatcaatgaccccttcattgacctcaactacatggtttacatgttccaatatgattccacccatggcaaattccatggcaccgtcaaggctgagaacgggaagcttgtgatcaatggaaatcccatcaccatcttccaggagcgtttatccctccaaaatcaattggggctgatgctggcgctgagtacgtcttggagtccactggcgccttcaccaccatggagaacgctggggctcatttgcaggggggagccaaaagggtcatcatctctgccccttctgcttgacggcccccatgttcgtcatgggtgtgaaccatgagaagtatgacaacagcctcaagatcatcagcaatgccttcctgcaccaccaactgtcttagcacccctgggccaaggtcatccatgacaactttgggtatcgtgggaaggactcatgaccacagtccatagccatcactagccacccaaaagactgtaggatggcccctccgggaaaactgtgggcgttgatgggcccgcggggcttcttccaggaacatcaatccctgccttttactggcggctgccaagggttgtggggcaaggttcatcccctgagcttgaacgggggaagctcacttgggcatgggccttccggtgtccccaactgccaaaacgtgtcaatgggtgggacctgaacctgccgtcttagaaaaaccctgcccaaaatatgattgacatcaaggaagggtggtgaaagcaggccgtcggaagggcccccttcaaggggccatcctggggctacaactgagcaacccaggtgggtctccctctggactttcaacaagcgacaacccactcctcccaccttttgacgcctggggcttggcatttgcccttcaacggacccacttttgttcaaagctcattttcctgggtattgacaacggaattttgggctacagcaaccagggtgggtgggaccttcatgggccaccatggcccacatgggctttccaagggagttaaggaccccttgggaccaccaggccccaggcaaggaggcacaagagggaaggagagagaaccctaattgctgggggagtccctgccacactcagttcccccaccacactgaatcttcccctccttcacaagttgccaatgtagaccccttgaaaaaggggaaggggtcaagggaagccgcaccttgtcatgtatccatctaataaagtatccctgtgctcaaccnnnnnnnnnnnnnggggggggcccgttttaaaggacccttgggggggccaaagttaacccgggcaggcaaggaaaaagttttttccttatagggggccgaataaaaacctacctgggaatttttggaaaggacccttactttgggggggggacaaaatgggccaaccaacct

SEQ ID NO: 4569 - DNA, 272 bp, Homo sapiens
  SIMILAR (155)..(3): 1001254mologous to Homo sapiens 30 kDa protein,accession number AF157321,Smith-Waterman Score=253.
ctgtcagatacttgttcctgggtgagcttcttgtcgctctgcagcaggatggacacgtagtggcggatcatgcctacgaagaaagtgatgataacgatgggtaggaccacccagaggcggatgttggagtcgagcaacagttctggccctgccatcttcactgaaagctggttcccagttgccttcagctgggctgcctggtcttccacttccggcgcgaacgttgacgtcacgtcgtggcgcacctcagtggcgtcagagcggcgtcgggc

SEQ ID NO: 4570 - DNA, 498 bp, Homo sapiens
  SIMILAR (307)..(495): 961254mologous to Homo sapiens Human breast tumour-associated protein 9,accession number Y48464,Smith-Waterman Score=333.
atggcagggccagaactgttgctcgactccaacatctgcctctgggtggtcctacccatcgttatcatcactttcttcgtaggcatgatccgccactacgtgtccatcctgctgcagagcgacaagaagctcacccaggaacaagtatctgacagcatgcagcagagtgcaaggcacatgctgggctgcccggccttccacttccggcgcggaagttggcgtcacgtcatggcgcgcctcggtggcgtcagagcggcgtcgggcctggcgggaaagtcgaaaactacgggcggcgacggcttctcggggacgaggcacccacagtccctctcccataagcctgccaagaagattgatgtggcccgtgtaacctttgacctgtacaagctgaacccacaggacttcattggctgcctgaacatgaaggcgactttttatgatacgtactccctttcctatgatctgcactgctgtggggccaaacgcatcatgaagtga

SEQ ID NO: 4571 - DNA, 1774 bp, Homo sapiens
  SIMILAR (31)..(597): 951254mologous to Homo sapiens Human Adipose Specific Protein 1,accession number Y94441,Smith-Waterman Score=925.
atggagtccaacgcagtccagctgacaaggatggaatacgccatgaagtcccttagccttctctaccccaagtccctctccaggcatgtgtcagtgcgtacctctgtggtgacccagcagctgctgtcggagcccagccccaaggcccccagggcccggccctgccgcgtaagcacggcggatcgaagcgtgaggaagggcatcatggcttacagtcttgaggacctcctcctcaaggtccgggacactctgatgctggcagacaagcccttcttcctggtgctggaggaagatggcacaactgtagagacagaagagtacttccaagccctggcaggggatacagtgttcatggtcctccagaaggggcagaaatggcagcccccatcagaacaggggacaaggcacccactgtccctctcccataagcctgccaagaagattgatgtggcccgtgtaacgtttgatctgtacaagctgaacccacaggacttcattggctgcctgaacgtgaaggcgactttttatgatacatactccctttcctatgatctgcactgcttggggggccaagcgcatcatgaacgtgcctacagagcaagatttcgtgtcgatgatgggatgggatggcatacgatcgcatagaatgcgttatgaaaacttggatgggacagcaaaacataaagaaaaaagccagaaatccccgaaatcctactcctcggaaatagcgacggggctcacatttagcagtacatctcaatccgttctaggagaagggcacttggggtgtgacatgcctggttttgaattctggctctgctactgcctaactgtgggttcttggccagagaatctgctgtactacagcctggatgaagactccaaaatcatgatctccgactttggcctctccaagatggaggacccgggcagtgtgctctccaccgcctgtggaactccgggatacgtggcccctgaagtcctggcccagaagccctacagcaaggctgtggattgctggtccataggtgtcatcgcctacatcttgctctgcggttaccctcccttctatgacgagaatgatgccaaactctttgaacagattttgaaggccgagtacgagtttgactctccttactgggacgacatctctgactctgccaaagatttcatccggcacttgatggagaaggacccagagaaaagattcacctgtgagcaggccttgcagcacccatggattgcaggagatacagctctagataagaatatccaccagtcggtgagtgagcagatcaagaagaactttgccaagagcaagtggaagcattctttgcatgctttctttctggtgcaacaaggtgtgcgactgctgcgacaagaccccatcgaatgccttttctcttttatctgttcctccaacaacaacatcgcccgcatcactggcatggtggagcggctgtgccaggcttttggacctcggctcatccagcttgatgatgtcacctaccatggcttccccagcctgcaggccctggctgggccagaggtggaggctcatctcaggaagctgggcctgggctatcgtgcccgttacgtgagtgccagtgcccgagccatcctggaagaacagggcgggctagcctggctgcagcagctacgagagtcctcatatgaggaggcccacaaggccctctgcatcctgcctggagtgggcaccaaggtccaacgcagtccagctgacaaggatggaatacgccatgaagtcccttag

SEQ ID NO: 4572 - DNA, 1124 bp, Homo sapiens
  SIMILAR (707)..(606): 971254mologous to Homo sapiens Human breast tumour-associated protein 10,accession number Y48465,Smith-Waterman Score=183.
gcacgagcccagctgaaggcaataagcttggtctcaccgctgcagcagaggttctgtgctagccgggcataggggcgagagaaggcccagaggcgacagtcagagagaagcaactgcgccccggtgaagagaagctcgcccattcaccggctgggagccagctttcagtgaagatgggcagggccagaaactgttgcttgactccaacatctgcctctgggtggtcctacccatcgttatcactcttcgtagacatgatccgccactacgtgtccatcctgctaggagagcgacaataatctcacccagggaacaagtatctgacaggggacgaggcacccacagtccctcttcccattaagccctgccaagaagatttgatgtgggcccgtgttaacctttttgacctgttacaagttgaacccacagggactttcattgggttgcctgaacattgaagggcgattttttatggattacgtaattccctttcctattgatcttgcattgttgttgggggccaaacgcatcatgaaaggaagctctccactgggcccttttcagcatgcaaaccacggggccacgtgctgcttcacctcctgttacctgcagcagctcctcgatgccacagaggacgggcatccccccaagggcaaggcctcatccctcatcccgacctgtctaaagatactgcagtgaaagcccaagccctagctttccccagtgaaggactaaaattaggggccccccgctcaattggtagtggccacaagcctggcagctgtagagccgctaaccttccgacacctccctcaccacacaggaccctgagtgaggaggaggggctggaaacctgggatgggttggccaaaggagaacctcaggctcctggcctggcccagctccttcctgcccaaggtagcttagcccatccagactggtcctgaagtctgtccctccattggcatgaagtttgcccctcagcagtccggcctcacaggctgtactttcatggtgctctttaccttttggcccccatcccagaacatttgtgagtgaatttgcaagcatactagcatgtgatattagggagtttgcaataaattattgatgctgaaaaaaaa

SEQ ID NO: 4573 - DNA, 731 bp, Homo sapiens
  SIMILAR (210)..(497): 451254mologous to Homo sapiens 30 kDa protein,accession number AF157321,Smith-Waterman Score=136.
cggacgcgtgggttttcgccggaagtggaagaccaggcagcccagctgaaggcagtaagctcggctcacagtctcaggagagttctggggtacacgggcaaaggggcttgagaaggcccggaggcgaagccgaagagaagcaactgtgccccggagaagagaagctcgcccattccagactgggaaccagctttcagtgaagatggcagggccagagactgttgctcgactccaacatccgcctctgggtggtcctacccattcgttatcattcactttctttcgtagggcatgatccgccactacgtgttccatcctgcttgcagagcgacagagaagcttcacccagggaacaagtatcttgacagttcaagtcctaatttcgaaggcagagttccttcaggggaaaattgggaaattacattcccaaacagtctttttttggacacggaaatttttattttttccgaacccagaggatgggattttttcaaaaaaacttaaacgggaggtagtgccaccttctcctatgactgatcctactatgttgacagacatgatgaaagggaatgtaacaaatgtcctccctatgattcttattggtggatggatcaacatgacattctcaggctttgtcacaaccaaggtcccatttccactgaccctccgttttaagcctatgttacagcaaggaatcgagctactcacattagatgcatcctgggtgagtt

SEQ ID NO: 4574 - DNA, 2253 bp, Homo sapiens
  SIMILAR (1)..(2253): 1001254mologous to Homo sapiens N-ethylmaleimide-sensitive factor,accession number U03985,Smith-Waterman Score=3822.
gagccggacgtgtgcgcgaagatggcgggccggagcatgcaagcggcaagatgtcctacagatgaattatctttaaccaattgttcagttgtgaatgaaaaggatttccagtctggccagcatgtgattgtgaggacctctcccaatcacaggtacacatttacactgaagacacatccatcggtggttccagggagcattgcattcagtttacctcagagaaaatgggctgggctttctattgggcaagaaatagaagtctccttatatacatttgacaaagccaaacagtgtattggcacaatgaccatcgagattgatttcctgcagaaaaaaagcaatgactccaacccttatgacaccgacaagatggcagcagaatttattcagcaattcaacaaccaggcctactcagtgggacaacagcttgtctttagcttcaatgaaaagctttttggcttactggtgaaggacattgaatccatggatcctagcatcctgaagggagagcctgcgacagggaaaaggcagaagattgaagtaggactggttgttggaaacagtcaagttgcatttgaaaaagcagaaaattcgtcacttaatcttattggcaaagctaaaaccaaggaaaatcgccaatcaattatcaatcctgactggaactttgaaaaaatgggaataggaggtctagacaaggaattttcagatattttccgacgagcatttgccttccgagtatttcctccagagattgtggagcagatgggttgtatacatgttaaaggcatcctgttatatggacccccaggttgtggtaagactctcttggctcgacagattggcaagatgttgaatgcaagagagcccaaagtggtcaatgggccagaaatccttaacaaatatgtgggagaatcagaggctaacattcgcaaactttttgctgatgctgaagaggagcaaaggaggcttggtgctaacagtggtttgcacatcatcatctttgatgaaattgatgccatctgcaagcagagagggagcatggctggtagcacgggagttcatgacactgttgtcaaccagttgctgtccaaaattgatggcgtggagcagctaaacaacatcctagtcattggaatgaccaatagaccagatctgatagatgaggctcttcttagacctggaagactggaagttaaaatggagataggcttgccagatgagaaaggccgactacagattcttcacatccacacagcaagaatgagagggcatcagttactctctgctgatgtagacattaaagaactggccgtggagaccaagaatttcagtggtgctgaattggagggtctggtgcgagcagcccagtccactgctatgaatagacacataaaggccagtactaaagtggaagtggacatggagaaagcagaaagcctgcaagtgacgagaggagacttccttgcttctttggagaatgatatcaaaccagcctttggcacaaaccaagaagattatgcaagttacattatgaacggtatcatcaaatggggtgacccagttactcgagttctagatgatggggagctgctggtgcagcagactaagaacagtgaccgcacaccattggtcagcgtgcttctggaaggccctcctcacagtgggaagactgctttagctgcaaaaattgcagaggaatccaacttcccgttcatcaagatctgttctcctgataaaatgattggcttttctgaaacagccaaatgtcaggccatgaagaagatctttgatgatgcgtacaaatcccagctcagttgtgtggttgtggatgacattgagagattgcttgattacgtccctattggccctcgattttcaaatcttgtattacaggctcttctcgttttactgaaaaaggcacctcctcagggccgcaagcttcttatcattgggaccactagccgcaaagatgtccttcaggagatggaaatgcttaacgctttcagcaccaccatccacgtgcccaacattgccacaggagagcagctgttggaagctttggagcttttgggcaacttaaaggataaggaacgcaccacaattgcacagcaagtcaaagggaagaaggtctggataggaatcaagaagttactaatgctgatcgagatgtccctacagatggatcctgaataccgtgtgagaaaattcttggccctcttaagagaagaaggagctagcccccttgattttgat

SEQ ID NO: 4575 - DNA, 381 bp, Homo sapiens
  SIMILAR (83)..(181): 1001254mologous to Homo sapiens Human secreted protein, SEQ ID NO: 4748,accession number G00667,Smith-Waterman Score=175.
gttggccagaagtgggatggggttttacagaagaggtcttctgggggaggtgaagggcagagtggagggaaacaggatgtggcatgtgattgtgaggacctctcccaatcacaggtacacatttacactgaagacacatccatcggtggttccagggagcattgcattcagtttacctcaggcgcccgtggtcctgacacccctgcgccgctggagacccctctaagtttctggcccgcagacgaagtggagatccagccaggtcttgagtgctgccgccccatccctgcagccggagactcacctgttgccactcaaggtaccgctacctacaacaccgccgactccgcggcctttaggatttcagctcagttcagctaa

SEQ ID NO: 4576 - DNA, 458 bp, Homo sapiens
  SIMILAR (120)..(458): 991254mologous to Homo sapiens ARF,accession number AF208864,Smith-Waterman Score=584.
ttcctgcccccacgcctgtcgtggtttagctgaactgagctgaaatcttaaaggccgcggagtcggcggtgttgtaggtagcggtaccttgagtggcaacagaattcgattaaattacaatgggaaacatttttgaaaagctctttaaaagtctacttgggaaaaaaaagatgcggattcttatattgagtttggatacagctggaaaaaccaccatcttgtataaattgaagctgggggagactgtgcctgccgtccctacagtaggtttctgtgtggagacagtagaatataaaaataacaccttcgctgtctgggatgttggcagccacttcaaaatcagacctctgtggcagcattttttccagaacacaaaagagctatcagcttcccagtttgcacaattcatcaagaaattatgcggggtcactggcacaaatgatgaggcatctcctggg

SEQ ID NO: 4577 - DNA, 1260 bp, Homo sapiens
  SIMILAR (1120)..(1167): 871254mologous to Homo sapiens Human secreted protein, SEQ ID NO: 6661,accession number G02580,Smith-Waterman Score=75.
taaactgttacttgttggttaacatttatgtttgaaatggaaaatcaataaaagggaacttatattaatttataagcacattaagaaaagaggggacactatttttgatcccaagatagcaacaaaactaaaaacttttccaaagaagcaaacgggaacagaggtcaataggctgtgacctctattttatgtttaaaacgtttgcacatccactaagtgcactgcagaatcttaaatgcaattaaaatcaatgggcatacaagttatagagtagcttgaggaagcacaagtcaatcttcattagctattgtagcaaagattccttccaaatccatgggagcaggtgctgtttatactcccttcattgacgcccagaacaatggcatagggtgagcattgaatacttatttgctacgcgcatgaatgaatgaagctacgctgcgaaggcagactgcgtggctgctggtcccgtggctgctggccccgcagcatgtctgccgccttttcagcaggcttgctgcatctcctcattccctcacctttctggcagtaaggagttcccacgtttgccccgcttcagtgtcgtggactggcaaaatgctgtctctaaacccctccacgcctcaggtaatccgctcatttctcacacagacgcagctgtttccgaggaatgtccggccgagcccgcagggtgcgggcagcgagtatcctgggaccttcaggggaggaggtggctcccacaccccaataccgtacagagagtccgaagagtccgggcccttatttttccaattcttggtaaacaacaaacatgctcgccctcgcctccccgtgcagacgcctcagggccaactcggacttcgccaggccccgagagcagacagaagacaccaaatggctattaccaagagagaggggcgagggcacccgcgccggcgtataacgcttgcccttttccccgcgctcggtcggcccgacgcctcaagcgccaaggttgctttgcaatggctggaggcagctaccaacgactttcttcacagaattggaaaaaactactttaaagttcatatggaaccaaaaaagagccctcattgccaagacaatcctaagccaaagaacaaagctggaggcatcacgctacctgacttcaaactatactacaaggctacggtaacaaaaacagcaaggttccttctctataaagtaagtcaaatcgacaatacagacctctttgatcctgtgaagattaaatttgaatga

SEQ ID NO: 4578 - DNA, 1372 bp, Homo sapiens
  SIMILAR (710)..(1087): 621254mologous to Homo sapiens putative p150,accession number U93565,Smith-Waterman Score=388.
atgaacatcgatgcaaaaatcctcaataaaatactggcaaaccgaatccagcagcacatcaaaaagcttatccaccatgatcaagtgggcttcatccctgggatgcaaggttggttcaacatacgaaaatcaatgaatgtaatccagcatataaacagaaccaaagacaaaaaccacatgattatctcaatagatgcagaaaaggcctttgacaaaattcaacaacccttcatgctaaacactctcaataaattaggtattgatgggatgtatctcaaaataataagagctatctatgacaaacccacagccaatatcatactgaatgggcaaaaactggaagcattcccttcaaaacatggcacaagacagggatgccctctctcaccactcctattcaacatagtgttggaagttctggccagggcaatcaggcaggagaaggaaataaagggtattcaattaggaaaagaggaagtcaaattgtccctgtttgcagatgacatgattatatatctagaaaaccccatcgtctcagcccaaaatctccttaagctgataggcaacttcagcaaagtctcagaatacaaaatcaatgtgcaaaaatcacaagcattcttatacaccaataacagacaaacagagagccaaatcatgagtgaactcccattcacaattgcttcaataagaataaaatacctaggaatctaaacttacaaggggtgtgaaggacctcttcagggagaactacaaaccactgctcaacaaaataaaggaggacacaaacaaatggaagaacataccatgctcatgggtaggaagaaatcaatatcatgaaaatggccatacttgcccaaggtaatttacagattcaatgccatccccatcaagctaccaatgactttcttcacagaattggaaaaaaactactttaaagttcatatggaaccaaaaaagagcccgcattgccaagtcaatcctaagacaaaagaacaaagctggaggcatcacactacctgacttcaaactatactacaaggctacagtaaccaaaggagcatggttccaacaccacaagcatacgcttattaaggagcctttattagacagcgtattctcacctaacaggccagatcatggcaaaaagcaagacaagcaaccccagacaaagaatattgccaatgccagtgctgactcaaagaacacgcaacagatgaatggtttcgtgactggtgcagctacttccttcatccccaaggacagaacggcctcttccctgtgtggctgcactggaaggagaagacaatctgttgctaaatacctcagaataaggccacacattaatgttccctctttcacatactacaaataa

SEQ ID NO: 4579 - DNA, 671 bp, Homo sapiens
  SIMILAR (536)..(670): 971254mologous to Mus musculus lysosomal acid phosphatase,accession number X57199,Smith-Waterman Score=232.
atggcaccagaatttggctctgacgagggcctcaggaagcttccactcatggaggaaggcaaagggggagcagatatgtcacacgagatttgtgttgccaatctacaggtttatgtgcgaagcacagacttcgatcgtactctcatgagtgctgaggccaacctggctggactcttccctcccaatgaagttcagcacttcaaccctaacatttcatggcagcctatccctgttcacactgtgcccatcactgaagacaggttgctgaagtttcctttgggtccatgtccccgttatgagcagctgcagaatgagactcggcagacaccagagtatcagaacagaagtattcagaatgcacaatttctgaacatggtggccaacgagacagggcttacaaacgtgaccctagagaccatctggaatgtgtatgacacactctcttgtgaggcaccttccccaccttggggaagaaagccacccttggagaggctctggcctaggcctagggagctaacctgcccgctgcgatacacagcaaacccatgggctgcttctgccgccctgggcctcaccccaaaccgtgcagcgtctgagccagctaaaggacttcagcttcctcttcctcttcgggatccacgagcaagtacagaaggcccggcttcaggggg

SEQ ID NO: 4580 - DNA, 1923 bp, Homo sapiens
  SIMILAR (1)..(1869): 511254mologous to Homo sapiens gonadotropin inducible transcription repressor-4,accession number AB021644,Smith-Waterman Score=1670.
gactcagttgcctttgaggatgtggctgtgaacttcacccaggaagagtgggctttgctgggtccttgccagaagaatctctacgaagatgtgatgcaggaaaccatcaggaacctggactgtgggcacgagacagagttcgtggagtacgagaaccttcgagaccccatgaacatgccattgcacacgacagatggacctcataagtgtaagatatgtggaaaaggctttgattgtcctagttcactgaaaagtcatgaaagaactcacactggagagaaactctatgaatgcaagcagtgtgggaaagcgttatctcatagctcaagctttcgaagacacatgacaatgcacactggagatggacctcacaaatgcaagatatgtgggaaagcctttgtttatcccagtgtatttcaaaggcatgaaaagactcacactgcagagaaaccctataaatgtaaacaatgtggcaaagcctaccgtatttccagttctcttcgaaggcatgaaacaactcatactggagagaaaccctataaatgcaaatgtgggaaagcctttattgatttctattcctttcaaaatcacaaaacaactcatgctggagagaagccatatgagtgtaaggaatgtgggaaagcattcagttgtttccaatacctttctcaacatagaaggactcacacaggagagaaaccttatgagtgtaacacatgtaagaaagccttcagtcattttggtaacttaaaagtacatgaaagaattcactctggagagaagccgtatgaatgtaaggaatgtgggaaagcattctcttggctcacttgctttctacgacatgaaagaattcacatgagagagaaaccctatgagtgtcaacaatgtggtaaagccttcactcattcccgcttccttcaaggacatgaaaggattcacactggagagaagccgtatgaatgtaaggaatgcaggaaggcattctcttggctcacttgccttctacaacatgaaagaattcacactcgagagaaaccttatgaaggtaaacaatgtggtaaagccttcactcattcccgtttccttcaaggacatgaaagaactcataccgcaaagaagctatgtgaatgcctttctacagtcagtgctcggaaatctgtggatctaatcatagcttcatacccattgttcttgaacttgtttagtacccctaaaacacttcgaaactgttcctatcgaagacatgagagaatgcacactggggagaaaccgtatgaatgtaagcagtgttctaaagccttgcctgattccagttcctatataagacatgaaagaactcacactggagagaaaccatatacatgtaaacagtgtgggaaagccttcagtgtttccagttcccttcgaagacatgaaaccactcacagtgcagagaaaccctatgagtgtaagcaatgcgggaaaacatttcatcatcttggaagctttcagatacacatgaaaaggcacactggagatcgacctcataaatgtaagatatgtgggaaaggctttgatcgtcccactttagttcgatatcatgaacgaatttccactggagagaaaccccatgaatgtaagcaatgtgggaaagcatttgatcatctgggaagcttccaaagacacatgataaggcacactagagatggacctcataaatgtaagatatgtgggaaaggctttgattgttccagtacactgcaaagtcatgaaagaactcacactggagagaagaaactctatgaatgcaagcagtgtgggaaagcgttatctcatagctcaagctttcgaagacacatgacaatgcacactggagatggacctcacaaaatgcaagatatgtgggaaagcctttgtttatttcattggatttcaaagacatga

SEQ ID NO: 4581 - DNA, 459 bp, Homo sapiens
  SIMILAR (417)..(452): 411254mologous to Machiloides banksi elongation factor-1 alpha,accession number AF137390,Smith-Waterman Score=36.
atgggaaagggctccttcaagtatgcctgggccttgtataagcagaaagctgagtgtgaacgtggtgtcacaattgatacttctctgtggaaatttgagaccagcaagtgctatgtgaccatcacaagactttatcaaaaacattattacaggcacatcccagcaaggacagacggccagtgtggcagctttctgtatcctgagctcttgtccagcatcctggaagaatcaggtgtcacacagacttggaggatgaatgcagggcttttaaggttcaaaagtttggagggatcagaagaagacaggaagatgagggaaagcttggaacttcctagagacttgttgaatggttttgaccaaaatactgatagtgatgtgaatagtgaagtcctggctgaagtgatctcagatgaagatggggaacttattggaaactggagaaaaggcctggaggtctag

SEQ ID NO: 4582 - DNA, 719 bp, Homo sapiens
  SIMILAR (532)..(651): 751254mologous to Acerentomon sp. CFNDS1 elongation factor 1- alpha,accession number AF251717,Smith-Waterman Score=160.
gagaagccgctgattacgccaatgcttggcacgaggggtttgccgccagaacacaggatgacgtgaaaactacccctaacagccagaatgggaaagtgttaagactcatatcaacattgtcgtgcattggacacgtgagattcggtcaagtccaccactactggccatctgatctataaatgcggtggcatcgacaagaagaaccattgaaaaatttgagaaggaggctgctgagatgggaaagggctccttcaagtatgcctgggtcttggataaactgaaagctgagcgtgaacgtggtatcaccattgatatctccttgtggaaatttgagaccagcaagtactatgtgactatcattgatgccccaggacacagagactttatcaaaaacatgattacagggacatctcaggctgactgtgctgtcctgattgttgctgctgggtgttggtgaatttgaagcttgctatatgccagaatgggccagacccgagagcatgcccttctggcttacaccactgggtgtgaaaacaactaatttgtcgtgttaacaaaatggattccactgagccaccctacagccagaagagatatgaggaaattgttaaggaagtcagcacttacattaagaaaattggctacaaccccgacacaagagcatttgtgcccaatttctggtttaaatggtgaccacatgctggagcccaaatgctaaa

SEQ ID NO: 4583 - DNA, 528 bp, Homo sapiens
  SIMILAR (202)..(438): 401254mologous to Chlamydomonas reinhardtii amino acid feature: Rod protein domain, aa 266 .. 468; amino acid feature: globular protein domain, aa 32 .. 265,accession number L29029,Smith -Waterman Score=137.
atggctgcccctcaggacctggacatcgctgtgtggctggccacggtgcacctggagcagtatgcagacacgttccgacggcatggcctggctacagcaggtgcagcccggggcctgggccacgaggagttgaagcagttgggcatcagcgccacagggcaccggaaacgcattctacgcctgctgcagacaggcaccgaagagggctccctggatcccaaatcagatagtgccatggaaccatcccccagcccagccccgcaagcccagccccctaagcccgtgccgaagcccaggaccgtgtttggtggactcagtggccctgccaccactcagagacctgggctgagcccagccctcgggggaccaggagtgtccaggagcccagagcccagcccaaggccccctcctctccccacttcctcctctgagcagtcttcagccctaaatactgtggagatgatgcctaattccatctacttcggcctggactcaagaggcagggcacaggcagctcaggacaagtga

SEQ ID NO: 4584 - DNA, 448 bp, Homo sapiens
  SIMILAR (297)..(437): 931254mologous to Homo sapiens peptidylprolyl isomerase,accession number X52851,Smith-Waterman Score=241.
ccggcgcgcccacgcgtgcgcgaggagaaggagaaagaaagaaatgcttggggtaaatgttttaactagtcattcttcccaggagcggatgaagctgacttttaaaaagaaggctgtgaactttgcagatgctgctgccgcccagggccccctgcttccagccatggtcaaccccaccatgtttttccacattgctgtcgatggcgagcccttgggctgtgtctccttcgaggtaaggggcctggaaagcaagaagtgactgctcatctaatccataaaactatgttaacagattggagctgtttgcagacaaggttccaaagacagcagaaaatttccatgctctgagcactggagaaaaaggatttggttataagggttcctgctttcacagaattattccagggtttacgtgtcagagtggtgacttcacacgccctacagcatg

SEQ ID NO: 4585 - DNA, 976 bp, Homo sapiens
  SIMILAR (325)..(750): 451254mologous to Homo sapiens peptidylprolyl isomerase,accession number X52851,Smith-Waterman Score=222.
ggcacgagggacgccaccgccgaggaaaaccgtgtactattagccatggtcaaccccaccgtgttcttcgacattgccgtcgacggcgagcccttgggccgcgtctcctttgaggtaaggggcctggataccaagaagtgactgctcatctaatccataaagctatgttaacagattggaggtagtagcattttcattacaagtgactaaaagaacagctgtttacccctgatcgtgcagcagtgcttgctgttccttagaattttgccttctgtttgcagacaaggtcccaaagacagcaggtgtttaatttttttttaaacagaaaattttccgtgctctgagcactgggagagaaaggatttgggttataaggggttccctgcttttcacagaattattccagggtttatgtgtcagggttggtgactttcacaccgccataatggcactgggtggcaagtccatcttatggggagaaattttgaagatgagaaacttcatcctaaaagcatacggggtcctgggatctttgtccatggccaaatgcttggacccaacaaaaattggttccccagtttttccatcttgcactgccaagacttgagtggttgggatgggcaagccttgtggtgttttggcaaaagtgaagaagggattgaatattgtggaggccatggagcgcttttgggtccaggaatggcaagaccagccaagaagatcaccattgctgactgtggacaactcgaataaagtttgacttgtggtttatctttaaccaccagatcattcccttctgtagcttcaaggagagcacccctccaccccatttgctcgcaagtatcctagaatctttgtgctctcgcttgcagttcccttttgggttccatgttttccttgttccctcccatgcctagctggattgcagcagttaagtttatgattatgaaataaaaactaaataacaaaaaaaaaa

SEQ ID NO: 4586 - DNA, 615 bp, Homo sapiens
  SIMILAR (3)..(515): 671254mologous to Mus musculus Pro-Pol-dUTPase polyprotein,accession number Y12713,Smith-Waterman Score=553.
ggccagaatgcataattggcatagacatacttagcagcggacagaacccccacattggctccctgactggtagggtgagggctattatggtgggaaaggccaaacggaagccattagagctgcctctacctagaaaaatattaaatcaaaaacaatatcgcatagctggagggattgaggagattagtgccaccatcaaggacctgaaagacgcaggggtggtgattcctaccacatccctgttcgactctcccatttggcctgtgcagaagacagatggatcttggagaatgacagtggattatcgtcagattaatcaagtggcaactccaattgcagctgctataccagatgtggcttcattgcttaagcaaattaacacatctcctgacacctggccatacgaccccccatatccaatggtgattgaggtgtcagtggcagataggcatgctgtttggagcctttggcaggcccccataggtgaatcacatcagaggcctctaggattttggaacaaggccctgccatcttctgcagataactactctccttttgagagacagctcttggcctgttactgggctttggtggaaattgaacgtttgattatac

SEQ ID NO: 4587 - DNA, 354 bp, Homo sapiens
  SIMILAR (98)..(352): 711254mologous to Mus musculus Pro-Pol-dUTPase polyprotein,accession number Y12713,Smith-Waterman Score=325.
ctgattcatgggcctgtggccaatggtttggcctggatggtccagggacttggaagaagcatgattggaaaattgaatgacaatgaaatttggggaaagaggtatgtggatagacctctctgagtggtcaaaaactgtgaagatatttgtatcacatgagagtgctcaccatatcacataaaagagctcagcagaggaggattttaataatcaagtggataggatgattcattctgtggacaccactcggcctctttccccagccacccctgtcattgcccaatggacccatgaacaaagtggccatggtggcagggatggaggttacacatgggctcagcaacatggacttcc

SEQ ID NO: 4588 - DNA, 1529 bp, Homo sapiens
  SIMILAR (1103)..(1528): 841254mologous to Mus musculus Pro-Pol-dUTPase polyprotein,accession number Y12713,Smith-Waterman Score=640.
atggagaacactgatactgcttggcatgaactgtttagagagttatgcaaaataaatgcatttgacactcctgatttatcgctcatgagaggcaaggaatttagtgactctgtacataatacctttgaccatatgtggagaagcaaggaacataatgaagttggttgtttgctcctaagttcagtggacaaagtgatggaagaaaatgatgaactcagggattttaactcccatcttcagaaacagatactgaccctcaaatctgctaatatcaccttgagtgagagtcttatctcctgtagagaaagagctgaaattgtggaaaaacacacacaagctcttatcatatccaacagtgggagctgcagtcactcaactacaaaatttaactgcaatgggagtaattggatcccatggtgccaggggccaagtagtggcactcaaccgtcaaaggcaaggagacctccaaccttttaccagggtaactgtgcactggggaaaagggaaatgcagatatttgggggactactggacactggctctgagctgacattgattccaggggacccaaaacatcattgtggtcctccagttaaagtaggggcttatggaggtcaggtaattaatggagttttagctcaggtccaaattacagtgggtccccagactcatcctgtggttatttccccagtgccagaatgcataattggcatagacatacttagcagctggcagaacccccacattggctccctgactggtagggtgagggctattatggtgggaaaggccaaatggaagccattagagctgcctctacctagaaaaatagtaaatcaaaaacaatatcacatccttggagggactgtggaaattagtgccaccattaaggacttgaaagacacagaggcggtgactcccaccacatccccattcaactctcccatttggcctgtgcagaagacagatggatcttggagaatgacagtggattattgtaaacttaaccaagtggtgactccaattgcagctgctgtaccagatgtggtttcattgcttgagcaaattaacacatctcctggtacctggtttgagtggagtccaaaagaaggctctgcagcaggttcaggctgctgtgcaagctgctctgccatttgggccatatgacccagcagatccaatggtgcttgaggtgtcagtggcagatagggatgctatttggagcctttggaacgccgccattggtgaatcacagcggaggcctctaggattttggagcaaggctctcctgtcttctgcagataactactctccttttgagaggcagctcttggcctcttactgggctttggtggaaactgaacgtttgacggtgggtcatcaagtcaccctgcgacctgaactgcctatcatgaattgggtgctttctgacccatctagccataaagttagtggtgcacagcagcgttccatcatcaaattgaagtggtatatacatgattgggttcgagcaggtcctgaaggcacaa

SEQ ID NO: 4589 - DNA, 816 bp, Homo sapiens
  SIMILAR (280)..(483): 621254mologous to Mus musculus Pro-Pol-dUTPase polyprotein,accession number Y12713,Smith-Waterman Score=197.
atgcagctgtcccaggccagctgtccaggccccagctgcccggcggtgctggctccctttgccccaaagggtctgaaggctggcggctggcactcctggattttctggcctctgagtcagggaagctccaggactggcgggatgggctcagcctgtatcaaagtcaccaaatactttctcttcctcttcaacttgatcttctttgtaatgggtccagtgggtccccggactcatcctgtggtcatttccccagtgccagcatgcataattggcatagacatacttagcagctggcagtacccccacattgactccctgactggtagggggtatatcaactctttggctttgtgtcataaccttattcggagagacctcgatcactttttacttctgcaagatatcacactggtccattacattaatgacattatgctaattgggtccagtgagcaagaggtagcaaacacactggacttattgcccaatgggcccatgaacaaagtggccatggtggcagggctggaggttacgcatgggctcagcaacacggacttccactcaccaaggctgacctgcctggctatggccactgctgagtgtccaatttgccagcagcagagaccaacactgagccctcgatatggcaccattccttgggggcatgggacgcacctggagggcgagggtgctggcgtctccagaaggctggagagtagtgtggatcagaggagcctcttagggatgcagatgcttgagtccgttacaacccgaccaagacgctcccagcaggaggccaaggacctgcgtttttaa

SEQ ID NO: 4590 - DNA, 434 bp, Homo sapiens
  SIMILAR (26)..(178): 821254mologous to Homo sapiens TAXREB107,accession number D17554,Smith-Waterman Score=214.
  misc_feature (1)...(434): n = a,t,c or g
aaccgtctaccgtgccggaattcccgggacgacggctgcgagaagacgacagaaggggaagccccattnnnaccgcaaccctgtccttgtcagaggaattggcaggtattcccgatctgccatgtattccagaaaggccatgtacaagaggaagtactcagccgctaaatccaaggttgnnnnnnnnnnnnnnnnggggccctttttaaaggaccaatttttactcccccgggcgggcaaggaattannnnnnnnnnggggcccccaaattaaattccgggggccgggttttaacaggggggggaggggaaaacccggggggtaaccaattttaatcgctttggggagnnnnnnnnnnntgggggccccttttggcggcttcctggtccgggccgaacanaaacgttgtanccggcaacggggcggagatgaaa

SEQ ID NO: 4591 - DNA, 375 bp, Homo sapiens
  SIMILAR (4)..(246): 711254mologous to Homo sapiens TAXREB107,accession number D17554,Smith-Waterman Score=276.
atggcaggtgaaaaagttgagaagccagatactaaagagaagaaacccgaagccaagaaggctgatgctggtggcaaggtgcaagagggaactggcaggtattcccgatctgccatgtattctagaaaggccatgtataagaggaagtactcagccgctaaatcaaagattgaaaagaaaaaggagaaggttcttgcaactgttacaaaaccagttggtggtgacaagaatggtggtacccaggttttcccaaattataacttattcgagctacacgcaaaaagttcaactcccaaagtccactctgaagcaaaggcaaggcccctgcccccaaggagccctgtaaatccaaaagccaaagtagcacccttttaa

SEQ ID NO: 4592 - DNA, 905 bp, Homo sapiens
  SIMILAR (182)..(904): 611254mologous to Homo sapiens ribosomal protein L6,accession number X69391,Smith-Waterman Score=655.
aatcgcgggcctgtctgcaagacttgagttcaggactcccaatccttcgccatccgaacctggagggcatccagtcgacacctacaggggtcggacatgtccaaggctaactgagaggccttccagacgcttcatttttgttgtttgggtttgcggcagggcacaaagaggatggcgggtgaaaaagttgagaagccagatactaaagagaagaaaccacgaagccaagaaggttgatgcatggtggcaaggtgaaaaagggtaacatcaaagcttaaaaagcccaagaagggggaggccccatttgcagccgcaaccctgtcctttgttcagagggatttggcaggtattcccgatcttgccatgtattccagaaaggccattttaccaagaggggagtactttcagcccgcttaaatccaaggttgaaaagaaaaagaaggagaaggttctcgcaactgttacaaaaccagttggtggtgacaagaacggcggtacccgggtggttaaacttcgcaaaatgcctagatattatcctactgaagatgtgcctcgaaagctgttgagccacggcaaaaaaacccttcagtcaagcacgtgagaaaactgcgagccagcattaccccccgggaccattcttgatcatcctcactggacgccacaggggcaaagagggtggttttcctgaaagcagctggctaagttggcttatttactttgttgacttggacctctggtcctcaatcgagttcctctacgaagaacacaccagaaattttgtcatttgccactttcaaccaaaatcgatatcagcaatgtaaaaatcccaaaacatcttactgatgcttacttcaagaagaagaagctgcggaagcccagacaccaggaaggtgagatcttcgaca

SEQ ID NO: 4593 - DNA, 413 bp, Homo sapiens
  SIMILAR (278)..(376): 391254mologous to Rubrivivax gelatinosus similar to Qor (quinone oxidoreductase),accession number AB034704,Smith-Waterman Score=56.
tttcgtggccttggcggccgtgctctgcaggcagtgcctccctcgggcgtgggtctgcaggagagccggacagggcagcggccggcactaccgcgctgcgatttgcgcagagctgaagaagcccctgaccattgaagaggtggcccccgccccgtcgggcctcacgaggtcagagttgatgtccatttctgtggagttaactttggtgatattttgatctgccgtgatcaatatcaggaaaggccccatcttcccttcacacctggacctgtggcagattccagaaaaggtctccctataagaagctgctgtcctccctataacttatggcactgcgatttttgctcttgagcatcgggcccgtacccagcctgggtaatatagctgctgctggaagtgacgagaagtgcaag

SEQ ID NO: 4594 - DNA, 708 bp, Homo sapiens
  SIMILAR (488)..(577): 631254mologous to Homo sapiens Human secreted protein encoded from gene 10,accession number Y30820,Smith-Waterman Score=88.
atggggctgaaactgaatacacacatggaccagacaagaggaagcttgtctggagacaccttggaagggtctccatccaaaagggctaaaataattctgaagaggggtggatttcggggaatcttggggggcgtgggtgtgcaggaacgccggacagggcagcggccggcactaccgtgccacgatttgcgcagagctgaagtagtccctgaccatcgaagaggtggcccccgccccgtcgggcctcacgaggacctgtggcagattccagaaaaggtctccctacaagaagctgctgtcctccctataacttatggcactgagagttttgctcttgagcatcgggcccgtacccagcctggagaaattgttttagtgacggcagcagctggagccacaggccttgcagtgatgtggcaacaaatttcttcaggccaaggtaatatagctgctgctggaagtgacgagaagtgcaagctggcgatggcagaagggtgcgcagtccagcgtgaactacagtcagggcagcctgaaggattcagccacggaccagtagcagtccatggtcggtccatggcctgggagtttagagtattctgggtcctcttattgctccatgacagcacccagaggaagtccaaggaagaaggcttacaagtgagggcaaagttcccagtatttcatactgacatgctaacccacacttga

SEQ ID NO: 4595 - DNA, 142 bp, Homo sapiens
  SIMILAR (43)..(138): 681254mologous to Mus musculus Pro-Pol-dUTPase polyprotein,accession number Y12713,Smith-Waterman Score=110.
ccattcctgttatcgcccaatgggcccatgaacaaagtggccatggtggcaggtcaacaggccaagaagggagttacagtgttggctggggtgattgacccggactatcaagatgaaatcagtttactactctacaacagag

SEQ ID NO: 4596 - DNA, 368 bp, Homo sapiens; identical to SEQ ID NO: 4497
  SIMILAR (86)..(367): 771254mologous to Mus musculus Pro-Pol-dUTPase polyprotein,accession number Y12713,Smith-Waterman Score=411.

SEQ ID NO: 4597 - DNA, 526 bp, Homo sapiens
  SIMILAR (90)..(491): 771254mologous to Mus musculus Pro-Pol-dUTPase polyprotein,accession number Y12713,Smith-Waterman Score=591.
ccacaaagtgggtcatgcacagcaccattccttcatcacatggaagtggtatacacgtgattggtctcgagcaggtcctgaaggcacaaggagttccctatgatcagttgacagaggaagagaagactagggcctggttcacagatggttctgcacgatatgcaggcaccatccgaaggtggacagctgcagcactacagcccctttctaggacatccctgaaggagagcggtgaagggaaatcttcccagtgggcagaagttcgagcagtgcaccttgttgtgcattttacatggaaggagaaatgaccagatgtgcgattatatactgattcatgggctgtggccaatggtttggctggatggtcagggacttggaagaagcatgattggaaaattgatgacaatgaaatttggggaagaggtatgtggatagacctctctgagtggtcaaaaactgtgaagatatttgtatcacatgagagtgctcaccatatcacataaaagagctcagccccacgcgtccg

SEQ ID NO: 4598 - DNA, 843 bp, Homo sapiens
  SIMILAR (211)..(813): 441254mologous to Mus musculus Pro-Pol-dUTPase polyprotein,accession number Y12713,Smith-Waterman Score=352.
atgcgacctgaactgcctatcatgaactgggtgctttctgaaatgagtcatgcacagaagcattccatcatcaaatggaagtggtacatatgtgatcagactcaggcaggtcctgaagtcacaagcaccacccgaaagtggacagctgcagaactacagcccctttataggacatccctgaaggacagcggtgaagggaaatcttcccaccacccctgtcatcaccaatgggcccatgaacaaagtggccatggtggcagggattcaggttatacctgggctcagcaacatggacttctgatcaccaaggctgacctggctatgaccactgctgagtgcctaattagccagcagcagagaccaagactgagccttcaatatagctccattccttggggcaatcagccagccacctggtggcaaattgattatattagacctcttccatcatggaaagggcagagccaggattcacaggaccggtccaggaatcaaggggtgaaagtgaaagtggcaccactcaccatcacccctagtgatacaacagcaaaatttttgctccatgttcctgcagcattacattctgctggtgtagatgtcttagttccagagggaggaatgctgccaccaggaggtacaacaacgattccattaaactggaagttaagattgccacctggacactttgggctcctcatacctttaagtcaacaggctaagaagagagttacagtgttggctggggtgattgacctggactgtcaagatgaaatcagtctactactctacaacagagatgccaaagagttgtataggtatactgcacatcgtgtcagtgattaa

SEQ ID NO: 4599 - DNA, 507 bp, Homo sapiens
  SIMILAR (18)..(203): 621254mologous to Volvox carteri f. nagariensis hydroxyproline-rich glycoprotein DZ-HRGP,accession number AJ242540,Smith-Waterman Score=196.
tcagcagggtaagttgttcacctcctcctctttctcctcctcctcctctctctcctcctcctcctctctctcctcctcctcttctttctcctcctcctccgcctctttctcctcccccttctcctcctcctcctgtttctcttccccctccccctccagtattttccttcccctcctcttgccctcccctttccctcctccccttcttcctcctttacctcctccccctcctctttcgcctccgcctccgcctccaccttggtctccctctcctccaatctgacagatgaaccgaagcagcagaaacacttctgtgttcagcagtttagttagttcttcaaggacctgggagcttccagagccttgacatctctgtcttttaccatcagagggatgactattacctccctgtttgctctcttccttctgctccagccatgtaggacgttcctgcttcccctctgccttctgccatgattgtaagtttcctgaggcttccccagccat

SEQ ID NO: 4600 - DNA, 531 bp, Homo sapiens
  SIMILAR (220)..(393): 771254mologous to Mus musculus RRM RNA binding protein GRY- RBP,accession number AF093821,Smith-Waterman Score=218.
atggggtccagccactgcacacagccaggcatgctggctgctgcggtggggcaggcagttccaggcactgacacgggtgccgactccgtgagcctgtctgcctcctgctgccatcaacatgccatccactgtgcacaggccattcgtgccaaggggcacttgcaggcccacactgagctgccctcagcccccactcagcctccctcctgtgcacgtcagtgcccaaagtcaggaggggacctaggtggcagggagctgtataataatcatgaaattcgttctggaaaacatattggtgtctgcatctcatttgccaacaataggctttttgtggtctctattcctaagagtaaaaccaaggaacagattcttgaagaatttatcaaagtaacaggcagttactgggtgctggggctgtcctttgatttccggaaatggccggtcgccagtgttgtcagagtttccacggaagactgcgcgctactccggccaggagggcggagcggcgagacgctagaagctttgcgctga

SEQ ID NO: 4601 - DNA, 2407 bp, Homo sapiens
  SIMILAR (526)..(1269): 981254mologous to Homo sapiens Human RNA-associated protein- 23 (RNAAP-23),accession number Y70242,Smith-Waterman Score=1268.
  misc_feature (1)...(2407): n = a,t,c or g
agagaggagccgactcggcagggactgggggaccgggccgagagtgcgagcgagcgagggagggagtgagggagcgtgcgagccagaaggggaaaggcggccactcgtgcctgagcgaccgcagaggggagtgggagcagtggggtaaaggagcggggggcgggaataagaaaggccgagagaaggcggacagaggctagtggtggtggtggtggtagggggagaaggaggagctggaggagggcaggggctgagggagtgagtgaagcggacgcgcgagggaggggagggaagggaagggaagggaagggggggtcacgcgggggcgcgcgcgcgcaccgggagcgcgctcggaggcgagtggaactggatcgggtttgctgccagcggcgtgagcttcggccgccattttacaacagctccactcgcgccggacacagggagcagcgagcacgcgtttcccgcaacccgataccatcggacaggatttctccgcctcagcccaacggggagatctctggaaacatggctacagaacatgttaatggaaatggtactgaagagcccatggatactacttctgcagttatccattcagaaaattttcagacattgcttgatgctggtttaccacagaaagttgctgaaaaactagatgaaatttacgttgcagggctagttgcacatagtgatttagatgaaagagctattgaagctttaaaagaattcaatgaagacggtgcattggcagttcttcaacagtttaaagacagtgatctctctcatgttcagaacaaaagtgcctttttatgtggagtcatgaagacttacaggcagagagaaaaacaagggaccaaagtagcagattctagtaaaggaccagatgaggcaaaaattaaggcactcttggaaagaacaggctacacacttgatgtgaccactggacagaggaagtatggaggaccacctccagattccgtttattcaggtcagcagccttctgttggcactgagatatttgtgggaaagatcccaagagatctatttgaggatgaacttgttccattatttgagaaagctggacctatatgggatcttcgtctaatgatggatccactcactggtctcaatagaggttatgcgtttgtcactttttgtacaaaagaagcagctcaggaggctgttaaactgtataataatcatgaaattcgttctggaaaacatattggtgtctgcatctcagttgccaacaatagtgctttttgtgggctctattcctaagagtaaaaccaaggaacagattcttgaagaatttagcaaagtaacagagggtcttacagacgtcattttataccaccaaccggatgacaagaaaaaaaacagaggcttttgctttcttgaatatgaagatcacaaaacagctgcccagggcaaggcgtaggtttaattgagtgggtaaagttcaaggtctnggggggaatgttggaactgttgaatgggctgatcctatagaagatcctgatcctgaggttatggcaaaggtaaaaagtgctgtttgtacgcaaccttgccaatactgtaacagaagagattttagaaaaggcatttagtcagttttgggaaactggaacgagtgaagaagttaaaagattatgcgttcattcattttgatgagcgagatggtgctgtcaaggctatggaagaaatgaatggcaaagacttggagggagaaaatattgaaattgtttttgccaagccaccagatcagaaaaggaaagaaagaaaagctcagaggcaagcagcaaaaaatcaaatgtatgacgattactactattatggtccacctcatatgccccctccaacaagaggtcgagggcgtggaggtagaggtggttatggatatcctccagattattatggatatgaagattattatgattattatggttatgattaccataactatcgtggtggatatgaagatccatactatggttatgaagattttcaagttggagctagaggaaggggtggtagaggagcaaggggtgctgctccatccagaggtcgtggggctgctcctccccgcggtagagccggttattcacagagaggaggtcctggatcagcaagaggcgttcgaggtgcgagaggaggtgcccaacaacaaagaggccgcggggtacgtggtgcgaggggtggccgcggtggaaatgtaggaggaaagcgcaaagctgatgggtacaaccagccagattccaagcggcgccagaccaataatcagaactggggctcccaacccattgctcagcaaccgctccaaggtggtgatcattctggtaactatggttacaaatctgaaaaccaggagttttatcaggatacttttgggcaacagtggaagtag

SEQ ID NO: 4602 - DNA, 369 bp, Homo sapiens
  SIMILAR (92)..(307): 301254mologous to Capsicum annuum proline-rich protein,accession number AJ006984,Smith-Waterman Score=86.
aaaaggttttaaatttgattcttcagttttctccacttggagtttagttcatactgtacttctgccattagctccttattattctgcgggacagcaggctgagtctaaaaatctgaaagaatctgttgtcccacccacagcgccaactgaaaataaaaaacaggtgagggaggataaaaattggcctataccgcctcctccaatcgcagaaacatctgtactgcctccttcagtagcagaaatagagaccccaaaacaaacaactttatgctctgctgccatagctggagaacccttaggaccttgcacttttcctatttccgtaaggcccgattcaaataatccacagcagtttattcatgaacacac

SEQ ID NO: 4603 - DNA, 1002 bp, Homo sapiens
  SIMILAR (319)..(897): 331254mologous to Ovis aries Gag,accession number AF136224,Smith-Waterman Score=199.
atgaacgcaggatgtgggcaaactcacgactgcgcctaccgccagaagagaccggaggacgtgaacgaagaaggtcggctggagcagaggaaccgaaaacgacaagatgaatggggaccccgagacaagcctgccagcagcggatataaggcaggcactcttgatgtggaaaactggaacagagcgggagaaggattgaaacatgctcatcaaaaaggtcttaaagttgattcttctgctttctgtacttgcagtctaattcgtactgtacttatgccgttatctccttattattctgcgggacagcaggctgagtctaaaaatctgaaagaatctgttgtcccacccacagcttcaattgaaaataaaaaacaggagagggaggataaaaattggcctatactgcctcctccagttgcagaaacatctgtgccgcctccttcggtagcaggaatagagaccccaatacaaagaattttacgctctgctgccatagctggagagccctcaggaccttgtgcttttcctatttccgtaaggcccgattcaaataatccacagcagtttattcatgaacacaccccactagagtttaagttgttgaatgaattaaaaaccagtgtagttaatatcggggtacagagcccattcactttaggattgccagaatctgcatttggtgctatgcgtcttctaccctttgatgtaaaacactgggctcgaacttgcttgtctgctagtgcatatctgacatggaatttaaatgggcaagaaatgtgtacagaccaggttagacagaatcgtgctgctggacacggagacatcgcagaggatatgctattgggtaatggcccttattcagacctggaacatcaaatggaactaaacgcgcctgggccacaattcctgaagagggagtcccagtacaatcctttttacctttcatggaagggtcacaggagccctctgcacaatttcttgcaagattacgagaggcagtga

SEQ ID NO: 4604 - DNA, 575 bp, Homo sapiens
  SIMILAR (261)..(347): 551254mologous to Drosophila melanogaster CG13384 gene product,accession number AE003621,Smith-Waterman Score=69.
atggactcgcgactctacatgctctccttcctgcccttcctggtgctgctggtcctcatccggaacctcaggatcttgaccatcttctccatgctggccaacatcagcatgctggtcagcttggtcatcatcatacagtacattacccagattattactatgactgcagtcacaggaatttccaacacccatgaccactgtccattcaaaggtgttcgtgggctcgttgggtcagtgctaatctgtggaaatccagaccccagccggttgccactggtagcaagctggaagacctaccctctctcttcggaacagccattttttcttttgaaagcattggtgtgctgtaccagtctgtcaagcttctctacattgccggcatcctgtgcaccttgccctgcagttctacgtccctgcagaaatcatcatcccctttgccatccccgggtgtcaacacgctgggcactgcctctggatctgtccattcgcctgtcatggtctgcctgacatcagcccccatgacccgagtacccctttctgcaagtattccaccagaggccgaaggagatggctag

SEQ ID NO: 4605 - DNA, 778 bp, Homo sapiens
  SIMILAR (7)..(339): 411254mologous to Drosophila melanogaster CG13384 gene product,accession number AE003621,Smith-Waterman Score=213.
gtggtcctcatgcggaacctcatgagcgggaccatcttctccatgctggccaacatcagcatgctgggcagcttggtcatcatcatacagtacattacccaggaaatcccagaccccagccgggtgccactggtagcgagctggaagacctaccctctcttcttcggaacagccattttttcttttgaaagcattggtgtggatctgcctctggaaaacgagatgaagaatgcccgccactttccacccatcctgactttggggatgcccatagtcactaccctagacattggcatggcggctctgggctacctgcggtttggagaccgacaccaagggcagcataatcctcagcctgcctatctgctggtatcttcatgggctgtcaggtgaaggtccctctcagtcattttcagaaagggaaacaaaagcccaagtcattgtcccaaggtcagaggttaatgttccaaggaggccagtgtcagaacacagtggccgtggagagcagctctgtggtttgtcttgcaggctgtaccagtctgtcaagcttctctacattgccggcatcctgtgcacctatgccctgcagttctacgtccctgcagaaatcatcatcccctttgccatctcccgggtgtcaacacgctgggcactgcctctggatctgtccattcgcctcgtcatggtctgcctgacatcagcccccatgacccggagtacccctttctgcaagtattccaccagaggccgaaggagatggctagagattcctgtgtag

SEQ ID NO: 4606 - DNA, 1890 bp, Homo sapiens
  SIMILAR (1211)..(1291): 921254mologous to Homo sapiens putative p150,accession number U93565,Smith-Waterman Score=139.
atgggcaaggacttcatgtctaaaacaccaaaagcaatggcaacaaaaaccaaaattgacaaatgggatctaattaaacgaaagagcttctgcacagcaaaagaaactaccatcatagtgaacaggcaacctacagaatgggagaaaatttttgcaacctactcatctcacaaagagctaatatccagaatctacactgaactcaaacaaatttacaagaaaaaaacaaacaaccccatcaacaagtgggcgaaggatatgaacagacacttctcaaaagaagacatttatgcatccaaaaaacacatgaaaaaatgctcatcatcactggccatcagagaaatgcaaatcaaaaccacaatgagataccatctcacaccagttagaatggagatcattaaaaagtcaggaaacaacagacagcctattgtgggaccttgtgataattcagtcatcctcctctataaaatactggcaaaccgaatccagcagcacatcaaaaagcttatccaccatgatcaagtgggcttcatccctgggatgcaaggctggttcaacacatgcaaatcaataaatgtaatccagcatataaacagaaccaaagacaaaaaccacatgattatctcaatagatgcagaaaaggcctttgacaaaattcaacaacccttcatgctaaaaactctcaataaattaggtattgatgggatgtatctcaaaataataatagctatctatgacagacccacagccaatatcatactgaatgggcaaaaactggaagcattccctttgaaaactggcacaagacagggatgccctctctcaccactcctattcaacatagtgttggaagtgctggccagggcaatcaggcaggagaaggaaataaagggcagtcaattaggaaaagaggaagtcaatttgtccctgtttgcagataacatgattgtatatctagaaaaccccatcatctcagcccaaaatctccctaagctgataaacaacttcagcaaagtctcagtatgcaaaatcaatgtgcaaaaaccacaagcattcttatacaccaataacagacaaacagagagccaaatcatgagtgaactcccattcacaattgcttcaaagagaataaaatacctagtaatccaacttacaagggatgtgaaggacctcttcaaggagaactacaaaccactgctcaatgaaataaaaggatacaaacaaatggaagaacattccatgctcatgggtaggaagaatcaatatcgtgaaaatggccatactgtccaagtaacgaccgggggtaccgagctgattgggatttgtttagcggcttctcaaccccctgttcacgttgtggggagtcttacactgtgtgttggtttaattgacccggtattcgaatatgttgggcccaagttttattcccccagtgggtcttcaaatatggtcaacaatgacatgattgtatatttagaaaaccccattgtctcagcccaaaaactccttaagccgataagcaacttcagcaaagtcttagtacacaaaatcaatatgcaaagatcacaagcagcatttgtatacaccaagagtagacaaacagagagccaaatcacaaggaaactcccattcacaattgctacagagagaataaaatacctagaaatacaattcacaaggaatgtgaaggacctcttcgaggagaactacaaactactgctcaaggaaataaaagaggacacaaacaaatggaaaaacattccatgctcatggacaagaagaatcaatatcgtgaaaatggccatactgcccaaagtgatttatagattcagtgctacacccatcaagctcctattgacttttttcacagaattagaaaaactgctttaa

SEQ ID NO: 4607 - DNA, 752 bp, Homo sapiens
  SIMILAR (2)..(55): 611254mologous to Homo sapiens putative p150,accession number U93563,Smith-Waterman Score=67.
atggaatcgaagaagaccctgtatagccaagacaatcctaagcaaaagaacaaagctggaggcatcacactacctgacttcaaagtatactgcaagtctacagtaaccaaaacagcatggtactggtaccaaaacagacatatagaccgatggagcagaacagagacttcagaaataacaccacacatttacaaccatcagatcgttgacaaacctcataaaaacaagcaatggggaaaggatctcttattcagtaaatggtgctgggaaaactgggtagccatatgcagaaaactgaaactgaacctcttccttacacgttatacaaaaattaactcaagatggattaaagacttacatgaaaaactcaaaaccataaaaaccctagaagaaaacctaggcaataccatccaggacataggcataggcaaagacttcatgacgaaaatgccaaaagcaattgcaacaaaagcaaaaattgacaaatgggatctaattaaactaaagagcttctgcacagcaaaagaaactatcatcagagtgaacaagcaacctacagaatgggagaatatttctgcaatctacccatctgacagaagtctaatatccagaatttacaaggaatttaaaaaatatttacaagaggctggatgcagtggctcacacctgtaatcccatcactttaaaaggccaaggcaggtggatcacttgaggtcaggagttccagaccagcctggtcaacatgatgaaac

SEQ ID NO: 4608 - DNA, 579 bp, Homo sapiens
  SIMILAR (64)..(381): 481254mologous to Homo sapiens semaphorin SEMA6A1,accession number AF279656,Smith-Waterman Score=242.
atgagagtaatatcttccttaccattcagtgccacaaaggaatctgaaagacaaaagggaggagaaggttacttaatgttttacgctctgcttggggcgacttacataagtgggaatgagctaacacagaactatgccagcgtatggtccccgatactaaatgatggtcaagaggaacagaatacctcacgcagcaacgttgatgtcctgtacctgggtagtataaaggttccctcagaaccttcaagggcaggcagggaccatatttatactgttgatatagacacatcacacacggaagaaatttattgtagcaaaaaactgacatggaaatctagacaggccgatgtagacacatgcagaatgaagggaaaacataagctgctaggcctgcatcatgaactacttaggcgcacacaggattatggacacaaagccggctgcccagagtcttgtcttctgagtgtacgccgatgcccacctccgcagtccaaggcccacagggagtctgtggaagagctcataaaaggctgccgcagacatgcagggttttgtgcctgtggtcatataacaacataa

SEQ ID NO: 4609 - DNA, 774 bp, Homo sapiens
  SIMILAR (55)..(150): 931254mologous to Homo sapiens Human ZSMF-3 protein sequence,accession number Y22113,Smith-Waterman Score=166.
atggtgacatcatgcaatggattatggaagcacaacacaaaagttcctgccatgcatgagatggatacattggaaccattcggggatgaattcagcggaatggccagatgcccatatgatgccaaacatgccaacgttgcactgtttgcaggctgcttcaggctcctgcggggctttgagatggtggagaggagacgtaaggaattggaaactgtcatatttcacttccatagccgtaacccacgttgttaccttctggttggacagattcccaatggagacctttcggttggtctctgtgtgggtcattctctctttggagactttaactgcagtggaaatcacctttcctccttcagcccttgctcattcagtgccccactggccctgttgggtcccatctcccttccaggtgtgagtctgaccccgcctgctgaaggggacacaggtcaagctctccaagtggttcttttaaagcctatctcagctggattgaaaagagggaagtcacccttccttctcaaccccaatgcagggagagagcatttgtccacaagactcagagcacactctcaactctcttggaaggaaggcagcttccttaaccccaaccatgttacagcctctaggcagattatggccaggggacaaaacttcataatggctgccataggtggtctagaacttcactttggattggggctttcttggcttctaatgttcactgatacttctcagcctctggagcctcagccaaaactgaaacacagttga

SEQ ID NO: 4610 - DNA, 889 bp, Homo sapiens
  SIMILAR (1)..(294): 881254mologous to Homo sapiens Human secreted protein from clone CJ145_1,accession number W64221,Smith-Waterman Score=453.
ttcccagaagattctgagccaatcagtatttcgcatggcaactatacaaaacagtatccggtgtttgtgggccacaagccaggacggaacaccacacagaggcacaggctggacatccagatgattatgatcatgaacggaaccctctacattgctgctagggaccatatttatactgttgatatagacacatcacacacggaagaaatttattgtagcaaaaaaactgcatgggaaatcttagacaggccgatggtagccacatgcagaatgaagggaaaacataaggatgagttgccacaactttattaaagttcttctaaagaaaaacgatgatgcattgtttgtctgtggaactaatgccttcaacccttcctgcagaaactataagatggatacattggaaccattcggggatgaattcagcggaatggccagatgcccatatgatgccaaacatgccaacgttgcactgtttgcagatggaaaactatactcagccacagtgactgacttccttgccattgacgcagtcatttaccggagtcttggagaaagccctaccctgcggaccgtcaagcacgattcaaaatggttgaaagaaccatactttgttcaagccgtggattacggagattatatctacttcttcttcagggaaatagcagtggagtataacaccatgggaaagctgctaggcctgcatcatgaactacttaggcgcacacaggattatggacacaaagccggctgcccagagtcttgtcttctgagtgtacgccgatgcccacctccgcagtccaaggcccacagggagtctgtggaagagctcataaaaggctgccgcagacatgcagggttttgtgcctgtggtcatataacaacataa

SEQ ID NO: 4611 - DNA, 3039 bp, Homo sapiens
  SIMILAR (1798)..(3036): 961254mologous to Homo sapiens semaphorin SEMA6A1,accession number AF279656,Smith-Waterman Score=2068.
atggtcctccttaaggtggacccaggcttatgggggtcctccttaagggtcctccttaaggcggaccctccttatgggacccaagctcatgccgaacgacacggcagggccttggcgggggggttgggggtaggagaacaaagccagagtttggaccttctgaggatgtcccacacatacggtgctttgttcttgcccagagcagctgttagttcatggtgtgcctctgtgagaattagaaaaataaagaaatctccccttctagatggtgctccactgctctatgagcctgacacctggcttggtaagtggagctccagctggactctcgtctttactcaccccttcagcgccgcactgacgcacagcgctttgactgcccggtctgacacagggtccctgactctgtctccagatggaaaactatactcagccacagtgactgacttccttgccattgacgcagtcatttaccggagtcttggagaaagccctaccctgcggaccgtcaagcacgattcaaaatggttgaaagaaccatactttgttcaagccgtggattacggagattatatctacttcttcttcagggaaatagcagtggagtataacaccatgggaaaggtagttttcccaagagtggctcaggtttgtaagaatgatatgggaggatctcaaagagtcctggagaaacagtggacgtcgttcctgaaggcgcgcttgaactgctcagttcctggagactctcatttttatttcaacattctccaggcagttacagatgtgattcgtatcaacgggcgtgatgttgtcctggcaacgttttctacaccttataacagcatccctgggtctgcagtctgtgcctatgacatgcttgacattgccagtgtttttactgggagattcaaggaacagaagtctcctgattccacctggacaccagttcctgatgaacgagttcctaagcccaggccaggttgctgtgctggctcatcctccttagaaagatatgcaacctccaatgagttccctgatgataccctgaacttcatcaagacgcacccgctcatggatgaggcagtgccctccatcttcaacaggccatggttcctgagaacaatggtcagataccgccttaccaaaattgcagtggacacagctgctgggccatatcagaatcacactgtggtttttctgggatcagagaagggaatcatcttgaagtttttggccagaataggaaatagtggttttctaaatgacagccttttcctggaggagatgagtgtttacaactctgaaaaatgcagctatgatggagtcgaagacaaaaggatcatgggcatgcagctggacagagcaagcagctctctgtatgttgcgttctctacctgtgtgataaaggttccccttggccggtgtgaacgacatgggaagtgtaaaaaaacctgtattgcctccagagacccatattgtggatggataaaggaaggtggtgcctgcagccatttatcacccaacagcaggacacagagaggctttgttgtctttgtggtcaccgggtccactttacacagatgcctattaatcacttcactatggagacagacacatccatcatatcacagcagctcagaaacgggccgtccagtgaaagggggtgagaggggaaagtgcacacttaaccatttcgagttaggttactggttgcctgtgtcttacacgcttagggtggtaattggggtggggttgcttaaaaggcaaacacttttccccagacggaggctccggtggccacaagggggtcgtcggaaaagatcccaactggaagcccagagagtgattcgggaaagttacctcaaaggccacgaccagctggttcccgtcaccctcttggccattgcagtcatcctggctttcgtcatgggggccgtcttctcgggcatcaccgtctactgcgtctgtgatcatcggcgcaaagacgtggctgtggtgcagcgcaaggagaaggagctcacccactcgcgccggggctccatgagcagcgtcaccaagctcagcggcctctttggggacactcaatccaaagacccaaagccggaggccatcctcacgccactcatgcacaacggcaagctcgccactcccggcaacacggccaagatgctcattaaagcagaccagcaccacctggacctgacggccctccccaccccagagtcaaccccaacgctgcagcagaagcggaagcccagccgcggcagccgcgagtgggagaggaaccagaacctcatcaatgcctgcacaaaggacatgccccccatgggctcccctgtgattcccacggacctgcccctgcgggcctcccccagccacatccccagcgtggtggtcctgcccatcacgcagcagggctaccagcatgagtacgtggaccagcccaaaatgagcgaggtggcccagatggcgctggaggaccaggccgccacactggagtataagaccatcaaggaacatctcagcagcaagagtcccaaccatggggtgaaccttgtggagaacctggacagcctgccccccaaagttccacagcgggaggcctccctgggtcccccgggagcctccctgtctcagaccggtctaagcaagcggctggaaatgcaccactcctcttcctacggggttgactataagaggagctaccccacgaactcgctcacgagaagccaccaggccaccactctcaaaagaaacaacactaactcctccaattcctctcacctctccagaaaccagagctttggcaggggagacaacccgccgcccgccccgcagagggtggactccatccaggtgcacagctcccagccatctggccaggccgtgactgtctcgaggcagcccagcctcaacgcctacaactcactgacaaggtcggggctgaagcgtacgccctcgctaaagccggacgtaccccccaaaccatcctttgctcccctttccacatccatgaagcccaatgatgcgtgtacataa

SEQ ID NO: 4612 - DNA, 483 bp, Homo sapiens
  SIMILAR (211)..(480): 911254mologous to Homo sapiens ribosomal protein L7,accession number L16558,Smith-Waterman Score=441.
atggagggtgtagaagagaaagagaaggttcctgctgtgccagaaacccttaagaaaaagcaagggaatttcgcagagctgaagatcaaaacccaaaatggcatttgtcctcaggatcagaggtgtcagtggtgtgagcccaaaggtccgaaaggtgttgcagcttcttcgccttcatcaaatcttcagtggaacctttgtgaagctcaacaggcttcagttaacatgctgaggattgtagagccatatatagcatgggggtacccaaatctgaagtcagtaaatgaactaatctacaagcgtggttatggcaaaatcaataagaagcgaattgctttaacagataacactttgattgttccatctcttggtaaatatggcatcctctgcatggaggatctgattcatgagatctatactgttggaaaacacttcaaagaagcaaataacttgctgtggcccttcaaattatcttcgccatga

SEQ ID NO: 4613 - DNA, 442 bp, Homo sapiens
  SIMILAR (6)..(275): 981254mologous to Homo sapiens ribosomal protein L7,accession number X57959,Smith-Waterman Score=470.
  misc_feature (1)...(442): n = a,t,c or g
tggaattcggcaaaatcaataagaagcgaattgctttgacagataacgctttgattgctcgatctcttggtaaatacggcatcatctgcatggaggatttgattcatgagatctatactgttggaaaacgcttcaaagaggcaaataacttcctgtggcccttcaaattgtcttctccacgaggtggaatgaagaaaaagaccacccattttgtagaaggtggagatgctggcaacagggaggaccagatcaacaggcttattagaagaatgaactaaggtgtctaccatgattatttttctaagctggttggttaataaacagtacctgctctcanattgnnnnnnnnnnnnnnnnnnnnnnnnnnnnnnnnnnnnnnnnnnnnnnnngccgcccctttaattaaaagggccctttaaaaccccgttaaaaaccctggggg

SEQ ID NO: 4614 - DNA, 933 bp, Homo sapiens
  SIMILAR (930)..(205): 451254mologous to Mus musculus ribosomal protein L7,accession number M29015,Smith-Waterman Score=360.
cctataaggaaaaaacttttaccttgcaagcccgggtaaactttggcccccccaaggattctttaaaacggccgccccttttttttttttttcaaatttgagagcaggtactgtttattaaccaaacccagcttaagaaaaataaccagggtaagacaccttaagttcaatccttcctaataagcctgttggatctggtcctcccctgttgccagcatctcccaccttcctacaaaaatgggtggtctttttttattccgttcccccgtggttgaagaaagccaatttgaaagggccaccaggaagttatttgcctcttttgaagcggttttccaacaggtatagatctcatgaatcaaatcctccatgcagatgatgccgtatttacccaagagatcggagcaatcaaagcggttatctgtcaaagcaattccgcttcttattgattttgccataaccacggcttgtaagattagttcatttactggacttcagattgggggtacccccatggcaatatatggctcctaacaatccctcagcatggttaatcgaagccttggttgagcttcacccaaggttccattgaagatttgacgaaggcgaagaaagctgcaacaccttttcgaacctttggggctcactccattggatacctctgattctgatgacaaacgccgaatttggggttctgcaggtacatagaagttggccagcttttctagccgtcctcgccaagggaaaggcagtttagaacagctgcatagaagccttgtgatagtgctttgctttttcatagattagcttgctgccttgcctttcgaaagcatctgttgggcaaacttctttctcaaggcgcttgatctacagctctgcgaaattccttcgctttttcttaagggtttctggcacagcaggaacctccttcttctc

SEQ ID NO: 4615 - DNA, 404 bp, Homo sapiens
  SIMILAR (253)..(128): 401254mologous to Boophilus microplus NADH dehydrogenase subunit 2,accession number AF110622,Smith-Waterman Score=66.
cccatactcttttccacagccaaacatagggtttggcattccctccaatattgcaaaaggaatcgcccacatccttgcctgtggatttcattcacaagtcctgtggctctctctacatcccagccaccatgtgttatttcctgtttatgtatatgacatcaaaggtgcaggaagtaatgaactaaattggaaggataaacatgtagaaaaatagaggtaaatactgactacataaaaccataagaataagaattttggatgatctattatatatctatttatctaacatctatttgttcctccatctgtaatgaaaatattttacagttagagaacagagaaaaaagtaggaatacatgaatttaaattttaattcttctcagattgtctcacagcatcattcc

SEQ ID NO: 4616 - DNA, 990 bp, Homo sapiens
  SIMILAR (935)..(180): 281254mologous to Streptomyces coelicolor A3(2) putative translation initiation factor IF-2(fragment),accession number AL355913,Smith-Waterman Score=174.
tcatatggcaataccattttgatgttttgaggaactaacatactcttttccacagcaaacatagggtttggcattccctccaatattgcaaaaggaatcgccacatccttgcctgtggattttattcacaagtcctgtggctctctctacatcccggccaccatgtgttatttcctcagccgctctttgcccccgccgccatgggtttttgccgccgcggcttcttgcccccctcgccgcggctttctgcccccgcccccgttgctttttgcccctgccgccacggctttttgcacctgcccccgttgatttttgcccccgccgttgcggctttctgcccctgccgccgagggtttttgcggtttcatgcccccgccgtcgtggccttttgcctccgctgctttttgccccctctgccgcggctttttgcggctttttagccccttcgccgtggctttttgcggcttttggcacccgatgccgcggctttttggggcttttggtccccgccgcagcggcttttttcccccgccgcctcaggtttttcctgccgcggcttttttcccccgccgccgccgtgactttttgccacccctgctttttgcccccgccgccgcggctttctgtcccggccgccgcatctttttgccgccgcggcttccagcaggagatacggacagtggagataagggggtcggggaccagggttgggctccagcaccagactggacatctccctcggggccccagttcactcccggccgagttgcatgcttgagcccgcgtctctcccttggaggcttctcctccctcctgcactcgctgatgcagcagccggaggacctgggaccagccctcaccttgggcaggatttgtggggtgggtgcgtgttgggaactttgatggaggctcgaggggcccgtgggtggggtgggctgtgcgcggacgtccccttacaccccgaatttccatctggtgcagccttctcat

SEQ ID NO: 4617 - DNA, 1182 bp, Homo sapiens
  SIMILAR (940)..(1020): 481254mologous to Homo sapiens ral guanine nucleotide dissociation stimulator,accession number AF295780,Smith-Waterman Score=79.
atgaagctgtggaccttcgcggtgagtgttacagctcttaagagtgctgactggtgcatttacaatcctttagctagacacagagcactgattggtgcatttttacagagtgctgattggtgcatttacaatcctttagctagacacagagcgctgattgaacaactaagactttggtacagcccattagctctccctgtggataccgtggactacacaatgccgtgggtgtctgtgagtcaagccattctgactgctgctttgacactgctttccactgtggtgaccacacccacctcatctttggtgattaaggacagcccatgttccctgccaccccaggattcaattatcctcattttacttaaagatcccagtccagtggctgcagttcctgctgtaacattttgcctactgagagcacaagctcaaagctcttccaggatactgggctcctctcacaatattctttctcatgatcgttgtgaggacaagatccaggcagatcacactggactcccagcactgaatctggctcgaggggacatcaaatttgactgggtcatggggctcaggagcatcactctcaaaaatagcagtacaggaagaggcgatggccctaaacagcatttgcaggcagatcccatgttaatcatttatggggagacagagagaaagaggagacactccaggaagacctgcaggtgggagtaccaggttgaaaccaaggacacattcctggaggagctgctgtttgagccagctctgagaacaggtggggacaggactggagaggaggagggggtcccctatgagcaaagactggccaccaccccatctaacacccccacagggcccctgtggcatccctgtccagtccctgtcaccacccagtttttccctctggacccaggaattcaaagtaagcaaggaggtccactgctccagttgactgcaaataattacaaccttgagcccaagcagcactttgggtcctggtttgggaccatgaagcggctcggcagccagaaggggttgtccagccagcacctgggctttggccctcctcaagaaggtggaggaagtttcaggcacctggctcctcaggtgtctgccatccaggtgctcttcaggcctgcccagaagagctctcttgatccagctagaactggccagaactga

SEQ ID NO: 4618 - DNA, 565 bp, Homo sapiens
  SIMILAR (4)..(138): 751254mologous to Homo sapiens PAR3,accession number AF252293,Smith-Waterman Score=156.
atgaagctggttgcagtgtttgataagcaagatctacatcatggaggtgatgacatcagtgccagctccatgcatacccagagcccggagagatttactagtgctagtgagcttggcaccaacaatgtctcagccttctcagtctgatcaagcagcaagtgaaattgaggtcacatcttcagtacttcatgcaagcagccagaaggggttgtccagccagcacctgggctttggtgctcctcaagcaggtggaggaagtttcaggcacctggctcctcagcgaaaagaggttttggaggaatattttaagtatgatcctgaacacaaattgatcttcagatttgttcgtactctgtttaaagccatgaggctaacagctgagtttgcaatcgaaataacacatggtggccgggatgtagagagagccacaggacttgtgaataaaatccacaggcaaggatgtggcgattccttttgcaatattggagggaatgccaaaccctatgtttgctgtggaaaagagtatgttagttcctcaaaacatcaaaatggtattgccatatga

SEQ ID NO: 4619 - DNA, 684 bp, Homo sapiens
  SIMILAR (1)..(681): 731254mologous to Homo sapiens KIAA0664 protein,accession number AB014564,Smith-Waterman Score=768.
atgggcaagtacgcagaggccctgagaagccagcagaaggcagtgctgatgagcgtgcgggtgatgggcatcgagcaccccaacaccatccaggaaaacatgcacctggccctgcactgcttcaccagcaggcagctgtccctggccctcagcctgctgcagggcgcccactacctcatgcgctggtgcttggggaagacaccccgaggtggcgtgctggacaacatcaggcgggtgctgcacagggtgatggagtacgacctgtcgctgtgcttcctggacaacgcgctggccgtcagcaccaagtaccaagggcccaaagctctcaaggtggcccttggccaccacctcatcacctcggtctatgagagcaaagctgagtttccggtcggccctgcagcaccagaaggaagggctggctgcacaccctctctgggcgaggaccaggagaagaccaaggagagctctgagtacctcaagtgcctgacccagctggccgtggccctgcggcgcgccatgcatgagatctaccgcaacggctccagcaacaacatcccgcccctcaacttcacagcccccagcatggccagcgtcttggagcagttcaaaggcatcaatggcatcctcttcattcctctcagccaaaaagacttggagagtctgaaagccgaggtggcgcagtga

SEQ ID NO: 4620 - DNA, 443 bp, Homo sapiens
  SIMILAR (382)..(441): 901254mologous to Human endogenous retrovirus K env protein,accession number Y18890,Smith-Waterman Score=91.
tgtgtggcagtctggcggagattctattacttcaaaaaccaacataattacctgtgttaattgctacttgtatacttgtattgactcatcctttaatcaatatcatagtattttaatagtcagagccagacaagatatttggctccctgtagccttacataggccttgggaatcttccccctttatccatgttattaacaatattctacagaaaattcttaaaaggagtacacaatttatttttacattaattgcaataataatgggcttgattgctgttactgtgattgctgctactgctggagttgcattacgtcaatctattcaaactgttcattttgtggataaatggcaaaaaaattctactcggatgtggaattctcacgtattgatcaaaaattggctaatcaaattaatgatctaagacaaactgttatatggat

SEQ ID NO: 4621 - DNA, 377 bp, Homo sapiens
  SIMILAR (200)..(376): 831254mologous to Homo sapiens reverse transcriptase homolog= pol {retroviral element},accession number S61069,Smith-Waterman Score=239.
ctttgctttcacttggactgaccctgacacccatcaggctcagcaaattacctgggctctactgccgcaaggcttcgcggacagcccccattacttcagtcaagctcaaatttcttcctcatctattacctatctcggcataattcttcatgaaaacacccgtgctctccctgctgaccatgtctgactaatctcccaaaccccaatctcttctacaaaacaacaactcctttccttcctaggcatggttaggtacttctgcctttggatacctagttttaccatcctgactaaaccattatattaattcacaaaagcaaacctagctgaccccacagatcctaaatcctttccccactcctctttccgttccttga

SEQ ID NO: 4622 - DNA, 1446 bp, Homo sapiens
  SIMILAR (1161)..(1445): 321254mologous to multiple sclerosis associated retrovirus polyprotein,accession number AF009668,Smith-Waterman Score=121.
atggccaaagccgtcctgagcaaaaagaacaaaactggaagcaccacactacccgacttcaaaatatattacaaggatatagtaactgaagaacctggtattgaaaccctgaggcacacaagtagcacaaagttttccaaaggcctacctagtcgtgaatctttctcagagaagcaaaacaaaacaacaacccacctgcacccaggtgaaataaacagctttattgctcacacaaagcctgcttggaggtctcttcacacggacgcgcatgaaatttggtgccgtgactcggatcaggtgaactcccctgggagatcaatcccctgtcctcctgctctttgctccatgagaaagatccacctacgacctctggtcctcagaccagccagcccaaggaacatctcaccaattttaaatccgctacacctcattgctgcccttcttcccaatccaaagcctccttttcgtcctcctcttgtatcccccgaccttaacccacaagtaaaagatatctctactccctcctgggcaaccgatcatgtacacctcaccgtctcattaaaaccttatcacccttaccctgctcaatgccaatatcccatcccacagcacgctttgaaaggattaaagcctgttatcactcgcctgctacagcatggccttttaaagcctataaactctccttacaattcccacattttacctgtcctaaaaccagacaagccttacaggttagtagttcaggatctgcgccttatcaaccacattgttttgttgcctatccaccccatggtgccaaacccatatactctcctatcctcaatacctgcctctacaacccattattctgttctagatctcaaacatgctttctttactattcctttgcacccgtcatcccagcctctcttcgctttcacttggactgaccctgacacccatcaagctcagcaaattacctaggctgtacagccgcaaagcttcacagacagcccccattacttgaatcaagcccaaatttcttcttcatctgttacctatctcggcataattctcataaaagcacacgtgctctccctgccaatcgtgtccgactgatctctcaaaccccagaaccttctacaaaacaacaactcctttccttcctaggcatggttagtgcggtcagaattcttacacaagagccaggactgcaccctgtaggctttctgtccaaacaacttgaccttactgttttagcctagccctcatgtctgcgtgcagcggctgccactgctttaatacttttagaggccctaaaaatcacaaactatgctcaactcactctctacagttctcataacttccaaaatctattttcttcctcatacctaacgcatatactttctgctccccagctccttcagctgtactcactctttgttgagtctgccacaatcaccattg

SEQ ID NO: 4623 - DNA, 2616 bp, Homo sapiens
  SIMILAR (670)..(2502): 961254mologous to Homo sapiens putative p150,accession number U93567,Smith-Waterman Score=3104.
acaacataccagaatctctgggatgcattcaaagcagtctgtagagggaaatttatagcactaaatgtccacaagagaaagcaggaaagatccaaaattgacaccctaacatcacaattaaaagaactagaaaagcaagagcaaacacattcaaaagctagcagaaggcaagaaataactaaaatcagagcagaactgaaggaaatagagacacaaaaaacccttcaaaaaattaatgaatccaggagctggttttttgaaaggatcaacaaaattgatagaccgctagcaagactaataaagaaaaaaagagagaagaatcaaatagacgcaataaaaaatgataaaggggatatcaccaccaatcccacagaaatacaaactaccatcagggaatactacaaacacctctacgcaaataaactagaaaatctagaagaaatgcataaattcctggacacatacactctcccaagactaaaccaggaagaagttgaatctctgaatagaccaataacaggagctgaaattgtggcaataatcaatagcttaccaaccaaaaaaagtccaggaccagatggattcacaggcgaattctaccagaggtacaaggaggaactggtaccattccttctaaactattccaatcaatagaaaaagagggaatccatgaacattgatgcaaaaatcctcaataaaatactggcaaaccgaatccagcagcacatcaaaaagcttatccaccatgatcaagtgggcttcatccctgggaggcaaggctggttcaatatatgcaaatcaataaatgtaatccagcatataaacagagccaaagacaaaaaccacatgattatctcaatagatgcggaaaaggcctttgacaaaattcaacaactcttcatgctaaaaactctcaataaattaggtattgatgggacgtatttcaaaataataagagctatctatgacaaacccacagccaatatcatactgaatgggaaaaaactggaagcattccctttaaaaactggcacaagacagggatgccctctctcaccactcctattcaacatagtgttggaagttctggccagggcaatcaggcaggagaaggaaataaagggtattcaattaggaaaagaggaagtcaaattgtccctgtttgcagatgacatgattgtatatctagaaaaccccattgtctcagcccaaaatctccttaagctgataagcaacttcagcaaagtctcaggatacaaaatcaatgtacaaaaatcacaagcattcttatacaccaacaacagacaaacagagagccaaatcatgagtgaactcccattcacaattgcttcaaagagaataaaatacctaggaatccaacttacaagggatgtgaaggacctcttcaaggagaactacaaaccactgctcaaggaaataaaagaggatgcaaacaaatggaagaacattccatgctcatgggtaggaagaatcaatatcgtgaaaatggccatactgcccaaggtaatttacagattcaatgccatccccatcaagctaccaatgactttcttcacagaattggaaaaaaccactttaaagttcatatggaaccaaaaaagagcccacatcaccaaagcaatcctaagccaaaagaacaaagctagaggcatcacactacctgacttcaaactatactacaaggctacagtaaccaaaacagcatggtactggtaccaaaacagagatatagatcaatggaacagaacacagccctcagaaataacgccgcatatctacaactatctgatctttgacaaacctgacaaaaacaagcaatggggaaagggttccctatttaataaatggtgctgggaaaactggctagccatatgtagaaagctgaaactggatcccttccttacaccttatacaaaaatcaattcaagatggattaaagacttaaacgttagacctaaaaccacaaaaaccctagaagaaaacttaggcattaccattcaggacataggcatgggcatggacttcatgtctaaaacaccaaaagcaatggcaacaaaagacaaaattgacaaatgggatctaattaaactaaagagcttctgcacagcaaaagaaactaccatcagagtgaacaggcaacctacaaaatgggagaaaattttcacaacctactcatctgacaaagggctaatatccagaatctacaatgaactcaaacaaatttacaagaaaaaaacaaacaaccccatcaaaaagtgggcgaaggacatgaacagacacttctcaaaagaggacatttatgcagccaaaaaacacatgaaaaaatgctcaccatcactggccatcagagaaatgcaaatcaaaaccacaatgagataccatctcacacctgttagaatggcaatcattaaaaagtcaggaaacaacaggtgttggagaggatgtggagaaataggaacacttttacactgttggtgtgataaactggatgaagaaaacatggcacatatacacaatggaatactatgcatccataaaaaagaatgagttcatgtcctttgcaggggcatagatgaagctggaaaccatcattct

SEQ ID NO: 4624 - DNA, 447 bp, Homo sapiens
  SIMILAR (355)..(444): 901254mologous to Homo sapiens Peptide sequence derived from a human secreted protein,accession number Y40039,Smith-Waterman Score=134.
atgcagaaccaggagaagtttggagagctcatctctgagtgggcaccctatgggagaccaagacctcagatagctgtgggggaccatcatatctcagtttatgatggggaggtcaactggaggatgtctagtctgcaggcctcagcagctgggaaggattatgctaatcggggaactgagtggggagaggagcctagccagatgctacgtcatgagctgctcagtggagagatgtgcgtgtcaaggaaccgagggcagcctctggccaacagcgagagaagatctgaggccctcagtcccgtaaccccaaagaaactaattcctgccgacggccacaagagtgatccaggaaggacatggatgaagctggaaaccatcattctcagcaaactaacccaggaacagaaaaccaaacaccacatgttctcactcataagtgggagttga

SEQ ID NO: 4625 - DNA, 2553 bp, Homo sapiens
  SIMILAR (2224)..(2547): 621254mologous to Mus musculus Ig H-chain alpha (C-region from M167),accession number K02101,Smith-Waterman Score=356.
atggaatactatgcagccataaaaaaggatgagttcatgtcctttgcagggacatggatgaagctgacaaccatcattctcagcaaactaacagaagaacagaaaaccagacaccgctgttttcactctaacgcctggatgagctgggtccgccaggctccagggaaggggctggagtgggttggctgtattaaaagcaaagctaatggtgggacaacagactacgctgcacctgtgaaaggcagattcaccatctcaagagatgattcaaaaaacacgctgtatctgcaaatgatcagcctgaaaaccgaggacacggccgtgtattactgtaccacaggcacagtgaggggagatgagcccaccagccccagcactgacctccaagccaagcatgtccctgcctttgctgtggtctccagtgccatgaactcagccgctgtcctgggcaccagcccatcttccccgaccttcaccttcaccctcggacggcattactcgcgggactgcagcagcatcaaggctggccgccgctcctcctacctgctggccatcaccacggagcgctccaagtcctgcgatgatggactcaacaccttccgcgatgagggccaggttctgcggcacctgccaaaccgcatacccagcctgccgttgctccggagcttcttcacagacgggagtcaccagtggtctgtgcgggtggctgatgagaccagaatgaggcaaaggcatctgctcagtgtcgtagtgatggtccaagaaatgatccagattgtctccatgctaatcaaatatgggttcactgtgcccaattccaggtgcagctggtgcagtctggggctgaaggaggaagcttggggcctcagtgaaggtgtcccgcaaagctctggatacaccttcaccagctacgatattcactatcctggtgaggagccaccccacatctgtgccctccttagtgtccacaccatggggtctgtgctgatctgggcttctcttgtcatcactctcaatatccaggttccccgtggatcaggccctgctgtggctgctcaaagggggacaggaggggactgcctggtagatgcttctcagaaccaccagggggtgctcaggacatcagggggcgctaagaaccatcaggagatgctcaggacaccagggggtgctcaggacaccatgggttactcaaaaccaccagggggcgctcagaacacaagggggcactcaaaaccaccagagggtgctcagaaccaccatggggcactgatgacaagaaaggatgttcagaaccacctggggtcatgtgaaatagcatgtgtttgctaccccttgcatcatgattgtaagttttttgtggcctccccagccatgaagaactgtgtccagtgtgaggttcagctggtgcagtctgggggaggcttggtacatcctggggggtccctgagactctcctgtgcaggctctggattcaccttcagtagctatgctatgcactgggttcgccaggctccaggaaaaggtctggagtgggtatcagctattggtactggtggtggcacatactatgcagactccgtgaagggccgattcaccatctccagagacaatgccaagaactccttgtatcttcaaatgaacagcctgagagccgaggacatggctgtgtattactgtgcaagagacacacaccctccagtgtgtcatgtggagactcacctgggaatgcaagtggccaacagtagtgaagaggatgagcttgtgtggtcaaaatgggatgtggatgtgaaatttatcctgtgctgtgcaaagtaccacagagagcagctgcaggagtcagccctggacctgaagagcctgcactgcccctctgcatcacctgcactgtttctggccactccatcacaaccagtccttactactgggcctggatctgccggctcccagggaggggctgaaatgggtgcccacttcctggtgcagctggtgcagtctggggctgaggtgaagaagcctggggcctcagtgaaggtctcctgccaggcttctggatacaccttcacctactgctacttgcactggagagagcctgtctctttcatctgtggcaggtgcatcctgctgacacttttacttggtgattgtttgtggggtgaaggggcttggacacagggggatgttctccaaccttcggaccgagcctccttcttagctatgggtggtgcccagtgtgaggtgcagctggtggagtctgggggaggcttggtacagcctggggggtccctgagactgtcctgtccagcctctggattcaccttcagtaaccactacatgagctgggtccgccaggctccagggaagggactggagtgggtttcatacattagtggtgatagtggttacacaaactacgcagactctgtgaagggccgattcaccatctccagggacaacgccaataactcaccgtatctgcaaatgaacagcctgagagctgaggacacggctgtgtattactgtgtgaaacacacagcgaggggaagtcagtga

SEQ ID NO: 4626 - DNA, 272 bp, Homo sapiens
  SIMILAR (1)..(132): 841254mologous to Macaca fascicularis hypothetical protein,accession number AB047968,Smith-Waterman Score=196.
atggaatactatgcagccataaaaaaggatgagttcctgtcctttgcagggacatggatgacactggaaaccattattctcagcaaactaacacaagaacagaaaaccaaacaccacatgctctcactcctgctaaaagcacttactcaagagcccacagggagactgtggtgcaagatccagctctccgcactccaagcatgcagatttcaaactccacaaatgctggaacagcaaatgcaagccaagacagctcagccagctggtgtgag

SEQ ID NO: 4627 - DNA, 3048 bp, Homo sapiens
  SIMILAR (1297)..(2982): 621254mologous to Homo sapiens centriole associated protein CEP110,accession number AF083322,Smith-Waterman Score=1564.
atgctttgcgcgctgtccctggcgctgtgcgcgctgtcgctgcccgtccgcgcggccactgcgtcgcggggggcgtcccaggcgggggcgacaaaggggcgggtgcccgaggcgcggcccaacagcatggtggtggaacaccccgagttcctcaaggcagggaaggagcctggcctgcagatctggcgtgtggagaagttcgatctggtgcccgtgcccaccaacctttatggagacttcttcacgggcgacgcctacgtcatcctgaagacagtgcagctgaggaacggaaatctgcagtatgacctccactactggctgggcaatgagtgcagccaggatgagagcggggcggccgccatctttaccgtgcagctggatgactacctgaacggccgggccgtgcagcaccgtgaggtccagggcttcgagtcggccaccttcctaggctacttcaagtctggcctgaagtacaagaaaggaggtgtggcatcaggattcaagcacgtggtacccaacgaggtggtggtgcagagactcttccaggtcaaagggcggcgtgtggtccgtgccaccgaggtacctgtgtcctgggagagcttcaacaatggcgactgcttcatcctggacctgggcaacaacatccaccagtggtgtggttccaacagcaatcggtatgaaagactgaaggccacacaggtgtccaagggcatccgggacaacgagcggagtggccgggcccgagtgcacgtgtctgaggagggcactgagcccgaggcgatgctccaggagcttgcagagctagaaagtgccctccaagagcagcatgaggtgaatgcatctttgcagcagacccagggagatctcagtgcctatgaagctgagctagaggctcggctaaacctaagggatgctgaagccaaccagctcaaggaagagttggaaaaagtaacaagacttacccagttagaacaatcagcccttcaagcagaacttgagaaggaaaggcaagccctcaagaatgcccttggaaaagcccagttctcagaagaaaaggagcaagagaacagtgagctccatgcaaaacttaaacacttgcagaagaaacttgaagatgccaaatctcaggagcaagtttttggtttagataaagaactgaagaaactaaagaaagccgtggccacctctgataagctagccacagctgagctcaccattgccaaagaccagctgaagtcccttcatggaactgttatgaaaattaaccaggagcgagcagaggagttgcaggaagcagagaggttcagcagaaaggcagcacaagcagccagagatctcacccgagcagaagctgagatcgaactcctgcagaatctcctcaggcagaagggggagcaggagaatgaagtttctagattagaagacataatgcagcatttaaaatcaaagaagcgggaagaaagggacttcattgatggaaatgttgagagtcttatgactgaactagaaatagaaaaatcactcaaacatcatgaagatattgtagatgaaattgagtgcattgagaagactcttctgaaacgtcgctcagagctcagggaagctgaccgactcctggcagaggctgagagtgaactttcatgcactaaagaaaagacaaaaaatgctgttgaaaagttcactgatgccaagagaagtttattgcaaactgagtcagatgctgaggaattagaaaggagagctcaggaaactgctgttaacctcgtcaaagctgatcagcagctaagatcgctccaggctgatgcaaaggatttggagcagcacaaaatcaagcaagaagaaatcttgaaagaaataaacaaaattgtagcagcaaaagactcagacttccaatgtttaagcaagaagaaggaaaaactgacagaagagcttcagaaactacagaaagacatagagatggcagaacgcaatgaggatcaccacctgcaggtccttaaagaatctgaggtgcttcttcaggccaaaagagccgagctggaaaagctgaaaagccaggtgacaagtcagcagcaggagatggctgtcttggacaggcagttagggcataaaaaggaggagctgcatctactccaaggaagcatggtccaggcaaaagctgacctccaggaagctctgagactgggagagactgaagtaactgagaagtgcaatcacattagggaagtaaaatctcttctggaagaactgagttttcagaaaggagaactaaatgttcagattagtgaaagaaaaactcaacttacacttataaagcaggaaattgaaaaagaggaagaaaatcttcaggttgttttaaggcagatgtctaaacataaaaccgacttagtagatactggattggcactgaccacctctagtaaagatggctttattagtagtttccacttgttctttcacctaaaggacctgcttcacaccaccaagcatcaggatgtgttgctcagtgagcagacccgactccagaaggacatcagtgaatgggcaaataggtttgaagactgtcagaaagaagaggagacaaaacaacaacaacttcaagtgcttcagaatgagattgaagaaaacaagctcaaactagtccaacaagaaatgatggcaaaccaaaaagatttggagagaagacaaatggaaatcagtgatgcaatgaggacacttaaatctgaggtgaaggatgaaatcagaaccagcttgaagaatcttaatcagtttcttccagaactaccagcagatctagaagctattttggaaagaaacgaaaacctagaaggagaattggaaagcttgaaagagaaccttccatttaccatgaatgagggaccttttgaagaaaaactgaacttttcccaagttcacataatgatcactactagacagcttttgagtcacaacagtcccagattggagtacggcaaagaagtgtccatcagagaggagtgtggcataatgacacaagctaaccatctgctggaagatatagcaaatgtgtga

SEQ ID NO: 4628 - DNA, 334 bp, Homo sapiens
  SIMILAR (35)..(139): 911254mologous to Homo sapiens Peptide sequence derived from a human secreted protein,accession number Y40039,Smith-Waterman Score=159.
atggaatactatgaagccataaaaaagaatgatcatgtcctttgcagggacatggatgaagctggaagccatcattctcagcaaactaacacaggagcggaaaaccaaacactgcatgttctcactcataagtgggagccaaatatgagattcttttatagcagctatgacattcaaggagctcttacagatgtccccaatactgtcacagtggagtttatcttacagaattgggccactctaagtgactacctgttgcctcaaagggtaacaggtctaacagaaagaactgtactccagaattgtaagtcttctagattctgcaactggaaga

SEQ ID NO: 4629 - DNA, 245 bp, Homo sapiens
  SIMILAR (102)..(134): 901254mologous to Homo sapiens PRO1546,accession number AF116638,Smith-Waterman Score=58.
atggaatactatgcagccataaaaaaggatgagctcatgtcctttgcagggacatgggtgaagctggaaaccatcattctcagcaaactatcacatggacagaaaaccaaacaccgcatgttctcactcatagacacagtggtagtgggcagtgatgatttcccattgttgcgagtccctggctgctgtgctagctcccttaatgccgcccatacctctgtaaacattaaacttgagcttactcc

SEQ ID NO: 4630 - DNA, 1171 bp, Homo sapiens
  SIMILAR (1)..(846): 871254mologous to Homo sapiens putative p150,accession number U93567,Smith-Waterman Score=1362.
atgggcaaggacttcatgactaaaacaccaaaagcaatggcaacaaaagccaaaatagacaaatgggatctaattaaactaaagagcttctgcacagcaaaagaaacgaccatcagagtgaacagccaacctaaagaatgggagaaaatttttgtaacctatccatctgacaaagggctaatatccagaatccacaaagaatgtaaacaaatttacaagaaaaaaacaaacaaccccatcaaaaagtgggcaaaagatataaacaaacacttctcaaaagaagacatttatgcagccaacaggcacatgaaaaaatgctcatcatcactggtcatcagagaaatgcaaatcaaaaccataatgagataccatctcacaccagttagaatggcgatcattaaaaagtcaggaaacaacagatgctggagaggatgtggagaaacaggaatgcttttacactgtgggtgggagtgtaaactagttcaaccattgtggaagacagtatggcaattcctcaaggatctagaactagaaataccatttgactcagccatcccattactgggtatatacccaaaggattataaatcatgctgctataaagacacatgcacacgtatgcttattgtggcagtattcacaatagcaaagacttggaaccaacccaaaggtccatcaatgatagactggattaagaaaatgtggcatgtatacaccatggaatactatgcagccataaaaaaggatgagttcatgtcctttgtggggacatggatgaagctggaaaccatcatgctgagcaaactatcacaaggacagaaaaccaaacaccgcatgttctcactcacagctgcacagaagaaattttacctgagagttcatcaggcgaatggtagtttttgtgcccacatcttgttggaagttggctgtgggtgccccattaaacctcaggactgcgtcatgatcatctataaaccacaaagaaacagaaaagaggtgatgagcactggcaatatgcagaaaaagagaaagacgagaggcgggggagggggcaagggaataatgcttccccatctttaccccatcatgatccacagggcgaaatggcagtatttgtgtggtgctcaggtaaagctcctaggcagagatgaccacctgtctgccagccact

SEQ ID NO: 4631 - DNA, 192 bp, Homo sapiens
  SIMILAR (91)..(59): 721254mologous to Homo sapiens Human secreted protein, SEQ ID NO: 6834,accession number G02753,Smith-Waterman Score=49.
cagacttgtgtatgcggatacctgcttcagtaccatcaagttaaaagcagaagatgcttctacgagtgagaacatgcggtgtttggttttctgtgcttgcgatagtttgctgagaatgatagtttccagcttcatccgtgtcccaacaaaggacatgtactcatccttttttatggctgcatagtattccat

SEQ ID NO: 4632 - DNA, 1245 bp, Homo sapiens
  SIMILAR (1102)..(1022): 461254mologous to Homo sapiens putative p150,accession number U93572,Smith-Waterman Score=57.
tcaactcccacttatgagtgagaatatgcggcgtttggttttctgttcctgtgttagtttgctgaggatgatggcttccagcttcatccatgttccgacttgtgtatgttgaaccagtcttgcatcccagggatgaagctgacttgactgtggtggataagttttttgatgtgctgctgcatttgatttgccagtactttgttgaggatttttgcaccaatcttcgtcagggatattggcctgaagttttgttgtttttactgttgtgtttctgccaagtttcagtgttaggatgatgctggcttcataaaatgagttagggaggagtcccttcttttcaattctttgcaatagcttcagaaggagtagtaccagctcccttttgtacctctggtagaatttgactgtaaatccatctggtcctatgcctccatggacaatctgccttccagttgtccccaccacaggctggacagggtcaagtggcttcctcttgctgctgtggcaatccttcttaaagtgccctagtttgccacacttgtagcaattggcaggtgcaccttggggattctgtgttttataggtctgaagagcagccactagagcctctgcctttctcttatctctcttctctttttcctgggcttcatcctgatcctgtgtcctctgggtcccagcaaccttcatagatgccacacacggatgcaagtgtgacttccagccatggactaggaggattggcaggtagaaatagttgcatttacccatgctgtgccccagccctgtgtgctgactacctttggggttccccagatctatttcttcttttgagcttccaacacaaaggaaatgtaggagttggcttggctcattctccacaatttcaacaggggaattagggctcccctggacatagggctgatagggcttcccacagaaacaaatccttgccttgtcaggtgccttgacaaggtttggaaagttagcctgtaactttgtgtccaaatccttttcagatgtaggtttgaaagagaggtctgaggctttgtggacagcagtgtagaagtgttccctgttcaccatgttcatgctaacatctatttttcgattatggccgttcttgcaggagtaaggttgtattgcattgtggttttgatttgcatttccctgatcattagtgatgttgagcattttttcatgtttgttggccatttgtatatcttcttttgataattgtctattcat

SEQ ID NO: 4633 - DNA, 278 bp, Homo sapiens
  SIMILAR (121)..(276): 961254mologous to Homo sapiens bK415G2.1 (synapsin III),accession number Z83846,Smith-Waterman Score=245.
atggaatactatgcagccataaaaaaggatgagttcgtgtcctttgtagggacatcgatgaagctggaaaccatcattctcagcaaactatcacaaggacagaaaaccaaacaccgcatgttctcactcataggatccagcctttttagctccctctccagtgccatgaagcaggcccctcaggccacctcaggactgatggagcctccaggtccctccacgcccattgttcaaagacccaggatcctgttggtgatcgatgatgcccatacagactg

SEQ ID NO: 4634 - DNA, 594 bp, Homo sapiens
  SIMILAR (192)..(500): 981254mologous to Homo sapiens Human gene 59-encoded protein fragment, SEQ ID NO:406,accession number Y86491,Smith-Waterman Score=544.
gaattccctgagcaggccgggctgcctccttcctttacctggaaacaggcgtgtctgaggaagcaggagatgtagggtgcagccctggcctgccgcttgctgccagtaaggaaccaccttcccagacagagcctcagtttccccgattgtgaaataaggatactactggagaccttccttccagtctctgagagaaaataatgaatgtcaaaggaaaagtaattctgtcaatgctggttgtctcaactgtgatcattgtgttttgggaatttatcaacagcacagaaggctctttcttgtggatatatcactcaaaaaacccagaagttgatgacagcagtgctcagaagggctggtggtttctgagctggtttaacaatgggatccacaattatcaacaaggggaagaagacatagaccaagaaaaaggaagagaggagaccaaaggaaggaaaatgacacaacagagcttcggctatgggactggtttaatccaaacttgaaggaatccgaataactaaactggactctggttttctgactcagtccttctagaagacctggactgagagatcatgcggttaaggagtgggg

SEQ ID NO: 4635 - DNA, 891 bp, Homo sapiens
  SIMILAR (891)..(361): 981254mologous to Escherichia coli K12 putative oxidoreductase,accession number AE000459,Smith-Waterman Score=931.
tatgttgcccacgctgatctggaactcccagtctaaggcgatcttctgccacctcagactaccaaagagcctggcgattaccgaagacaggtcatcttttttcattcggaagcatatcctttttcttttattcgcaaacaggtcgggcggggtagacaatccagctcttgaccagcctatgagcgagagcatgcggtgtttggttttctgtccttgtgatagtttgctcagaatgatggtttccagcttcatccatgtccctgcataggacatgaactcatccttttttatggctgcatagtattccatggtgtatatgtgccacattttcttaatccttaaccccactttttccagctggcccacattctgccgctctctatgtgggccgcgcgtcactgtcagcccccaggtaatcagcggcgcggcatcttccggccagcaggtcataatgggaatgcgattgagatcgacgtcatcgccagagacgattttttgttggcagggcgcaccacgcagccgctttgtcggcatgttcaatacttgcttaaactgcggcagtttatcaaacaggtcgcggaaaccttttggcggctccggctctttcagaaacgccaataatttaccaacttcacgcagcgccgaaacatcttcctgccccatgcccatcgccacgcgctttggcgtaccgaacaggttgcacagcaccggcattgagtagcctttagggttttcgaacaacagcgcaggcccaccggcacgcaaagtgcggtcagcaatttcagtgatttccagatgcggatccaccgggagcgtgatacgttttagctcaccctgctgttcaagcagcgtcaagaagtcgcgtaaatcgttatatttcatggcgtccat

SEQ ID NO: 4636 - DNA, 1539 bp, Homo sapiens
  SIMILAR (388)..(852): 971254mologous to Homo sapiens PRO1868, an A33 antigen homologue,accession number Y96735,Smith-Waterman Score=805.
atggaatactatgcagccataaaaaatgatgagttcaagtcctttgttgggatatggatgaagctggaaaccatcattctcagcaaactatcacaaggacaaaaaaccaaacaccgcgtgttctcactcagagactataagctctcccattttcttatttctcttggcttcatacttcttaagagaaaagatgtgattgggttgtccagtcatcatccaggtgagcagtgctctcatgactcacctctcaggtccttgatggtctttgggccagagctgatctctggtcatagtcccttagagccagtggtggtgcctcgtcgaagtcatggctgcctgataggggctgtaaatctcaaatccagcaatcgaaccccagtggtacaggaatttgaaagagacttggcgggtcgtgcagaaatactggggaagacatccctgaagatctggaatgtgacacggagagactcagccctttatcgctgtgaggtcgttgctcgaaatgaccgcaaggaaattgatgagattgtgatcgagttaactgtgcaagtgaagccagtgacccctgtctgtagagtgccgaaggctgtaccagtaggcaagatggcaacactgcactgccaggagagtgagggccacccccggcctcactacagctggtatcgcaatgatgtaccactgcccacggattccagagccaatcccagatttcgcaattcttctttccacttaaactctgaaacaggcactttggtgttcactgctgttcacaaggacgactctgggcagtactactgcattgcttccaatgacgcaggctcagccaggtgtgaggagcaggagatggaagtctgtcacactgataaaagaggtgggttcccatggtcttgggcagctccccacctgtggtttttgcaggatacagccttgctccccgctgctctcacgggctggtgttcagtgtctgtggcttttccaggtgcacagtgcaagctgtcagtggatctatcattctggggtctggaggatggtggccctcttctcacagctccactaggcagtaccccagtagggactctgtgtaggggatctgaccccacatttcccttctgcactgccctttattccagttcccaacaagttctttatctccattgagatcgcttcagcctgaactttattgtccatatcactatcagcattttggtcaaagccattcaacaagtctctaggaagttccaaactttcccacatcttcctgtcttctgagctctccaagtctctaggaagtacaaacctctgcctgttacccatttcaaagtcacttccacattttctgtatcttgggaagaggattctagtttctatggctaggcttgggggagcatgggagagtgagaaaatgcggtgtttggttttctgttcctgtgttagtttgctgagaatgatggtttccagcttcatccatgtgcctgcaaaggacatgaactcatccttttttatggttgcatagtattccacggtgtatatgtgccacat

SEQ ID NO: 4637 - DNA, 619 bp, Homo sapiens
  SIMILAR (400)..(609): 921254mologous to Homo sapiens Human gelsolin,accession number W87767,Smith-Waterman Score=328.
  misc_feature (1)...(619): n = a,t,c or g
atgtggcacatatacaccatagaatactatgcagccataaaaaaggatgagttcatgtcctttgctgggacatggatgaagctggaaaccatcattctcagcaaactaacacaggaacagaaaaccaaacaccgcatgttctcactcgtaagtgggagttcaggccactataacaaagtaccacaaggtggtttaagcaacaggaatttaattctttcagttctagaggctggggagtccaagatccccagtgagggctcttcctggctggcagatggccacctcctccctgtatccacacgtgatggagagcaagtaagctactgcctcttcctcttcttaaacccagaagttgatgacagcagtgctcagaagggctggtggtttctgagctggtttaacaatggcaatcggtatgaaaggctgaaggccacacaggtgtccaagggcatccgggacaacgagcggagtggccgggcccgagtgcacgtgtctgaggagggcactgagcccgaggcgatgctccaggtgctgggccccaagccggctctgtctgcaggtaccgaggacaccgccaaggaggatgcggccaaccgcaagctggnccaagctctacaag

SEQ ID NO: 4638 - DNA, 2386 bp, Homo sapiens
  SIMILAR (15)..(1154): 661254mologous to Homo sapiens plasma gelsolin,accession number X04412,Smith-Waterman Score=1144.
gccgtgtcgccaccatggctccgcaccgccccgcgcccgcgctgctttgcgcgctgtccctggcgctgtgcgcgctgtcgctgcccgtccgcgcggccactgcgtcgcggggggcgtcccaggcgggggcgccccaggggcgggtgcccgaggcgcggcccaacagcatggtggtggaacaccccgagttcctcaaggcagggaaggagcctggcctgcagatctggcgtgtggagaagttcgatctggtgcccgtgcccaccaacctttatggagacttcttcacgggcgacgcctacgtcatcctgaagacagtgcagctgaggaacggaaatctgcagtatgacctccactactggctgggcaatgagtgcagccaggatgagagcggggcggccgccatctttaccgtgcagctggatgactacctgaacggccgggccgtgcagcaccgtgaggtccagggctttgagttggccccccttcttgggttacttcaagtctggccctgaagttacaagaaaggaggtgtggcatcaggattcaagcacgtggttacccaacgaggtggtggtgcagagactcttccagggtcaaagggcggcgtgtggtccgtgccaccgaggtacctgtgtcctgggagagcttcaacaatgggcgactgcttcatcctgggacctgggcaaccaacattcaaccagtggtgtggttccaaacagcaatcggtatgaaagactgaaggccacacaggtgtctcaagggcattcggtacaacgagcggagtggccgggcctcgagtgcacgtgtctgaggagggcactgagcccgaggcgattgctccaggtgctgggccccagatgtcgctctgcctgcaggtaccgaggacaccgccaaggaggatgcggccaacccgcaagctggccaagctctacaaggtctccaatggtgcagggaccatgttacgtatccctctgggctgatggagaacgaattcacccagggggcccctgaagtcagaggactgcttcatcctggaccacggcaaagatgggaaaatctttgtctggaaagagcaagcatgcaaacacggaggagaggaaagctgccctcaaaacagcctctggatttcattcaccaagatgggattaccccaagcagattcaggtctcggttcctttccttgagggcggttgagaccccactgttcaagcaggtcttcaagaactggcgggacccagaccagacagatggcctgggcttgtcctacctttccagccatatcgccaacgtggagcgggtgcccttcgacgccgccaccctgcacacctccactgccatggccgcccagcacggcatggatgacgatggcacaggccagaaacagatctggagaatcgaaggttccaacaaggtgcccgtggaccctgccacatatggacagttctatggaggcgacagctacatcattctgtacaactaccgccatggtggccgccaggggcagataatctataactggcagggtgcccagtctacccaggatgaggtcgctgcatctgccatcctgactgctcagctggatgaggagctgggaggtacccctgtccagagccgtgtggtccaaggcaaggagcccgcccacctcatgagcctgtttggtgggaagcccatgatcatctacaagggcggcacctcccgcgagggcgggcagacagcccctgccagcacccgcctcttccaggtccgcgccaacagcgctggagccacccgggctgttgaggtattgcctaaggctggtgcactgaactccaacgatgcctttgttctgaaaaccccctcagccgcctacctgtgggtgggtacaggagccagcgaggcagagaagacgggggcccaggagctgctcagggtgctgcgggcccaacctgtgcaggtggcagaaggcagcgagccagatggcttctgggaggccctgggcgggaaggctgcctaccgcacatccccacggctgaaggacaagaagatggatgcccatcctcctcgcctctttgcctgctccaacaagattggacgttttgtgatcgaagaggttcctggtgagctcatgcaggaagacctggcaacggatgacgtcatgcttctggacacctgggaccaggtctttgtctgggttggaaaggattctcaagaagaagaaaagacagaagccttgacttctgctaagcggtacatcgagacggacccagccaatcgggatcggcggacgcccatcaccgtggtgaagcaaggctttgagcctccctcctttgtgggctggttccttggctgggatgatgattactggtctgtggaccccttggacagggccatggctgagctggctgcc

SEQ ID NO: 4639 - DNA, 5142 bp, Homo sapiens
  SIMILAR (4426)..(2255): 871254mologous to Homo sapiens putative p150,accession number U93570,Smith-Waterman Score=3312.
  misc_feature (1)...(5142): n = a,t,c or g
ctgggccttgggccttgccagatagtttatgccaacagtgtgatttatgactggggccttgtccacgttgtatccgtttgacctcatacccacccccggaatccatgcattctcattgttcaactcccacttatgagtgagaacatatggtgtttggttttctgttcctgtgttagtttgctgagaatgatggtttccagcttcatccatgtccctctggtagaattcggctgtgaatccatctggtcctggactcttttttgttggtaaactattgattattgccacaatttcagagcctgttattggtctattcagagattcaacttcttcctggtttagtcttgggagggtgtatgtgtcgaggaatttatccatttctcctagattttctagtttattggcgtagaggtgtttgtagtattctctgatggtagtttgtatttctgtgggatcggtggtgatatcccctttatcattttttattgcgtctatttgatgcttctctcttttcttgtttattagtcttgctagcggtctatcaattttgttgatcctttcaaaaaaccagctcctggattcattaattttttggagggtttttttttttgtctttatttccttcagttctgctctgattttagttatttcttgccttctgctagcttttgaatgtgtttgctcttgcttttctagttcttttaattgtgatgttagggtgtcaattttggatctttcctgctttctcttgtgggcatttagtgctataaatttccctctacacactgctttgaatgtgtcccagagattctggtatgttgtgtctttgttctcgttggtttcaaagaacatctttatttctgctttcatttcgttatgtacccagtagtcattcaggagcaggttgttcagtttccatgtagttgagcagttttgagtgagtttcttaatcctgagttctagtttgattgcactgtggtctgagagacagtttgttataatttctgttcttttacatttgctgaggagagctttacttccaagtatgtggtcaattttggaataggtgtggtgtggtgctgaaaaaaatgtaaattcttttgatttggggtggagagttctgtagatgtctattaggtctgcttggtgcagagctgagttcaattcctgggtatccttgttaactttctgtcttgttgatctgtctaatgttgacagtggggtgttaaagtctcccattattattgtgtgggagtctacgtctccttgtaggtcactcaggacttgctttatgaatctgggtcctcctgtattgggtgcatatatatttaggatagttagctcttcttgttgaatagcagatgctttgttactctccacctcatgcctctgtgaacttaagtcctctgtaggtgttagatctgcatgtaaataaacgtgccaatagctatgggagctgagcaccttccagatcctcagacctcgcctagatggagccaactccttcctccactgaggagtgtggaatgttcggcagagctgggtacaacaggtttcacctctaattttggaactggaaagtgttcctttttgacaaatgtggacacccttttcgacaggtctattgcactcagtgaataattctgaagccatttggtggctgtaatctctacacatcatcttttcatgggcctgaagatttctctgtcccacctgctttctggcctccctggcctgctgctctcggcatgaatagagaagtagcactgggcctgaggattgggaccacatcatgcacatcctttcgcacacagagatatgggcgaggtgtcctgacacttggacccacagctcagctgctggctctctatgagattgaagcaagtcatgtgaatgttcgggcttccaaacgctagggcagcaacatccacagcgcctttcgcttctcacagcctctgtctctgttttaggattcttttgctccttgggcctggaattaatctggccaatccaagaaatcatctggttcttcaccagaagttcagcattcttggcaggcatttttcccttggccacagaggaaccctgtatttctctggctctggctccttccaagagatgggaatgtaatagcagcagctgaagatatgaaaataactgagcctggggaacagaaagcacttcccacgagtgcccatgtttcagcgaagacgatagtttgctcagaatgatggtttccagcttcatccatgtcccctacaaaggacatgaactcatcctttttttatggctgccatagtattccatgggtgtgtatgtgccacatgttcttcatttccagtctatcattgcttgggcatttggggttgggtcccaagtttttgctattgtaaatagtcctggcaataaacatacggtgtggcatgtgtctttataggtaggaatttataaatcctttggggtattataccccaatangggggatggctgggtcaaatggtatttctagttctagatccctgaggaattgccacaccgacttccacaatggttgaactagtttacagtcccaccaacagtgtaaaagtgttcctatttctccacatcctctccagcacctattgtttcctgactttttaatgatcaccattctaactggtgtgagatggtatctcattgtggttttgatttgcatttctctgatggccagtgatgatgagcattttttcatgtgttttttggctgcataaatgtcttcttctgagaagtgtctgttcatatcctttgcccactttttgatggggttgtttgtttttttcttgtaaatttgtttgagttcattgtagattctggatattagccctttgtcagatgagtaggttgcaaaaattttctcccattctgtaggttgcctgttcactctgatggtggtttcttttgctgtgcagaagctctttagtttaatgagatcccatttgtcaattttggcttttgttgccattgcttttggtgttttcgacatgaagtccttgcccatgcctatgtcctgaatggtattgcctaggttttcttctagggtttttatggttttaggtctaacatgtaagtctttaatccatcttgaattaatttttgtataaggtgtaaggaagggatccagtttcagctttctacatatggctagccagttttcccagcaccatttattaaatagggaatcctttccccattgcttgtttttgtcaggtttgtcaaagatcagatagttatagatatgcggcattatttctgagggctctgttctgttccattggtctatatctctgttttggtaccagtaccatgctgttttggttactgtagccttgtagtatagtttgaagtcaggtagcatgatgcctccagctttgttcttttggcttaagattgacttggcaatgtgggctcttttttggttccatatgaactttaaagtagttttttccaattctgtgaggaaagtcattggtagcttgatggggatggtgttgaatctataaattaccttgggcagtatggccattttcacgatattgattcttcctacccatgagcatggaatgttcttccatttgtttgtatcctcttttatttccttgagcagtggtttgtagttctccttgaagaggtccttcacatcccttgtaagttggattcctaggtatgttattctctttgaagtgattgtgaatgggagtccactcatgatttggctctctgtttgtctgttattggtgtataagaatgcttgtgatttttgcacattgattttgtatcctgagactttgctgaagttgctcatcagcttaaggagattttgggctgagacagtggggttttctagatatacaatcatgtcatctgcaaacagggacaatttgacttcctcttttcctaactgaatgctctttatttccttctcctgcctgattgccctggccagaacttccaacactatgttgaataggagtggtgagagagggcatccctgtcttgtgccgattttcaaaggcaatgcttccagcttttgtccattcagtatgatactggctgtgggtttgtcatagatagctcttattattttgagatatgttacatcagtacctagttcattgagagtttttagcatgaaggggtgttgaattttatcgaaggccttttctgcatctcttgagataatcatgtagtttttgtcgttggttctgtttatgtgatggattatgtttattgatttgcatatgttgaaccagccttgcatcccagggatgtaaccgacttggtcatggtggataagctttttgatgtgctgctggattcggtttgccagaattttattgaggatttttgcatcaatattcatcagggatattggcctgaaattttcttttatgttgtgtctgagtgagaacctgcagtgtttggttttctgttcctgtgttagtttgctgagaaggatggtttccagcttcatccatgtccctgcaaaggacatgaactcattcttttttatggctgcatagtattccatggtatataaccagccttgccctctgaagttgtccaccatggagatgttaaaattcttgtctaatctaactacctccttacaggccctatcactaaatacagctgcactggaggttgaggcttcaacatgaattttggggggacataattcagtccttagcagcatctgagccacaaacacctgtctggttacaaaggaagcagctgccagctcactggtgtgggacgccatgtctggtctgtgctttgctgaactgtgctggaatttcacgggctgaagctggcccagctgcatgaccttggacaatctactgaacttcctgtgccttagtttctttatcctccccgagaaggtaatatctgagctggaagctgcagaattagaaggatctgactggccatggcaagacctgcctttgcatcccttcttattttccaaacgctcgccttctgcttgaagaggcagagtggtggggtagttaagaggatgggctctggcttccaattccagcacggcagcatactggcgatgtaatcttgagtaagtgacataatctctgtgtaccttagttttca

SEQ ID NO: 4640 - DNA, 1806 bp, Homo sapiens
  SIMILAR (937)..(1059): 871254mologous to Homo sapiens Sec24A protein,accession number AJ131244,Smith-Waterman Score=177.
ctcgtgcaagatttactgaaaactttgccacaaatgtttaccaagactctggagacccagagtgccttgggtcctgcactgcaggctgcctttaagctgatgtctccaactggtggtcgaatgtctgtctttcaaacacaactcccaactcttggagtgggagccctgaaaccacgagaggaaccaaaccacaggtcatctgctaaggatatacacatgacaccatccactgacttctataagaaattagccttggactgttctggtcagcaagttgctgttgacttattccttctcagtggacagtattctgatttggcttctctgggttgtatttctcggtattcagcaggtagtgtctattactatccctcttaccatcatcagcacaacccagtccaagtacagaaattacagaaggaactacagagataccttactcggaagattggctttgaggcagtcatgaggattcggtgcaccaaaggtctttccattcatactttccatggaaacttctttgttaggtcaaccgacttactgtctttgcctaacgtcaacccagacgctgggtatgcagtacagatgtcagtggaagagagtcttactgacactcagttggtttcttttcagtcagcactcttgtatacatccagcaaaggcgaaagaagaattcgtgttcatactttgtgtttgccagtagtttcgactctgaatgatgtctttcttggagctgatgttcaagcaatttcagggttattggccaatatggctgttgacagatctatgactgccagtctgagtgacgctcgggatgctctagtgaatgcagtcattgactccctttcagcttaccgttcttcagtcttaagtaaccagcagcctggactcatggttcctttttctttgcggcttttcccactttttgtgttggctctccttaaacagggagcactcaacatcagtgatagaaccatacctcagccccccattcttcagctttcagtggagaagctgagcagagatggagctttcctcatggatgcaggctctactgtggacgggaggatggagtcgatggccgtcgctaccgacggcggggagaggccgggggtcccagcgggctcaggtctgtcggcttcccagcgtcgggcggagctgcgtcggagaaagctgctcatgaactcggaacagcgcatcaaccggatcatgggctttcacaggcccgggagcggcgcggttcatcctacgtgtatcagggactcttgtgctcatatcctagtgtttgtgttcagtgccgtcaacactgtcacctacgggccggctagaaaagaagaagaaagtcaaacaaaatcaaagcagcaggacagtgataaactgaactccctcagcgttccttccgtttcaaagcgagtagtgctgggtgattcagtcagtacaggaacaactgaccagcagggtggtgtggccgaggtaaaggggacccaactgggagacaaattggactcgttcattaaaccacctgagtgcagtagtgatgtcaaccttgagctccggcagcggaacagaggggacctgacagcggactcggtccagaggggttcccgccatggcctagagcagtacctttccagattcgaagaagcaatgaagctaaggaaacagctgattagtgaaaaacccagtcaagaggatggaaatacaacagaagaatttgactcttttcgaatatttagattggtgggatgtgctcttcttgctcttggagtcagagcttttgtttgcaaatacttgcctgccaagtag

SEQ ID NO: 4641 - DNA, 504 bp, Homo sapiens
  SIMILAR (36)..(83): 521254mologous to Homo sapiens Sec24A protein,accession number AJ131244,Smith-Waterman Score=45.
atgactttccagtgtgtggtaaatactcactatctcacatatccccggccccaacgtttcctctacctagtcgtcgtccgtccgtcatgcgcatcgtggataatgttcgtcctgatcgacagaggttatgttttcagctactttccccagagctatggaggctttggctcgcggatcctcagtaaacctattgaagtacaagttggaggcaggagtgtggttgctcagatgtggagcaacaagtgtggacagtattctgatttggcttctctgggttgtatttctcggtatcagcaggtagtgtctattactatccctcttaccatcatcagcacaaccagtccaagtacagaaattacagaaggaactacagagataccttactcggagattggctttgaggcagtcatgaggattcggtgcaccaaagcaaagccaacaagacacaggcactacggggagctcgaaataagcataacaattattcgagccattggcaaataa

SEQ ID NO: 4642 - DNA, 3247 bp, Homo sapiens
  SIMILAR (1805)..(3244): 961254mologous to Homo sapiens RNA helicase,accession number AF106680,Smith-Waterman Score=2321.
cgctgggatggccgccacagctgtaggtgctgctagtgtttagcgctggtctttgccgggcgttgagggcagctcagcctccttgtttgtccggttcgcctgtgcgtggtactcaagggcaccagtattcccgcggtcggcagcatgggtcgggagtcacgccactatcgaaaacgatcggcatcccggggtcgctctggaagtcggtctagaagtcgctcaccctcagacaaaagaagtaaacgtggagatgacagacggtctagaagtagagatagagataggaggagagagaggtctcgtagcagggataaaagaagatctcggtcaagggacaggaagcgtctgagacgttccagaagtagagagagagacagaagccgagagcgaagaagatctcgaagtagagacaggagacgctcaaggagtagaagccggggccggcgatcccgatcctccagtcctggaaataaaagcaagaaaactgagaatagatctaggtccaaagagaaaactgatggtggggaaagttctaaagagaagaaaaaagacaaagatgacaaggaggatgaaaaagaaaaagatgctggcaactttgaccagaataagctggaagaagaaatgagaaagcgaaaagaaagagtagaaaaatggcgagaagagcaacgtaaaaaggctatggaaaacataggagaactgaaaaaggaaatcgaagagatgaaacaagggaaaaagtggagtttagaggacgatgatgatgacgaagatgatcctgcagaagctgaaaaggagggaaatgaaatggagggtgaggagttagatccattagatgcttacatggaagaagtgaaagaggaagtaaaaaaatttaacatgagaagtgtaaaaggtggtgggggaaatgaaaagaagtctgggccaacggtcacaaaagttgtcactgttgtgacaaccaaaaaagcagttgtggattctgataagaagaaaggtgagctgatggagaatgaccaggatgccatggagtattcttcagaggaggaagaagttgatcttcagacagcccttacagggtatcaaacaaaacagcgaaagcttctagaaccagttgatcatggaaaaattgagtatgagccatttaggaaaaacttctatgttgaagttccagaactagcaaaaatgtctcaagaagaggtaaatgtgtttcgattggaaatggagggcattacagttaaaggaaaaggttgccccaaaccaattaaatcctgggtccagtgtggaatttccatgaagatcttaaattccctcaagaagcatggctatgaaaagcccacgcccatccaaacccaagctattcctgctataatgtctggacgagatttgattggcattgccaaaacaggaagtggaaagaccattgcttttctgttgcccatgtttagacacatcatggatcagaggtcattagaggaaggagaggggccaatagctgtcatcatgactccaactcgagaactggctttacagattactaaagagtgtaagaagttttccaagactttgggacttagagtggtctgtgtttacggaggaacaggaatcagtgagcagattgctgagctgaaaagaggtgctgaaattattgtttgcacacctggtcgaatgattgacatgttagccgctaacagtggtcgggtcacaaatcttcgaagagtgacatatgttgttttagatgaagcagacagaatgtttgacatgggttttgaaccccaggtcatgcgcatcgtggataatgttcgtcctgatcgacagacggttatgttttcagctaacttttcccagagctatggaggctttggctcgcaggatcctcagtaaacctattgaagtacaagttggaggcaggagtgtggtttgctcagatgtggagcaacaagtgattgtgattgaagaagaaaagaaattcttgaaagttactttgagcttctaggccattatcaagaagtcaggatctgtcattatatttgtggataagcaggaacatgctgatggtcttcttaaggatttaatgagagcatcttatccttgcatgtctcttcatggaggcattgatcaatatgacagagatagcatcataaatgactttaagaatgggacctgcaaacttcttgtggctacctctgttgcttgccgaggtctagatgtgaaacatctgattcttgtagtaaattatagctgccccaaccattatgaggattatgtacacagagcagggcggactggaagagcaggaaacaagggttatgcttatacttttatcacagaggatcaagctcgctatgctggtgacataattaaagctcttgaattgtcagggactgcagtacctcctgatttagagaaactgtggagtgatttcaaagatcagcagaaagctgaggggaaaataattaaaaagagtagtgggttctctggtaagggattcaagtttgatgaaacagaacaagctttggctaatgagaggaagaagttacaaaaagcagctcttggtctacaagattcagatgatgaggatgctgcagttgatattgatgagcaaattgaaagcatgtttaattcaaagaagagagtaaaggatatggctgctcctggaacatcaagtgttcctgctccaactgcaggaaatgctgagaaattagaaattgctaagagattggctcttagaatcaatgcccagaagaatttgggcatcgagtctcaggtagatgtgatgcagcaggccaccaatgcaattcttaggggtggcaccattctggctcccactgtttctgcaaaaaccattgcagaacaacttgctgaaaagatcaatgccaagctcaattatgtgccgttagagaaacaagaagaagagagacaggatggtggacagaatgaatcttttaagagatatgaagaagaattagagatcaatgacttcccacagactgctaggtggaaagttacctctaaggaagctctgcagagaatcagtgaatactctgaagccgcaattacaatcagaggaacctacttccctcctggcaaagaacccaaggaaggcgagcggaagatttacttggcaattgaaagtgccaatgaactggctgtgcagaaagcaaaggcagaaatcaccaggctcataaaagaagagctgatccggctgcaaaattcataccaaccaacaaataaaggaagatacaaagtcttatag

SEQ ID NO: 4643 - DNA, 3255 bp, Homo sapiens
  SIMILAR (1)..(3252): 931254mologous to Homo sapiens Sec24A protein,accession number AJ131244,Smith-Waterman Score=5142.
  misc_feature (1)...(3255): n = a,t,c or g
cctccaggcccagaacggagccgccttggcctcggggtctccctacaccaacggtcctgtccaaaatgcattgctgtcttcacaagagtcagtgagccaaggatacaatttccagcttccaggatcctaccctcatccaataccagcaaagactttgatccagtctctggccagtctaactatggtggttctcagggatctgggcagactcttaatagaccacctgtggcctctaatccagtgacaccttcgcttcatagtggtcctgctccccgaatgccattacctgcttctcagaacccagctactacaccaatgccttctagtagctttcttcctgaagccaacctgccaccacctttgaattggcaatataactatccatccacagcctcacaaacaaaccattgtcctcgtgcatcatcccaaccaactgtatctggaaatacaagtttaaccacaaatcatcaatatgtttcttctggatatccttcacttcaaaatagcttcataaagtcaggtccttctgtacctcccttagtgaatccacctctgcctacaacttttcaaccaggagctcctcatgggccccctccagctggaggcccacccccagtgagggccctcacgcccctgacatcatcatatagagatgtaccccagcccttatttaattcagctgtcaaccaagaaggtattacatcaaataccaataacggatctatggtggtccacagtagttacgacgagattgaaggaggtggcttattggcaacaccacagcttactaacaagaatcccaaaatgagccgaagtgttggatattcatatccctccttaccacctggttatcagaacacaacaccacctggtgcaactggagtaccaccctcttccttgaattacccaagtgggccacaagcctttactcagactcccttaggtgctaatcatttaaccacaagcatgagtggattaagtctacaaccagagggtctaagagttgtcaatcttcttcaagaaagaaacatgcttccgtcaacacctttgaagcctccagttccaaatttgcatgaagacatccagaaactcaactgtaacccagagttatttcgatgcacgctgactagcattcctcagacgcaggccttattgaataaagccaaacttcctttggggctgctgcttcatcctttcaaagacttagtgcaattgcctgtggttacctccagtacaattgtgagatgccgttcatgcaggacgtacatcaatcctttcgtcagctttcttgatcaaaggagatggaagtgtaacttatgttatcgagtcaatgatgttcctgaagaattcttgtacaaccctttgaccagagtttatggagaacctcacagaagaccagaagttcaaaatgctactattgagtttatggctccttcagaatacatgttacgaccacctcagcctccagtgtatctctttgtatttgatgtgtctcacaatgcagtcgaaactggatacttgaattcagtttgccagagtttgttagacaatctggatttgcttcctggcaacactagaacaaaaattggcttcataacatttgacagtacaatccatttctacggtcttcaggaaagtctctctcaacctcagatgctaatagtttcagatattgaagatgtttttatacctatgccagagaacttattagtaaacttaaatgaaagtaaagagctcgtgcaagatttactgaaaactttgccacaaatgtttaccaagactctggagacccagagtgccttgggtcctgcactgcaggctgcctttaagctgatgtctccaactggtggtcgaatgtctgtctttcaaacacaactcccaactcttggagtgggagccctgaaaccacgagaggaaccaaaccacaggtcatctgctaaggatatacacatgacaccatccactgacttctataagaaattagccttggactgttctggtcagcaagttgctgttgacttattccttctcagtggacagtattctgatttggcttctctgggttgtatttctcggtatttcagcaggtagtgtctatttactatcccctctttaccatcatcagcacaacccagnttccaagttacagaaattacagaaggaactacagagataccttactcggaagattggctttgaggcagctcatgaggattcggcgcaccaaaggtctttgcattcatactttccatgggaaacttctttgttagggtcaaccgacttactgtctttgcctaacgtcaacccagacggtggggtatggcagtacaggtgttcagtggggaggagagttcttaactggacactcagttggtttcttttcagtcagcactcttgtatacatccagcaaaggcgaaagaagaattcgtgttcatactttgtgttggccagtagtttcgactctgaatgatgactttcttggagctgatgttcaagcaatttcagggttattggccaatatggctgttgacagatctatgactgccagtctgagtgacgctcgggatgctctagtgaatgcagtcattgactccctttcagcttaccgttcttcagtcttaagtaaccagcagcctggactcatggttcctttttctttgcggcttttcccactttttgtgttggctctccttaaacagaaatcattccagactgggacaaatgcacgtctagatgaacgcatttttgctatgtgtcaagtgaaaaaccagcccttggtttaccttatgctcacaactcatcccagtttgtatagagttgacaatctctcagatgagggagcactcaacatcagtgatagaaccatacctcagccccccattcttcagctttcagtggagaagctgagcagagatggagctttcctcatggatgcaggctctgtactgatgctttgggttggaaaaaattgtacacagaattttctcagccaagttctaggagttcaaaactatgcatcaattccacagcctatgacagaccttccagaacttgatacaccagaatctgccagaataatagctttcatctcttggcttagagagcagagaccatttttcccaatactttatgtaataagggatgagagtccaatgaaagcaaacttccttcaaaacatgatagaagacagaacagaatctgcattatcatattatgaattcctgttgcatatacagcaacaagtgaataaatga

SEQ ID NO: 4644 - DNA, 400 bp, Homo sapiens
  SIMILAR (6)..(215): 981254mologous to Homo sapiens transducin-like enhancer protein,accession number M99436,Smith-Waterman Score=366.
  misc_feature (1)...(400): n = a,t,c or g
tacagaccccgctccagtccggccagcccttcaagttctcgatcttggagatctgcgaccgcatcaaagaagaattccagtttcttcaggctcaataccacagcctcaagctagaatgtgagaagctggccagcgagaagacggaaatgcagcgacattatgtcatgtattatgagatgtcgtacgggctcaacattgaaatgcataagcagagtgcatctccctcgcccccttgagagtctcgtggaggaggagcgaccgagtggccctggtggtggcgggaagcagagagcagatgagaaggagccatcaggaccttatgaaagccgacgaagaccaagagtgattacnatcttgggtggtggacgaggaccaacccctcagagccccccagcccggg

SEQ ID NO: 4645 - DNA, 1605 bp, Homo sapiens
  SIMILAR (34)..(1602): 861254mologous to Homo sapiens TLE2_HUMAN ; ESG2,accession number AC007766,Smith-Waterman Score=2317.
agtgcatctccctcgccccctgagagtctcgtggaggaggagcgaccgagtggccctggtggtggcgggaagcagagagcagatgagaaggagccatcaggaccttatgaaagcgacgaagacaagagtgattacaatctggtggtggacgaggaccaaccctcagagccccccagcccggctaccaccccctgcggaaaggtacccatctgcattcctgcccgtcgggacctggtggacagtccagcctccttggcctctagccttggctcaccgctgcctagagccaaggagctcatcctggacgcttccacccccgggcccagctcggccagtcacctctgccagcttgctgccaagccagcaccttccacggacagcgtcgccctgaggagccccctgactctgtccagtcccttcaccacgtccttcagcctgggctcccacagcactctcaacggagacctctccgtgcccagctcctacgtcagcctccacctgtccccccaggtcagcagctctgtggtgtacggacgctcccccgtgatggcatttgagtctcatccccatctccgagggtcatccgtctcttcctccctacccagcatccctgggggaaagccggcctactccttccacgtgtctgcggacgggcagatgcagccggttcccttcccctcggatgcactggtaggcgcgggcatcccgcggcacgcccggcagctgcacacgctggcccatggcgaggtggtctgcgcggtcaccatcagcggctccacacagcatgtgtacacgggcggcaagggctgtgtgaaggtgtgggacgtgggccagcctggggccaagacgcccgtggcccagctcgactgcctgaaccgagacaactacattcgttcctgcaagttgctgccggatggccggagtctgatcgtgggcggtgaggccagcaccttgtccatttgggacctggcggcgcccaccccccgtatcaaggccgagctgacttcctcagccccagcctgctacgccctggccgtcagccccgacgccaaggtttgcttctcctgctgcagcgatggcaacattgtggtctgggacctgcagaatcagactatggtcaggcagttccagggccacacggacggcgccagctgcattgatatttccgattacggcactcggctctggacagggggcctggacaacacggtgcgctgctgggacctgcgggagggccgccagctgcagcagcatgacttcagctcccagattttctccctgggccactgccctaaccaggactggctggcggtcggaatggagagtagcaacgtggagatcctgcacgtccgcaagccggagaaataccagctgcacctccacgagagctgcgtgctgtccctgaagtttgcctcctgcggacggtggtttgtgagcaccgggaaggacaacctgctcaacgcctggaggacgccgtacggggccagcattttccagtccaaggagtcgtcctcagtcctgagttgtgacatctccagaaataacaaatacatcgtgacaggctcgggggacaagaaggccaccgtgtatgaggtggtctactga

SEQ ID NO: 4646 - DNA, 774 bp, Homo sapiens
  SIMILAR (605)..(772): 511254mologous to Homo sapiens transducin-like enhancer protein,accession number M99436,Smith-Waterman Score=100.
atggtgcttctgacccagtgctgctgggcctcctgtctggggctggctgcagggcggccctccaaagagctccctgtggcaggccagcgggcgtttgctctcctgacggcacaggagtcaggctcagcgaattccagctcagagcgggctctggcggcttccaggagctccacaatgaggcggctgcgcttttccagtctgctcatcaaagcaggccagccttgtgtggcgcggcgtgccgggagtgcatctccctcgccccctgagagtctcgtggaggaggagcgacgagtggccctggtggtggcgggaagcagagagcagatgagaaggagcctcaggaccttatcactcctgcctccaaatcctgtgactctccccgccccaggacgcttccacccccgggcccagctcggccagtcaccctgccagcttgctgccaagccagcaccttccacggacagcgtcggccctgggctggttctggggcccctgaaagaagctggccttggaattgccctcaaggaactcccaggtggcaaaaagggacaggacccagaccccaaactcacagccctgtatagtcagggctggtaccaaggcagccctgaggagccccctgactctgtccagtcccttcacacgtccttcagcctgggctcccacagcactctcaacggagacctctcctgcccagctcctacgtcagcctccacctgtccccccaggtcagcagctcgtggtgtacggacgctcccccgtgatggcatttga

SEQ ID NO: 4647 - DNA, 636 bp, Homo sapiens
  SIMILAR (200)..(346): 761254mologous to Escherichia coli FdrA protein,accession number D42020,Smith-Waterman Score=180.
tcagaaaatgttgatgatgtttccgtaatgatgggtcgcccgccaataaagcgttattagataccacaggtttctggcatgacgatttaataacgccacgccgaacgatatttgcgtggcaattcgtagcgaagggcggatgcggggatcgcgcaggcgattatgcagcagcttgaagaggcgtaaaacaacaggcgctgatcgcaacctcaacgtgatgatgttctccgataacgtcacgctggaagagaaatccaacttaaaaccgcgcgcgggaaaaaggcttgctggtgatgggccggactgcggtacgtcgatgattgccggcacaccgctggcttttgctacgtgatgccggaaggcaatattggcgtcattggcgcttccggtaccgggttcaggagataagtcctgatggctccttctcatctgctctctgcttcccgccaccaccaggccactcggtcgctcctcctccacgagactctcagggggcgagggagatgacttttcaatacctacaacagggtttttccccccgggcactgtggacactggggccagatccttctctggggggggccatcctgggcactgcagggtgctgagcagtgtccctgacctccaacactccat

SEQ ID NO: 4648 - DNA, 1656 bp, Homo sapiens
  SIMILAR (1)..(729): 971254mologous to Escherichia coli FdrA protein,accession number D42020,Smith-Waterman Score=1171.
atgcagcagcttgaagaggcgctaaaacaactggcgcaggggtcaggcagcagccaggcgttgacgcaggtgcgtcgctgggacagtgcctgtcagaaattacccgatgccaatctggcgctgatttcagtggctggcgagtatgcggcggagctggcaaaccaggcgctggatcgcaacctcaacgtgatgatgttctccgataacgtcacgctggaagatgaaatccaacttaaaacccgcgcgcgggaaaaaggcttgctggtgatggggccggactgcggtacgtcgatgattgccggcacaccgctggcttttgctaacgtgatgccggaaggcaatattggcgtcattggcgcttccggtaccgggattcaggagctgtgttcgcagattgcgctggcaggggagggaattactcacgcgattggccttggcgggcgcgacctcagccgtgaagtgggcggcatcagtgcgctaacagcgctggaaatgctcagtgcagacgagaaaagcgaagtgctggcatttgtttcaaaaccacctgccgaagctgtgcgtctgaaaattgttaatgccatgaaagcaaccggcaaaccgacggtggcgctgtttttaggttataccccggcggtggcccgcgacgagaatgtctggtttgcctcctcgctggatgaggccgcacgcctggcttgcctgctttcacgccagcttgagcgtatccgggctaaaccctttttcgacacgcagctcgtccggcaaccactgatggtggaaacgcggcgcattggtcgcttagagggccaccttctctttcggctacgggctaatggtaacaccgttacattagcgcgagtctacgcaactatcggcagctacggcatttatcgcccactgtcgattaccaaagttgaccccccggttcccggtgaacgtgtcttcccggaatccattgtccgcaccgtggtgcatatgatggaaagcgtggcgctaccgggcggcggcggcgtgaaggcggcgattaaaggctatcgtatcgccattaaaaccggtaccgcgaaaaaggtcgggccggacggtcgctacatcaataaatatattgcttataccgcaggcgttgcgcctgcgagtcagccgcgcttcgcgctggttgttgttatcaacgatccgcaggcgggtaaatactacggcggcgccgtttccgcgccggtctttggtgccatcatgggcggcgtattgcgtaccatgaacatcgagccggatgcgctgacaacgggcgataaaaatgaatttgtgattaatcaaggcgaggggacaggacgcatgtcttcccgcaataatccggcgcgtgtcgccatcgtgatggggtccaaaagcgactgggctaccatgcagttcgccgccgaaatcttcgaaatcctgaatgtcccgcaccacgttgaagtggtttctgctcaccgcacccccgataaactgttcagcttcgccgaaagcgccgaagagaacggttatcaggtgattattgcgggcgcaggcggcgcagcgcatctgccaggcatgattgccgccaaaacgctggtgccggtgctgggcgtgccagtacagagcgccgcactgagcggtgtcgatagcctctactaccatcaggataactaa

SEQ ID NO: 4649 - DNA, 2272 bp, Homo sapiens
  SIMILAR (756)..(2255): 941254mologous to Homo sapiens transducin-like enhancer protein,accession number M99436,Smith-Waterman Score=2486.
ctggggggcttttcgaatcggcaggatgtacccccagggaaggcacccgaccccgctccagtccggccagcccttcaagttctcgatcttggagatctgcgaccgcatcaaagaagaattccagtttcttcaggctcaataccacagcctcaagctagaatgtgagaagctggccagcgagaagacggaaatgcagcgacattatgtcatgtattatgagatgtcgtacgggctcaacattgaaatgcataagcaggcggagattgtgaagcgtctgagcggtatctgcgctcagattatccccttcctgacccaggagcatcagcagcaggtgctccaggccgtagaacgcgccaagcaggtcaccgtgggggagctgaacagcctcatcgggcagcagctccagccgctgtcccaccacgcaccccctgtgcccctcaccccccgcccagccgggctggtgggcggcagtgctacggggctgcttgctctgtctggagccctggctgcccaggctcagctggcggcggctgtcaaggaggaccgtgcgggcgtggaggccgaggggtccagagtggagagagccccgagcaggagtgcatctccctcgccccctgagagtctcgtggaggaggagcgaccgagtggccctggtggtggcgggaagcagagagcagatgagaaggagccatcaggaccttatgaaagcgacgaagacaagagtgattacaatctggtggtggacgaggaccaaccctcagagccccccagcccggctaccaccccctgcggaaaggtacccatctgcattcctgcccgtcgggacctggtggacagtccagcctccttggcctctagccttgcggtcaccgctgcctagagccaaggagctcatcctgaatgaccttcccgccagcactcctgcctccaaatcctgtgactcctccccgccccaggacgcttccacccccgggcccagctcggccagtcacctctgccagcttgcgctcaagccagcaccttccacggacagcgtcgccctgaggagccccctgactctgtccagtcccttcaccacgtccttcagcctgggctcccacagcactctcaacggagacctctccgtgcccagctcctacgtcagcctccacctgtccccccaggtcagcagctctgtggtgtacggacgctcccccgtgatggcatttgagtctcatccccatctccgagggtcatccgtctcttcctccctacccagcatccctgggggaaagccggcctactccttccacgtgtctgcggacgggcagatgcagccggttcccttcccctcggatgcactggtagacgcgggcatcccgcggcacgcccggcagctgcacacgctggcccatggcgaggtggtctgcgcggtcaccatcagcggctccacacagcatgtgtacacgggcggcaagggctgtgtgaaggtgtgggacgtgggccagcctggggccaagacgcccgtgcgccagctcgactgcctgaaccgagacaactacattcgttcctgcaagttgctgccggatggccggagtctgatcgtgggcggtgaggccagcaccttgtccatttgggacctggcggcgcccaccccccgtatcaaggccgagctgacttcctcagccccagcctgctacgccctggccgtcagccccgacgccaaggtttgcttctcctgctgcagcgatggcaacattgtggtctgggacctgcagaatcagactatggtcaggcagttccagggccacacggacggcgccagctgcattgatatttccgattacggcactcggctctggacagggggcctggacaacacggtgcgctgctgggacctgcgggagggccgccagctgcagcagcatgacttcagctcccagattttctccccctgccactgccctaaccaggactggctggcggtcggaatggagagtagcaacgtggagatcctgcacgtcggcaagccggagaaataccagctgcacctccacgagagctgcgtgctgtccctgaagtttgccccttgcggacggtggtttgtgagcaccgggaaggacaacctgctcaacgcctggaggacgccgtacggggccagcattttccagtccaaggagtcgtcctcagtcctgagttgtgacatctccagaaataacaaatacattgtgacaggctcgggggacaagaaggccaccgtgtatgaggtggtctactgaagacatgacccccc

SEQ ID NO: 4650 - DNA, 1374 bp, Homo sapiens
  SIMILAR (166)..(1041): 881254mologous to Escherichia coli FdrA protein,accession number D42020,Smith-Waterman Score=1272.
atgttcggaggggaaaaacccatcgatctgtttgcgctacgccatgacacatataaactagcagaatcagagcactatatctgtcatgctgcggagcgcaatgaccactacaatggcggcagacttaataactgctatcagggacagaggaaacaacacatcgacacaggtttctggcatgacgattttaataacgccacgccgaacgatatttgcgtggcaattcgtagcgaagcggcggatgcggggatcgcgcaggcgattatgcagcagcttgaagaggcgctaaaacaactggcgcaggggtcaggcagcagccaggcgttgacgcaggtgcgtcgctgggacagtgcctgtcagaaattacccgatgccaatctggcgctgatttcagtggctggcgagtatgcggcggagctggcaaaccaggcgctggatcgcaacctcaacgtgatgatgttctccgataacgtcacgctggaagatgaaatccaacttaaaacccgcgcgcgggaaaaaggcttgctggtgatggggccggactgcggtacgtcgatgattgccggcacaccgctggcttttgctaacgtgatgccggaaggcaatattggcgtcattggcgcttccggtaccgggattcaggagctgtgttcgcagattgcgctggcaggggagggaattactcacgcgattggccttggcgggcgcgacctcagccgtgaagtgggcggcatcagtgcgctaacagcgctggaaatgctcagtgcagacgagaaaagcgaagtgctggcatttgtttcaaaaccacctgccgaagctgtgcgtctgaaaattgttaatgccatgaaagccaccggcaaaccgacggtggcgctgtttttagggtataccccggcggtggcccgcgacgagaatgttggtttggctcctcgctggatgaggcgacgcctggctggctgcttcagcgtacgagcgagatcgccattaacccgcatcgacgggatgatgatcctcggtatgtttggcggctgctttgccgcatcgctgtgggccaacaatgtcaaactgcgaatgccgcgcagccgtatccgcattatgcaagccatcattggcggcattatcgccggttttggcgcgcgtctggcaatgggctgtaacctggcggcgttctttaccggtattcctcagttctcgctgcatgcctggttctttgccaatccgctacttataggtcagactctagaggatccccatgaatatatcgactatctggacaaggagtttccactctatcaacttgtagagtgtgtggtcagcctaaactactcgtaccactgggaatgcactgagatagctggcgttactctgtattag

SEQ ID NO: 4651 - DNA, 1125 bp, Homo sapiens
  SIMILAR (1091)..(1123): 1001254mologous to Homo sapiens putative p150,accession number U93572,Smith-Waterman Score=61.
atggaggcggaggtcgataagctggaactgatgttccagaaagctgagtctgatctggattacattcaatacaggctggaatatgaaatcaagactaatcatcctgattcagcaagtgagaaaaatccagttacactcttaaaggaattgtcagtgataaagtctcaatatcaaactttgtatgcccgctttaaaccagttgctgttgagcagaaagagactaagagccgcatttgtgctggtatgactaaaactatgaatgtgatacaaaaactacagaagcaaacagacctggatctgtcaccactgactaaagaagagaaaactgcggcagagcaattcaaatctcactcattcggtatgtggccttgtaaattaaagtataggcaaaacaaaaaaaagaagaagaaactcagtcaaaaccgctcaactacatggaaactgaacaacctgctcctgaatgactactggatacaaaacgaaatgaaggcagaaataaagatgttctttgaaaccaatgaaaacaaagacacaacataccagaatctctgtgacacattcaaagcagtgtgtagagggaaatttatagcactaaatgcccacaagagaaagcaggaaagatctaaaattgacaccctagctctgcaattaaaagaactagaggagcaagagcaaacacattcaaaagctagcagaaggcaagaaataactaagatcagagcagaactgaaggaaatagagacacaaaaaaaccttcaaaaaatcaatgaatctaggagctgcttttttgaaaagatcaacaaaatggatagactgctagcaagactaataaagaagaaaagagagaagaatcaaatagacgcaataaaaaatgataaagggggtatcaccaacgatcccacagaaatacaaactaccatcagagaatactataaacacctctatgcaaataaactagaaaatctagaagaaatggataaattcctcgacacatacaacctcccaagactaaaccaggaagaagttgaatctctgaatagaccaataacaggctctgaaattgaggcaagaattaatagcttaccaaccgaaaaaaagtccaggaccagatggatttacagctga

SEQ ID NO: 4652 - DNA, 421 bp, Homo sapiens
  SIMILAR (26)..(232): 541254mologous to Rattus norvegicus open reading frame 2,accession number X61296,Smith-Waterman Score=182.
  misc_feature (1)...(421): n = a,t,c or g
cggacgcgtgggcggacgcgtgggcaagatcagaacataactaaattaaattgaaacaaaaaaatacaaaagataaaatgaaacaaaaagctggttctttgaaaagattaaaatggatagaccattagcaagattaaccaagaaaagaataaaggaaatccaaataacttcactaagaaatgaaacaggaaatattataactgacaccactgaaatacataagatcattcaaggctaannnnnnnnnnnnnnnnnnnnnnnnnnnnnnnnnnnnnnnnnnnnnnnnnnnnnnnnnnnnnnnnnnnnnnnnnnnnnnnnnnnnnnnnnnnnnntcagatacatttaaaagaccaataacaggcatcaagattgaaatggtattttaaaaattaccaaccaaaaagtccaggattagcctgan

SEQ ID NO: 4653 - DNA, 654 bp, Homo sapiens
  SIMILAR (498)..(653): 761254mologous to Homo sapiens NAG13,accession number AF194537,Smith-Waterman Score=208.
atggaatactatgcagccataaaaaataacacgttcatgtcctttgcagcgacatggatgaagctggaagccatcattctcagcaaactaacaaaagaacagaaaaccaaacgccacatgttctcactcgtcagcactcttgaactgggggctctcactgctttggtgagatgtggcaggtggcgaagacagtgtgatgatgaagcaatggcgtgtgtgactcaaggcagaccattagcaagattaaccaagaaaagaagagagaaaatccaaataacctcactaagaaatgaaacaggagatattacaactgacaccactgaaatacaaaagatcattcaaggctatgacgaacacacttatgcacataaagtagaaaaccttgaagggatggataaattgctggaaaaatacaaccctcctagattaaatcaggaagaattaggcaccctgaacagaccaataacaagctatgagatggaaatgataattaaaaaattactaacgaaaaaagcccaggaccagatggattcacagcagagttctaccaaacattcaaagaagaattggtaccaatccttttggcactattccacaagacagaaaaagaaggaatcctccctaattcattctatgaagccagcatcaccctaa

SEQ ID NO: 4654 - DNA, 789 bp, Homo sapiens
  SIMILAR (187)..(594): 781254mologous to Homo sapiens RCK,accession number D17532,Smith-Waterman Score=537.
atgcccccatccttggcctataaaaacccgaggccccagcaggcagacacacaggtggccagatgtccagaggagtacattggcgaaagaagatgcaagcggctggtcctcgagaggatgtcaagaggagcacgcaggcagaagagcacacagacaggcaccagcataccagcaggccatcagctgttactgatgagaatttttgaaatgggatggaaaaagccatctcctttccaagaagagagcattcccattgctttatctggtagggatatcttagctagagcaaaaaatggaacaggcaagagcagtgcccatgacattcccctacttaaaaggctagacctgaagaaggacactatacaaacaatagtgattgttcccacaggaggacctgctctacaggtcagtcaaatttgcatccaggtcagcaaacacatgggaggagtcaaagtggtgatgaccacaggaggaaccaattcaggagatgacgtactgaggctggatgatacagtgcacatggtgattgctgcccctgggagaatcctgaatcttattaagaaaggagtagcaaagctagaagagacctatctccgtcatattggaagaccaggtcactttggccattttggcttagccatcaacttgatcacatatggcgatcacttcaacctgaaaggtattgaggagcagctgggaaaagaaataaaacctattccaagcaacattgacaagagcctgcatgtggcagaattccacagcaaggctgtagaaaatgagaagccttaa

SEQ ID NO: 4655 - DNA, 576 bp, Homo sapiens; identical to SEQ ID NO: 2515
  SIMILAR (1)..(90): 651254mologous to Homo sapiens ribosomal protein S12,accession number X53505,Smith-Waterman Score=98.

SEQ ID NO: 4656 - DNA, 573 bp, Homo sapiens
  SIMILAR (265)..(567): 381254mologous to Rattus norvegicus alpha 1 type V collagen,accession number AF272662,Smith-Waterman Score=124.
ctattccgcatgcttttttctcttttctatagcaatggggatcttattgacggtccctccttccttctggattcctacttctttttctgccttcttgggcttcttctcctccttttctttacttgttctccaccaacctgatttttcttttgtgcttggcttgtggaggattatttccttgctggttttgaagatagtcgaagggtcctcaaaccaaggcatgcagatggcttctagaagctgggaatggccctcatccagcaggaaaatggcaacctccgtccggacgctccctgaacccgtccctctggctgccgagcccccagcgccttcccgtttcggaaagaagcgggcgcagacccctcggggtgccccgggggacggcaggtcccgctggttgctataggaagaggcggggcgctggaaccccagcgctgggagctgcgcgcaccgggatccgctggccgccttccgcgtgagggtggccgcaccttcccgggcgcacagagcccagcaggcgcacagagcccagcaggcaaacagagcccgccaggcgcacagagccctctgcat

SEQ ID NO: 4657 - DNA, 427 bp, Homo sapiens
  SIMILAR (68)..(151): 641254mologous to Homo sapiens Human secreted protein encoded by gene 86 clone HTWCT03,accession number W78211,Smith-Waterman Score=85.
  misc_feature (1)...(427): n = a,t,c or g
acccccaataaacatatccgtgccccactgttaancctttggaggcaaccccttgaaattttaattccagccccggagcgctcttcacatgtcttgtcccagagcccagttcggactcattcttcagccgtgcatcagtcagtgggggctagcttaaactgtggtgacaaacaacctccaaatttcagtggctcaaaaatcttcttcctcatttatttacatctcatgactggtcaggtgagaggtagctctgtgctgtgtcatcctaacacaggaatccagaaggaaggagggaccgtcaatgagatccccattgctatagaaaagagaaaaaagcatgcggaatagaacgctgtttcttggagatttctcctgaaaaagtcacatgttatttcttctcacctccatcggcaaaaaaaaaaaaaaa

SEQ ID NO: 4658 - DNA, 468 bp, Homo sapiens
  SIMILAR (45)..(197): 441254mologous to Oryza sativa proline-rich protein RiP- 15,accession number AF221552,Smith-Waterman Score=118.
atgaggcgggcaggcgggggcgctccgggagccacggccggcgccgcccccaccgtcgtcctctgccccgcccgcctgcggcagagccgggaccctccccagtctccgctcacctgccagggccgccgtcgccgccgccaccgcgggttaaaccgcagccgcgcccacacttccggggtccgccaggcccgccccctaccggatgtgacccccttgcaacgtccggcgccccagtggcgcgcgtgctcgccccgcgaccccgttggccgccccgcctcgcgcgcctctgagttaccacgacatcgtgccacacacacacgctcgcggccgcccgggccacaaccacgggagcgcccacgagacccctccagcgctcgccgcacgcctcggccccgcccccgtcttccgtccacacccgaacacaccatcgtcaaccaggccatcgaggccacaagttacacaccatga

SEQ ID NO: 4659 - DNA, 284 bp, Homo sapiens
  SIMILAR (214)..(279): 501254mologous to Homo sapiens homologous to mouse Rsu-1; putative,accession number L12535,Smith-Waterman Score=51.
ggaaactggggagtttacccagcttaaggaactcaacattcagggcaactgctggacccttctgctcccagaactaggaaacttatatttaactggtcagaagaaggtatgcaaagtggagaacagcccctgggttaccccaattgctggccagttccagcttgatgtgtcctgtgtgtctgaatgtgtctgttctgagacatatgagtacctctatgggcagcacatgcagggcaaatccaggaaccaccaaaacataataatcacaaatcaggaaaagatga

SEQ ID NO: 4660 - DNA, 449 bp, Homo sapiens
  SIMILAR (20)..(175): 1001254mologous to Homo sapiens 68 kDa type I phosphatidylinositol-4-phosphate 5-kinase alpha,accession number U78577,Smith-Waterman Score=260.
ctgagaattcggcacgagttcctcaggagagacaacatataaaaagacaacctcatcagccttgaaaggtgccatccagttaggcattacccacactgtggggagcctgagtaccaaaccagagcgtgatgtcctcatgcaagatttctacgtggttgagagtatcttctttcccaggtacagagtttaatgttcaggagcatgtcctggaaatgtggccttttcaaatcagcccagggcagttttaggggttcaggtcggacaatttagacatgtgtccatttcttaacctggttacaatcagggcgatgtgtgactagagagttcggagagcagatactgtcctctagatgcttccattagcctctgtcctatggattgacccgtaaaaaacaacctaatgcattggataggaggcagtgtgatttcttcttcttcttatgtcttgg

SEQ ID NO: 4661 - DNA, 207 bp, Homo sapiens
  SIMILAR (9)..(146): 461254mologous to Homo sapiens Human secreted protein, SEQ ID NO: 7645,accession number G03564,Smith-Waterman Score=103.
atgcgtctcttagaatggcaaaaatccagaacattgacaacaccaaatgctggcaaggatgtggagcaacaggaactctcattcattgctgccacagctggagcagctgggatgcaggatgccaagtccagaggctgcacagagcagaagagtcctaggtctggcccaggaaactactttttcctcctaggccttcagacctgtgat

SEQ ID NO: 4662 - DNA, 885 bp, Homo sapiens
  SIMILAR (25)..(375): 661254mologous to Homo sapiens 68 kDa type I phosphatidylinositol-4-phosphate 5-kinase alpha,accession number U78577,Smith-Waterman Score=360.
atggccgtcggtctcctcagggcctcctcggcggtcagtttttcatcctttgatccaggggtcgcttcctgtacctcgtcctcagcatctggaatccagagacctatggcgtctgaggtgccttgtgcctcgggcatacccatcaagaaaataggccatcgaggtgttgattcctcaggagagacaacctatagaaagacgacctcatcagccttgaaatgtgccatccagttgtgcattactcacactgtggggagcctggatcccacaccagagcgtcatgtcctcattgagccactgattgaactcagtagctctggagctgatggttccctgttacatgtgtccatccacgatgaattcattattaaaacagtccaacataaacaggcggagtttctgcagaagctgattccaggataccacatcgacctcaaccagaactcttggactttgctgcctaaattctatggactgtgctgtgtgaaggcaggtggcaagaacacgcagattgcggtgatgaagaatctcttactaagactgaatagtgagggggaaagaatcctgctttgtattggcatcactgacattctacagtcttacaggtttgttaagaagctggagcattcttggaaagccctggtatgtgatggggacactgtctcagtgcatcgcccaggcttctacactgaacggttccagtgcttcatgtgcaacacagcatttaagaagatcccggccagaacattgacaacaccaaatgctggcaaggacgtggagcaacaggaactctcatcattgctgatgggaatgcgaagtggcacagccactgtggaagacagcttggtggtttcctacaaaactaaacatactctcaccatatga

SEQ ID NO: 4663 - DNA, 410 bp, Homo sapiens
  SIMILAR (2)..(409): 971254mologous to Mus musculus ODZ2,accession number AF195419,Smith-Waterman Score=711.
caacctccaaagtgggggcttctcctgcaccatcatgtaccggaagattggccccctggtggacaagcagatctacaggttctccgaggaaggcatggtcaatgccaggtttgactacacctatcatgacaacagcttccgcatcgcaagcatcaagcccgtcataagtgagactcccctccccgttgacctctaccgctatgatgagatttctggcaaggtggaacactttggtaagtttggagtcatctattatgacatcaaccagatcatcaccactgccgtgatgaccctcagcaaacacttcgacacccatgggcggatcaaggaggtccagtatgagatgttccggtccctcatgtactggatgacggtgcaatatgacagcatgggcagggtgatcaagaggg

SEQ ID NO: 4664 - DNA, 728 bp, Homo sapiens
  SIMILAR (14)..(724): 961254mologous to Mus musculus ODZ2,accession number AF195419,Smith-Waterman Score=1243.
acttcgtcgctttgaccgcccgacctggcgctacagctatgaccttaatgggaatctcctcttactgaacccaggcaacagtgtgcgcctcatgcccttgcgctatgacctccgggatcggataaccagactcggggatgtgcagtacaaaattgacgacgatggctatctgtgccagagagggtctgacatcttcgaatacaattccaagggcctcctaacaagagcctacaacaaggccagcgggtggagtgtccagtaccgctatgatggcgtaggacggcgggcttcctacaagaccaacctgggccaccacctgcagtacttctactctgacctccacaacccgacgcgcatcacccatgtctacaatcactccaactcggagattacctcactgtactacgacctccagggccacctctttgccatggagagcagcagtggggaggagtactatgttgcctctgataacacagggactcctctggctgtgttcagcatcaacggcctcatgatcaaacagctgcagtacacggcctatggggagatttattatgactccaaccccgacttccagatggtcattggcttccatgggggactctatgaccccctgaccaagctggtccacttcactcagcgtgattatgatgtgctggcaggacgatggacctccccagactataccatggggaaaaacgtgggccagggggccgggccccctt

SEQ ID NO: 4665 - DNA, 1227 bp, Homo sapiens
  SIMILAR (987)..(1112): 631254mologous to Mus musculus ODZ2,accession number AF195419,Smith-Waterman Score=126.
atgaagatggagaaagtgaacacaagctggcttctgcccccaagcagcatctctgtattaatcaggagaggtgcagggtccatggtcctcctgcttcagagccaacgtcagtatatatttgagtatgactcctctgaccgcctccttgccgtcaccatgcccagcgtggcccggcacagcatgtccacacacacctccatcggctacatccgtaatatttacaacccgcctgaaagcaatgcttcggtcatctttgactacagtgatgacggccgcatcctgaagacctcctttttgggcaccggacgccaggtgttctacaagtatgggaaactctccaagttatcagagattgtctacgacagtaccgccgtcaccttcgggtatgacgagaccactggtgtcttgaagatggtcaacctccaaagtgggggcttctcctgcaccatcaggtaccggaagattggccccctggtggacaagcagatctacaggttctccgaggaaggcatggtcaatgccaggtttgactacacctatcatgacaacagcttccgcatcgcaagcatcaagcccgtcataagtgagactcccctccccgttgacctctaccgctatgatgagatttctggcaaggtggaacactttgatcatcaccactgccgagatgaccctcagcaaacacttcgacacccatgggcggatcaaggaggtcctagctttgagatgttccggtccctcatgtactggatgacggtgcaatatgacagcatgggcagggtgatcaagagggagctaaaactggggccctatgccaataccacgaagtacacctatgactacgatggggacgggcagctccagagcgtggcctgcaatgaccgaccgacctggcgctacagctatgagcttaatgggaatctgcacttactgaacccaggcaacagtgtgcgcctcatgcccttgcgctatgacctccgggatcggataaccagactcggggatgtgcagtacaaattgacgacgatggctatctgtgccagagagggtctgacatcttcgaatacaatttcaatggcgcccctacaaagaccctcagccaagccagcggcatcctacaaagccttcagggcctccacgaagtccacagaaatccggcttgctcagactttgctggccgggaaggccaacccaaatgccacgtttgatgtctctagagctctttag

SEQ ID NO: 4666 - DNA, 1006 bp, Homo sapiens
  SIMILAR (675)..(728): 661254mologous to Homo sapiens fatty acid amide hydrolase,accession number U82535,Smith-Waterman Score=51.
  misc_feature (1)...(1006): n = a,t,c or g
atgatgctacttctgctggccctgctgggggctggcctactgggggcttccctgctcacctcgtggcatgctccagcccggaacaagatccccagggcccagaagtggagggaggagccagatctggaccccaagccaatcctggagctgcccctggcagagctggcccagcagcttcggaccgaagagctgagtctggagagcatcctctgtagctacttaaagcaggcactgaaggtgcaccaggaggtgaactgcctgatggatttcctgggggaatgtgaggaggaactgcaggcattaaagaagcttaagaagagtgagagaggccttctctatggggtccccatgagcctcaaggacacctatgacagcatgttcctggagaagcctgcgaccaaggacggggtcattatgaaagtgctcaaggcccaaggagccatcccctttgttaagaccaacatcccactgacgctgctcaggtctctgaagcgggctagctgggctttgaatgcggcaactcccatctatggccagatgttgagcccactgaacttaaagaagacatgtgggggctcctcaggggtgaccacggtggctggccccatggcccaggacgtggagagcctggcgctgtgccctgcaaagccctgcctgagtgaaagacatgtacccgactggacccccactgtgctcccagatgcccttttagggaggaggtgaagaccccctttccccacccccaggctgcagtgagtgagaagcccacatgctcagtccagtttgtttccttcccctgctggacaccagctgctttggcttcttggctatctggagccatagcttgtaaagttncccccaaagagggccttccagtgccatattacccaacccatggcagtttagaattattcaggcaagtgtggatgagagggtgtggcatccagttaagctgggtttttaaccctctaggtaaccctggccaagtcacatctcttctttcagc

SEQ ID NO: 4667 - DNA, 682 bp, Homo sapiens
  SIMILAR (201)..(527): 641254mologous to Homo sapiens Ras guanine nucleotide exchange factor 2,accession number AF181250,Smith-Waterman Score= 324.
gtctgatgcccgtcttcataaagacgacactgacatttgcttcagtaaaacactcaactcctgcaaagtgccccagatccgttatgccagcgtggagcgcctcttggaacgactgacagacttgcggtttcttagtattgatttcctcaacacctttctgcacacctatcgtattttcactactgccgctgtggtgctggggaaactctccgacatatacaagaggcctttcacctccatccctgtcagtgagggccagaaagctgtctttgacttctcccttgaactcaaagataggagcattggacctgacaacttccagcagtcccaccaccaccacccagagtcccgctgcgtctccaccaccacacactggtcagataccactggatctcagcagaggcctctcttctccagagcaaagcccgggaacgcaacccgaagtatcgggcagttctccacactctacggcgcaatcgaagatatggtcgttggtctggaagcagtattggctgatggcaccgtcacacgcattaaaaacgtgccacgccgcgcggctggcccggacattcgtcacatcatcatcggcaacgaaggtgcattgtgctatatcactgaagtaacagtgaaaatctttaaattcaccccggaaaacaacctcttctacggctatatgtgctag

SEQ ID NO: 4668 - DNA, 522 bp, Homo sapiens
  SIMILAR (34)..(195): 1001254mologous to Homo sapiens HRIHFB2157-like protein,accession number AF113544,Smith-Waterman Score=263.
ttcggcagagggatcagcttttggctggaacgtggaaactcacaggtgcagacgccagaagtgagatttcagcagcagctggagcagctcaactccatgggcttcatcaatcgtgaggctaacctgcaggccctgattgccacaggaggggacatcaacgcagctatcgagagactgctgggctcccagctctcctaatccctcggcccatgcctcctgcctctcccctccctcgatgtcagcattcggttcttctgtcaatccttaccctctgcagcttgtcctccaaccccttagctctgtctgagaattatggttttactgctacgtctctaacagactcttctctcctggtctccttgagcagtgctacttaaacagttttcacagtttcattgattgactctacctccttgccccacaccacttttgcaatctttaaactttcagtggctgtgcagagtcgagggaggaaccagctctctggtttactggaacatagtcttccatctataccactag

SEQ ID NO: 4669 - DNA, 1848 bp, Homo sapiens
  SIMILAR (88)..(1845): 911254mologous to Homo sapiens A1U,accession number AF188240,Smith-Waterman Score=2725.
atggcagaagccgagccgggccggccgggcgagcggggaggaggaggagccgggcgggctggcgggcggccgggtggcggcggcggcatggcggagccgagcggggccgagacgaggccccccattcgggtcaccgtcaagacccccaaggacaaggaggaaattgtgatctgcgatcgagcctcggtcaaggagttcaaagaggaaatctcccggaggtttaaggctcagcaggatcagctggtcctgatcttgtcaggcaagatcctcaaggatggggacacactgaaccagcacggaatcaaggacgggctcactgtccatctggtcatcaagacccctcagaaggctcaagatccagctgctgccactgcttcttccccctccacacctgaccctgcctcagcaccctccaccacgcctgcttcacccaccacccctacccagccctccacctctgacagtgcctcttcggatgctggcagtggaagccggaggagcagtggtggggggccctctccagggactggggagggatcccccagtgctactgcgtccatactctctggctttgggggcatcctggggctgggcagcctgggcctgggctctgccaacttcatggagctgcagcagcagatgcagaggcagctgatgtccaatcctgagatgctgttgcagatcatggagaaccccctggtccaggatatgatgtctaaccctgacctgatgcgtcacatgattattgccaaaccccagatgcagcagttgatggagcggaaccctgagatcagccacatgctcaataaccctgaactcatgaggcagacaatggagcttgctcggaatccagccgtgatgcaagagatgatgcggaaccaggaccgggccctgagcaaccttgagagcatccctggagggtataatgccctccgccgcatgtacacggacatccaggagcccatgttcagtgctgcccgggaacagtttggcaacaatcccttctcttccctggccgggaactccgacagctcatcctcacagcctctgcggactgagaatcgagagcccctccgtaaccccggagcccctcgccccccacctcccaggcccccgggtccggtggggagggcaccggaggatcggggaccagccagcctgaggtcagggatgttcaatagcccagaaatgcaagccctcctccagcagatctctgagaacccccagctgatgcagaatgtgatctcagcaccctacatgcgcagcatgatgcagacgcttgcccagaaccccgacttcgctgctcagatgatggtgaatgtgccgctcttcgcggggaacccccaactgcaggagcagctccgcctgcagctcccagtcttcctgcagcagatgcagaacccagagtcactctccatccttaccaatccccgagccatgcaggcattgctgcagatccagcagggactacagaccttgcagaccgaggcccctgggctggtacccagccttgtctccttcgggatgtcccggaccccagcaccctcagcaggcagcaacgcagggtctacgcccgaggcccccacttcctcaccagccacgccagccacatcttctccaacaggggcttccagcacccagcagcaactcatgcagcagatgatccagcttttggctggaagtggaaactcacaggtgcagacgtcagaagtgagatttcagcagcagctggagcagctcaactccatgggcttcatcaatcgtgaggccaacctgcaggccctgattgccacaggaggggacatcaacgcagctatcgagagactgctgggctcccagctctcctaa

SEQ ID NO: 4670 - DNA, 464 bp, Homo sapiens
  SIMILAR (29)..(94): 1001254mologous to Homo sapiens HRIHFB2157-like protein,accession number AF113544,Smith-Waterman Score=103.
  misc_feature (1)...(464): n = a,t,c or g
ggtgggaattcgccagcccatcttctccacaggggcttccagcgcccagcagcaactcatgcagcagatgatccagcttttggctggaagtggaaannnnnnnnnnnnnnnnnnnnnnnnnnnnnnnnnnnnnnnnnnnnnnnnnnnnnnnnnnnnnnnnnnnnnnnnnnnnnnnnnnnnnnnnnnnnnnnnnncccagctactgtatcccannnnnnnnnnnnnnnnnnnnnnnnnnnnnnnnnnnnnnnnnnnnnnnnnnnnnnnnnnnnnnnnnnnnnnnnnnnnnnnnnnnnnnnnnnnnnnnnnnnnnnnnnnnnnnnnnnnnnnnnnnnnnnnnnnnnnnnnnnnnnnnnnnnnnnnnnnnnnnnnnnnctctactttattaaacaaaattannnnnnnnnnnnnnnnnnnnnnnnnnnnnnnnnnnnnnnnnnnnnnnnnnnnnnnnnnnnnnttct

SEQ ID NO: 4671 - DNA, 2395 bp, Homo sapiens
  SIMILAR (1055)..(1777): 501254mologous to Homo sapiens A1U,accession number AF188240,Smith-Waterman Score=492.
atggcagaagccgagccgggccggccgggcgagcggggaggaggaggagccgggcgggctggcgggcggccgggtggcggcggcggcatggcggagccgagcggggccgagacgaggccccccattcgggtcaccgtcaagacccccaaggacaaggaggaaattgtgatctgcgatcgagcctcggtcaaggagttcaaagaggaaatctcccggaggtttaaggctcagcaggatcagctggtcctgatcttgtcaggcaagatcctcaaggatggggacacactgaaccagcacggaatcaaggacgggctcactgtccatctggtcatcaagacccctcagaaggctcaagatccagctgctgccactgcttcttccccctccacacctgaccctgcctcagcaccctccaccacgcctgcttcacccaccacccctacccagccctccacctctgacagtgcctcttcggatgctggcagtggaagccggaggagcagtggtggggggccctctccagggactggggagggatcccccagtgctactgcgtccatactctctggctttgggggcatcctggggctgggcagcctgggcctgggctctgccaacttcatggagctgcagcagcagatgcagaggcagctgatgtccaatcctgagatgctgttgcagatcatggagaaccccctggtccaggatatgatgtctaaccctgacctgatgcgtcacatgattattgccaaaccccagatgcagcagttgatggagcggaaccctgagatcagccacatgctcaataaccctgaactcatgaggcagacaatggagcttgctcggaatccagccgtgatgcaagagatgatgcggaaccaggaccgggccctgagcaaccttgagagcatccctggagggtataatgccctccgccgcatgtacacggacatccaggagcccatgttcagtgctgcccgggaacagtttggcaacaatcccttctcttccctggccgggaactccgacagctcatcctcccagcctctgcggactgagaatcgagagcccctccctaacccctggagcccctcgccccccacctcccaggcccccgggtccggtggggagggcaccggaggatcggggaccagccaggtgcacccgacagtcttgaacccctttgggatcaatgcggctagcctgaggtcagggatgttcaatagcccagaaatgcaagccctcctccagcagatctctgagaacccccagctgatgcagaatgtgatctcagcaccctacatgcgcagcatgatgcagacgcttgcccagaaccccgacttcgctgctcagatgatggtgaatgtgccgctcttcgcggggaaacccccaactgcaggagcagctccgcctgcagctcccagtcttcctgcagcagatgcagaacccagagtcactctccatccttaccaatccccgagccatgcaggcattgctgcagatccagcagggactacagaccttgcagaccgaggcccctgggctggtacccagccttgtctccttcgggatgtcccggaccccagcaccctcagcaggcagcaacgcaggggtctaccccccgaggcccccacttcctcacccagccacgcccagccacatcttctccaacaggggcttccagcgccccagcagcaactcatgcagcagatgatcccagcttttggctggaagtggaaactcacaggtgcagacgccagaagtgagatttcagcaagcagctggagcagctcaactccatgggcttcatcaatcgtgaggctaacctgcaggccctgattgccacaggaggggacatcaacgcagctatcgagagactgctgggctcccagctctcctaatccctcggcccatgcctcctgcctctcccctccctcgatgtcagcattcggttcttctgtcaatccttaccctctgcagcttgtcctcccttccgtcttctccctcatcctttccaaacagcagggtgactttagaggcatgggctccaaccccttagctctgtctgagaattatggttttactgctacgtctctaacagactcttctctcctggtctccttgagcagtgctacttaaacagttttcacagtttcattgattgactctacctccttgccccacaccacttttgcaatctttaaactttcagtggctgtgcagagtcgagggaggaaccagctctctggtttactggaacatagtcttccatctataccactagggttttgtcttatgtttacttttggtaactctcttccttctttttctccctaccccccaacccctagcccaaccaatgctagaatttcttggctctgaaggaggagcaggt

SEQ ID NO: 4672 - DNA, 840 bp, Homo sapiens
  SIMILAR (306)..(584): 421254mologous to Homo sapiens HRIHFB2157-like protein,accession number AF113544,Smith-Waterman Score=136.
acacgttaagtgcttaaaacatggcgcgtgacagagtaagttctgtatacctggaaatgttagctgtcctcatcatcatcaaacccaaggctgagcaggctgactcctcatactcttcattacccagagcatagttccatttcctctcactgtcccacttaggccttcaggatactttgagatccccggagaagctggccagatttcctgcagtggtagggggtgcccaggggagtctgaggctgtggggggaattcttagggtgaaaaggcccagggtctccccctgctacctttcaccctgggcagatgatgggtggaatgttgccgctctttcgcgggggaacccccaactgcaggcagcagctccgcctgcagcttcccagtcttcctggcagcagatgcaggaacccagagtcactctccatccttaccaaatcccccgaagccatgcaaggaattgctgcaagatccaagcagggactaacaagaccttgcagaccgaaggcccctgggctggtaccccaggtgagggtaaggggggcaggagggcagcaaggttctagcaacttctccccttcaactcttctctctgccactctctcagcatcctttgtgtctctgagggtctgttttcctgtttcttccaactgcttttccttctggatctcacattctcatccctttcttggatgccatctcctacctcttggtctctcttgcctacagccttggctcctttgggatgtcccggaccccagcaccctcagcaggcagcaacgcagggtctacgccgaggcccccacttcctcaccagccacgccgagccctatgcagtctc

SEQ ID NO: 4673 - DNA, 2507 bp, Homo sapiens
  SIMILAR (1140)..(2504): 761254mologous to Homo sapiens putative p150,accession number U93574,Smith-Waterman Score=1770.
ccagatcgccgcgcgagggtggtgggcatcgaggtcccagcagcggaggagggaggtgccgccgtcgcccaggatgggctgggaatgaagcgatgtagccttttaagagatttgctctgacccatctgaagtccatatggctctgtatgatgaagacctcctgaaaaatcctttctatctggctctgcaaaagtgccgccctgacttgtgcagcaaagtggcccaaatccatggcattgtcttagtaccctgcaaaggaagcctgtcgagcagcatccagtctacttgtcagtttgagtcctacattttgattacctgtggaagagcattttcagaccttaaatggaaagaaggaaaactaccaaacagaaaggaatagcatcaacatcaacaaaaaggacatctacaccaaaacctcatctgtagctcaccaacatcaaagaccaaaggtagataaaaccacaaagatggggagaaaccagagcaaaaaggctgaaaattccaaaaaccagaacgtctcttctcctccaaaggaacacaactcctcgccagcaacagaacaaaactggatggagaatgagtttgatgagttgacagaagtaagcttcagaaggtcagtaataacaaacttctctgagctgaagaagcatgttctaacccatcgtaaggaagctaaaaaccttgaaaaaaggtcagatgaatggctaactagaataaccagtgtagagaagagcttaaatgacctgatggagctgaaaaccacagtacgggaacttcgtgatgcatgcacaagcttcaacagccaattcgatcaagtggaagaaaggatatcagtgattgaaggtcaaattaatgaaataaagcttaaatctcttcaagctcaggaggatgcccgccacagaaacacagatcagaggagctcagagaataggcggtcagagccttggagcttggaggagcggaagcgtgagcagtggaactcactcaagcagaatgcagaccagcaggacacagaagccatgtccgattataagaaacagctccgaaacctgaaggaggagatagctgttctgtctgctgagaaaagtgcactccaaggaaggaccctgaaagaaggatcagagagaaacaagaaatcagaaaggactgggtttcttaagggacagaccccagtgggtctcagggaaaatgaagcaagagtgtttacaacttggaacgccatggccataaataatcatcgggcagtggcaatatttcccaagagacggcatgggcgtgaggacggacttttgtcgaatcttccaacgtttggctcgtatgcgcctttgcgaagggtgtctaatgaattcatagcttctgccgtccaacgaattctccttgagagacgggcgcttcctcatggaaactgtaaacttggaggtttgaccccccaatttatgaaccggaaaaatgctctagtgttggaagttctggccagggcgatcaggcaggagaaggaaataaagggtattcaattaggaaaagaggaagtcaaattgtccctgtttgcagacgacatgattgtttatctagaaaaccccatcgtctcagcccaaaatctccttaagctgataagcaacttcagcaaagtctcaggatacaaaatcaatgtacaaaaatcacaagcattcttatacaccaacaacagacaaacagagagccaaatcatgagtgaactcccattcacaattgcttcaaagagaataaaatacctaggaatccaacttacaagggatgtgaaggacctcttcaaggagaactacaaaccactgctcaatgaaataaaagaggatacaaacaaatggaagaacattccatgctcatgggtaggaagaatcaatatcgtgaaaatggccatactgcccaaggtaatttacagattcaatgccatccccatcaagctaccaatgactttcttcacagaattggaaaaaactactttaaagttcatatggaaccaaaaaagagcccgcatcgccaagtcaatcctaagccaaaagaacaaagctggaggcatcacactacctgacttcaaactacactacaaggctacagtaaccaaaacagcatggtactggttccaaaacacagatatagatcaatggaacagaacagagccctcagaaataatgccgcatatctacaactatctgatctttgacaatcctgaaaaaaacaagcaatggggaacggatttcctatttaataaatggtgctgggaaaactggctagccatatgtagaaagctgaaactggatcccttccttacaccttatacaaaaattaagtcaagatggattaaagacataaatgttagacctaaaaccataaaagccctagaagaaaacctaggcaataccatccaggacataggcatgggcaaggacttcatgtctgaaacaccaaaagcaatgacaacaaaagtgaaaattgacaaatgggatctcattaaactgaagagcttctga

SEQ ID NO: 4674 - DNA, 372 bp, Homo sapiens
  SIMILAR (56)..(367): 361254mologous to Mus musculus Wiscott-Aldrich Syndrome protein homolog,accession number U42471,Smith-Waterman Score=129.
tcagcgtcggcgtcgcgctgcgaccctggaagcgggagccgccgcgagcgagaggaggagctccagtggcggcggcggcggcggcggcggcggcggcggcggcggcggcggcggcagcggcagcgggcagcagctccagcagcgccagcaggcgggatcgaggccgtcaacatggcgagcgcctcgtaccacatttccaatttgctcggggttctcgcagccgcggccctggccgtcacgcaggccttgccccaccccttcggccgtagccggtagcttctctgccccgaagtctccagcccaccggtccgctggcctcccgatccctgcggagcccctttcctctcccctcttgcaaccccctccccccat

SEQ ID NO: 4675 - DNA, 1011 bp, Homo sapiens; identical to SEQ ID NO: 1854
  SIMILAR (71)..(238): 321254mologous to Homo sapiens alpha-2 type VIII collagen,accession number M60832,Smith-Waterman Score=57.

SEQ ID NO: 4676 - DNA, 2622 bp, Homo sapiens
  SIMILAR (304)..(1824): 501254mologous to Homo sapiens repressor transcriptional factor,accession number U35376,Smith-Waterman Score=1333.
atgatcaaaccactgtctcccgtctgggtgactacagttgcccagagcccagactacactagcaagaccctgtctcttaacaacaacaaaaatctcaaagaagtaggggaagactgttttcccttggaacccagccaccagattgtgacagcactcaggccacaaagagaacctggcagtgccagtgtcagtgttcatgctgcctgtcccaaccaaggttccagccaatggccagcatcaaccatcaaacagcagtgtgtccccgagaaagtgtcagagcctttacgtggaccttcccatggaaaaggaaacagaatagtcaatggaaaaggagaagctgtgtattcttattacaaccaaggcattttaccagagcaaggcatacaagattcattcaaaaaagcaacactgggaagatatgggagctgtggccttgaaaatatatgcttatggaaaaactgggaaagtataggtgaaggtgaaggacaaaaggaatgttataatctatgtagccaatatttgacaactagtcataacaaacatttaactgtgaaaggagacaaagaatatagaatatttcagaagaagcctcagtttctgtcagctgctcctacagaaccatgtattcctatgaataaatatcaacataaatttttgaaatctgtcttttgtaataaaaatcagataaattttaaccatgactcaaatattagtaaacatcatagtactcattttctagaaaactattacaattgtaatgaatgtgaaaaagtattttaccaatcctcaaagcttattttccctgaaaatatccatattcaaaaaaagccttacaactctaatgaatgtggtgaaacttctgacccattctcaaagcttactcaacatcaaagaatttatattggagagagctcacaaagatgtaataaaaaatgtataatagtctttagtcaatcacatctaaagggacataagataattaacactggagaaaaatcagtgaaatataaagaacgtggcaaagcttttaccaggggcttacatcttggacatcagaaaattcatactggagagaaaccttacaaatgtaaaaaatgtgacaaagcctttaacaagagttcacaccttgctcaacatcagagaatccatactggagagaagcctttcaagtgtaaggaatgtggcaaagcttttaacagaggctcataccttactcaacatcagagaatccatactggagagagagctttcaaatgtgaagaatgtggcaaagcctttaacagggggtcataccttactcaacaccagagaatccataccggagagaaacctttcagatgtaaggaatgtggcaaagcctttaatagaagctcatacgttactcagcatcagagaatgcatactggagagaaacctttcaagtgtaaggaatgtggcaaagcttttaacagagcttcacaccttactcaacatcagagaatccatactggagagaaacacttcaaatgtaaagaatgtggcaaagcctttaacaggggctcacaccttactcgacatcaaagaatccatactggagagaagtctttcaaatgtgaagaatgtggcaaagcttttatctggggctcacaccttactcaacatcagagagtccatactggagagaaattcttcaaatgtaaagaatgtggcaaagcttttaccaggagctcacaccttactcaacatcagagaattcatactggagagaaacctttcaaatgtaaagaatgtggcaaagcttttaacagacgctcaacccttactcaacatcaaataattcataccagtgcaggcgtggtggggcagcaggaggagcccgtggtgcccaccttccagagctgccacctcttttacctcctcatgttccttcctgtgcacctagagagagttcacccccacccaacagctcctggacctgctgcccaaaagtgcagcatagagagagatgcagcccactcgggggaaagaagtgggaagtacataaaggactttgacttagagcccagtgctgggcccatcatggcaaaacccagtaccaggcagaaacccatggcccctgacctcaggccaggtcctctcacaccactgctagccttccacagtggccttaggccacgagtgaaccccactggcagacaggccatgtcagcctgggccacaagagcacccagggctgtgttggtcctggcagcatgggatttggatgtgacccagatgagcatcagccttggcaaccaagagactgctcctaccttttctcccccagtcctgggcagcacagtgcagagtgactctatccactggcagggagggagagagaaacatcagcaagtctcagggtctctgcctccagcacaggtcctggacttcaccccatctctccatcgttacctccactgccccctaggtcaatccatcaccttcctcaacttcgattcactgccatcacggctctgcccggtaaccgtggatcctactggaacaacaaacaccaaagaacatcccaacattccacctgaaacccagccatcaactggcagcctgaattggtcagttttaccgtcagagaagatttacaaataa

SEQ ID NO: 4677 - DNA, 801 bp, Homo sapiens
  SIMILAR (2)..(52): 941254mologous to Homo sapiens putative p150,accession number U93570,Smith-Waterman Score=77.
atgctcacgggtaggaagaatcaatatcgtgaaaatggccatactgcccaagaaattaattcacgatggattaaagacttacatgttagatctaaaaccataaacaccctagaagaaaaaccaggcaataccattcaggacataggcatgggcagagacttcatgtctaaaacaccaaaagcaatggcaacaaaagctaaaattgacaaatgggatctaattaaactagggaggttctgcacagcaaaagaaaccaccatcagagtgaacaggccacctacagtatgggagaaaagttttgcgacctcctcatctgacaaagggctaatatccagaatctacaatgaactcaaacaaattcacaagaaaaaaacaaacaacaccatcaaaatcattttgcatgaactgtgtgtggattcattgcctacattggatgatgaagtcttgagtgttgctactaagcagtatgtcccggagaaagtgtcagagcctttacgtggaccttctcatgaaaaaggaaacagaatagtcaatggaaaaggaaaagctcaccatgcaccccctgtcctgtacccatatatgacccagaccccaggctccagaagcagacaagcagatgaggagatgaacagaagagcagaattgcagaatgatgtggcagaaaaaagagaaggagcatctgaatgccaagaggagtttggctggcagtggttggagagatcagcctctggatggcaaagctcccggggaagatcatcttcccattccatcccctttccagctccccatccatcccattga

SEQ ID NO: 4678 - DNA, 1495 bp, Homo sapiens
  SIMILAR (388)..(885): 901254mologous to Homo sapiens hypothetical protein,accession number AL136793,Smith-Waterman Score=767.
atgcctgggcggcagcggctaagtctggtagttggccaggcggccaaaggacgggaactggccgttcacgccatcccagtttccacggagaactcaaccatcatggcccctgagaggaccctcaggcctgggctgtgctctgtgcctgcaaacctgacgccatccaggggagctccgccttcccacgccagcgcctcagctgctgcagaaaactgcaaaagtgcagagccagccctggtggcccctgagttcttggaggaggccaagtcacagcaacccctcaagtgggcgggcgatgcacttgaccctgaggacatcaggtaccaggcccgccagctgatgccgacatcggagccgcagctgcagtctagacgtggtgcaccggcattattcggcttcgggagccgcaggagccaaacggcccacggctccatagaacatgtctacacgggttccggataccgaatcccggactccgaactgcagaagatccacagggcagctgccaagggcgaccccgcgggggtggagcgctgcctggcgcgcaggagcggagacctggatgccctggacaagcagcacagaactgctctacacttggcctgtgccagtggccatgtgcaagtggtcactctcctggttaacagaaaatgccagattgatgtctgtgacaaagaaaacagaacgcctttgatacaggctgtccattgccaggaagaggcttgcgccgttattctgctggaacatggcaccaatccaaaccttaaggatatctaccgcaacactgctctccagtatgctgtgtatagtgagagcacctcactggcagaaaaactgcttttccatggtgcaaatattgaagcactggacaagctgtccactccccatcggaggccgagagcagccagccgtgctccctggtccagctcaccaagccccgcagctctcctcctccacggacgggaaagcctgcgctgcgccaccagagtcactcgcctccgccctgtcctcagaggagtagctcccaggctgctgcctccaggacacaggttcctcttcaggggtggggcgctgccccttcccaagtggctcaatttctggcggaacggcctcggggctgtagcccccccaggagctgtccctgtcagcctcctggcagccgtgggccggccggctcccagggcttttctggtcccaggtcccgcgtctggggtaggggctggtggagccggcgagctcttttacgactcgccgtaggcggccgggctgccgggtcccctgcaatcgccttcccctggtgaagacactttgggttttgtggtggttgtggtggttgtggtggttgattgttgttatgagatggagtctcactcttcctgcccagttttgtcaaatgatgagaaatagtgtaatcttctgcatctcgtccacacgtctttagtgaagacatcaatattttgcttaagaaggatattgacaatacctggtgagtcat

SEQ ID NO: 4679 - DNA, 846 bp, Homo sapiens
  SIMILAR (11)..(145): 931254mologous to Homo sapiens hypothetical protein,accession number AL136793,Smith-Waterman Score=211.
atgtctacacgggttcggataccgaatccgggactccgaactgcagaagatccacagggcagctgtcaagggcgacgccgcgggggtggagcgctgcctggcgcgcaggagtggagacctagacgccctgaacaagcagcacagatagcgggggctcagcccagggaagaggcttgcactgttattctgctggaacatggcaccaatccaaaccttaaggatatctaccgcaacactgctctccattatgctgtgtatagtgagagcacctcactggcagaaaaactgcatttccatggtgcaaatattgaagcactggacaaggtattgtcaatatccttcttaagcaaaatattgatgtcttcactaaagacgtgtggacgagatgcagaagattacactatttctcatcatttgacaaaaattcaacaacaaattttggaacgtaaaaagaagatacttaaaaaggagaaacgaggtaaggcttctgagagtgaatttcttaattctcttggtggtcctactcttgataagaaaataagaaatgttgaaatttctgatgaatctgcagtcagcattttgcatgaactgtgtgtggattcattgcctgcattggatgatgaagtcttgagtgttgctactaagtgtgtccccgagaaagtgtcagagcctttatgtagaccttcccatgaaaaaggaaacagaatagtcaatggaaaaggagaaggaagtgaggagtgtctctgcccggctgcccatcgtctgagatgcggggagcgcctctacctgccgccccgtctaggatgtgagcgcctctgcctggccacgaccccgtctgagaagtga

SEQ ID NO: 4680 - DNA, 1050 bp, Homo sapiens
  SIMILAR (307)..(768): 491254mologous to Homo sapiens Human immunogenic prostate tumour protein sequence SEQ ID NO:379,accession number Y82018,Smith -Waterman Score=396.
gcaatatttaaaataaaatcttagacaattatttcaaaataatttgcatttgcattcagggaatggttgagcttccaaatataaaaaattgacccttacctgtgtcaatgttaaaacaaatattttggaaagaaagttgattgatctataccttgtccagtgcttcaatatttgcaccatggaaatgcagtttttctgccagtgaggtgctctcactatacacagcataatggagagcagtgttgcggtagatatccttaaggtttggattggtgccatgttccagcagaataacagtgcaagcctctcctggttagcagaaaatgccagattgatatctgtgacaaagaaaatagaacgcctaaaatacaggaagaggcttgtgccgttattctgctggaacatggtgccaatccaaaccttaaggatatctacggcaacactgctctccattatgctgtgtatagtgagagcacctcactggcagaaaaactgcttttccatggtgaaaatattgaagcactggacaaggacagtaataccccacttttattcgctataatttgcaagaaagagaaaatggtggaatttttattgaaaaagaaagcaagtacacatgccgttgataggctgagacggtcagctctcatgcttgctgtatactatgactcaccaggtattgtcagtatccttcttaagcaaaatattgatgtcttcgctcaagacatgtgtggacgagatgcagaagattacgctatttctcatcatttgacaagaaatgagtggtcaggcagagttagtgatgatggagtttgtgatggtggtgatggtggcgatgatgatgatagtaaggaggatgatgatggtggtgatagtgatgataatgatggtgatgggtgtgatgacaatgatggtgtggccatgttggtgataatggtgctggtggtgatgatagtggttgagatgatgggtgataatgctggcatggtggtgttggtggtgatggtggtggtgatgatgacagtggttgagatgatgatgacaataatg

SEQ ID NO: 4681 - DNA, 735 bp, Homo sapiens
  SIMILAR (293)..(556): 971254mologous to Homo sapiens actin-binding protein homolog ABP-278,accession number AF043045,Smith-Waterman Score=461.
gtgtgccactgcacctggccattattatggaaaattttaggcatatacaaaagtagagacaggggtgtcttacatgctcatgaacccatgatccagtgacatccgttaatggcattttggaatcatatttcatctgtttttgtcctcaaatgttttgaagcaaatttcagcattacatcatttcactcttaaatatctcagtatggttctctaatagttgaagactccatttacatttatataaggagcataatttacacttgtgtaacccaaaggaatgaccaagcctgtgcttctctccccagatagcaaagccattgtggatgggaacctgaagctcatcttgggtctggtgtggacgctgatcctccactactccatctccatgcccgtgtgggaggatgaaggggatgatgatgccaagaagcagacgccaaagcagaggctgctggggtggattcagaacaagatcccctacttgcccatcaccaactttaaccagaactggcaagacggcaaagccctgggagccctggtagacagctgtgctccaggtaagagggcagggcttgcctaaacattttgtcaagatggggggggtggggcccacaattctggtttaaaggggatgcgttctttgctttagtaacggatttctccgggcctttccctttatagccctttttagggaaaaaaaatggggttggggccctccagggccaattttagttttct

SEQ ID NO: 4682 - DNA, 9475 bp, Homo sapiens
  SIMILAR (167)..(7972): 1001254mologous to Homo sapiens actin-binding protein homolog ABP-278,accession number AF043045,Smith-Waterman Score=13720.
ggcggccaggggcgggcggccgcagagcagcaccggccgtggctccggtagcagcaagttcgaaccccgctcccgctccgcttcggttctcgctccttcggcccttgggcctccaaacaccagtccccggcagctcgttgcgcattgcgctctccccgccaccaggatgccggtaaccgagaaggatctagctgaggacgcgccttggaagaagatccagcagaacacgttcacacgctggtgcaacgagcacctcaagtgcgtgaacaaacgcatcggcaacctgcagaccgacctgagcgacgggctgcggctcatcgcgctgctcgaggtgctcagccagaagcgcatgtaccgcaagtaccatcagcggcccacctttcgccagatgcagctcgagaatgtgtccgtggcgctcgagttcctggaccgtgagagcatcaagctcgtgtccatcgatagcaaagccattgtggatgggaacctgaagctcatcttgggtctggtgtggacgctgatcctccactactccatctccatgcccgtgtgggaggatgaaggggatgatgatgccaagaagcagacgccaaagcagaggctgctggggtggattcagaacaagatcccctacttgcccatcaccaactttaaccagaactggcaagacggcaaagccctgggagccctggtagacagctgtgctccaggtctgtgcccagactgggaatcctgggacccgcagaagcctgtggataatgcacgagaagccatgcagcaggcagatgactggctgggtgtcccacaggtcatcactcctgaagaaatcattcacccggatgtggacgagcactcagttatgacttacctgtcccagttccccaaagccaagctcaagccgggggctcctctcaaacccaaactcaacccgaagaaagccagggcctatggcagaggaatcgagcccactggaaacatggtgaagcagccagccaagttcactgtggacaccatcagcgccgggcaaggagacgtgatggtgtttgttgaggacccagaagggaacaaagaggaggcacaagtgacccctgacagtgacaagaacaagacatactctgtggagtatctgcccaaggtcaccgggctacacaaagtcacagtcctctttgcaggacagcacatctccaagagcccatttgaagtgagtgttgacaaggcccagggagatgccagtaaagtcactgcaaaaggtccagggttggaagctgtagggaacatcgccaataagcccacctactttgacatctatacggcaggagctggtgtgggtgacattggtgtggaggtggaagatccccaggggaagaacaccgtggagttgctcgtggaagacaaaggaaaccaggtgtatcgatgtgtgtacaaacccatgcagcctggccctcacgtggtcaagatcttctttgctggggacactattcctaagagtcccttcgttgtgcaggttggggaagcctgcaatccaaatgcctgccgggccagtggccgaggcctacaacccaaaggcgtccgtatccgggagaccacagatttcaaggttgacaccaaagctgcaggaagtggggagctcggtgtaaccatgaagggtcctaagggtctggaggagctggtgaagcagaaagactttctggatggggtctacgcattcgagtattaccccagcaccccggggagatacagcattgccatcacatgggggggacaccacattccaaagagcccctttgaagttcaagttggccctgaagcgggtatgcagaaagtccgtgcttggggccctgggctccatggtgggattgtcgggcggtcagcggacttcgtggtagaatccattggctctgaagtggggtctctggggtttgccattgaaggcccctctcaggcaaagattgagtacaacgaccagaatgatggatcgtgtgatgtcaaatactggcccaaggagcctggcgaatatgctgttcacatcatgtgtgacgacgaagacatcaaggacagcccgtacatggccttcatccacccagccacgggaggctacaaccctgatctggttcgagcatacgggccaggtttggagaaatctggatgcattgtcaacaacctggccgagttcactgtggatcctaaggatgctggaaaagctcccttaaagatatttgctcaggatggggaaggccaacgcattgacatccagatgaagaaccggatggacggcacatatgcatgctcatacaccccggtgaaggccatcaagcacaccattgctgtggtctggggaggcgtgaacatcccgcacagcccctacagggtcaacatcgggcaaggtagccatcctcagaaggtcaaagtgtttgggccaggtgtggagagaagtggtctgaaggcaaatgaacctacacacttcacggtggactgtactgaggctggggaaggtgatgtcagtgttggcattaagtgtgatgcccgggtgttaagtgaagatgaggaagacgtggattttgacattattcacaatgccaatgatacgttcacagtcaaatatgtgcctcctgctgctgggcgatacactatcaaagttctctttgcatctcaggaaatccccgccagccctttcagagtcaaagttgacccttcccacgatgccagcaaagtgaaggcagaaggcccagggctcagcaaagcaggtgtggaaaatgggaaaccgacccacttcactgtctacaccaagggggctgggaaagccccgctcaacgtgcagttcaacagccctcttcctggcgatgcagtgaaggatttggatatcatcgataattatgactactctcacacggttaaatatacacccacccaacagggcaacatgcaggttctggtgacttacggtggcgatcccatccctaaaagccctttcactgtgggtgttgctgcaccgctggatctgagcaagataaaactcaatgggctggaaaacagggtggaagttgggaaggatcaggagttcaccgttgataccaggggggcaggaggccaggggaagctggacgtgacaatcctcagcccctctcggaaggtcgtgccatgcctagtgacacctgtgacaggccgggagaacagcacggccaagttcatccctcgggaggaggggctgtatgctgtagacgtgacctacgatggacaccctgtgcccgggagcccctacacagtggaggcctcgctgccaccagatcccagcaaggtgaaggcccacggtcccggcctcgaaggtggtctcgtgggcaagcctgccgagttcaccatcgataccaaaggagctggtactggaggtctgggcttaacggtggaaggtccgtgcgaggccaaaatcgagtgctccgacaatggtgatgggacctgctccgtctcttaccttcccacaaaacccggggagtacttcgtcaacatcctctttgaagaagtccacatacctgggtctcccttcaaagctgacattgaaatgccctttgacccctctaaagtcgtggcatcggggccaggtctcgagcacgggaaggtgggtgaagctggcctccttagcgtcgactgctcggaagcgggaccgggggccctgggcctggaagctgtctcggactcgggaacaaaagccgaagtcagtattcagaacaacaaagatggcacctacgcggtgacctacgtgcccctgacggccggcatgtacacgttgaccatgaagtatggtggcgaactcgtgccacacttccccgcccgggtcaaggtggagcccgccgtggacaccagcaggatcaaagtctttggaccaggaatagaagggaaagatgtgttccgggaagctaccaccgactttacagttgactctcggccgctgacccaggttgggggtgaccacatcaaggcccacattgccaacccctcaggggcctccaccgagtgctttgtcacagacaatgcggatgggacctaccaggtggaatacacaccctttgagaaaggtctccatgtagtggaggtgacatatgatgacgtgcctatcccaaacagtcccttcaaggtggctgtcactgaaggctgccagccatctagggtgcaagcccaaggacctggattgaaagaggcctttaccaacaagcccaatgtcttcaccgtggttaccagaggcgcaggaattggtgggcttggcataactgttgagggaccatcagagtcgaagataaattgcagagacaacaaggatggcagctgcagtgctgagtacattcctttcgcgccgggggattacgatgttaatatcacatatggaggagcccacatccccggcagccccttcagggttcctgtgaaggatgttgtggaccccagcaaggtcaagattgccggccccgggctgggctcaggcgtccgagcccgtgtcctgcagtccttcacggtggacagcagcaaggctggcctggctccgctggaagtgagggttctgggcccacgaggcttggtggagccagtgaacgtggtggacaatggagatggcacacacacagtaacctacaccccatctcaggagggaccttacatggtctcagttaaatatgctgatgaagagattcctcgcagtcccttcaaggtcaaggtccttcccacatatgatgccagcaaagtgactgccagtggccccggccttagttcctatggtgtgcctgccagtctacctgtggactttgcaattgatgcccgagatgccggggaaggcctgcttgctgttcaaataacggaccaagaaggaaaacccaaaagagccattgtccatgacaataaagatggcacgtatgctgtcacctacatccccgacaagactgggcgctatatgattggagtcacctacgggggtgacgacatcccactttctccttatcgcatccgagccacacagacgggtgatgccagcaagtgcctggccacgggtcctggaatcgcctccactgtgaaaactggcgaagaagtaggctttgtggttgatgccaagactgccgggaagggtaaagtgacctgcacggttctgaccccagatggcactgaggccgaggccgatgtcattgagaatgaagatggaacctatgacatcttctacacagctgccaagccgggcacatatgtgatctatgtgcgcttcggtggtgttgatattcctaacagccccttcactgtcatggccacagatggggaagtcacagccgtggaggaggcaccggtaaatgcatgtccccctggattcaggccctgggtgaccgaagaggcctatgtcccagtgagtgacatgaacggcctgggatttaagccttttgacctggtcattccgtttgctgtcaggaaaggagaaatcactggagaggtccacatgccttctgggaagacagccacacctgagattgtggacaacaaggacggcacggtcactgttagatatgcccccactgaggtcgggctccatgagatgcacatcaaatacatgggcagccacatccctgagagcccactccagttctacgtgaactaccccaacagtggaagtgtttctgcatacggtccaggcctcgtgtatggagtggccaacaaaactgccaccttcaccatcgtcacagaggatgcaggagaaggtggtctggacttggctattgagggcccctcaaaagcagaaatcagctgcattgacaataaagatgggacatgcacagtgacctacctgccgactctgccaggcgactacagcattctggtcaagtacaatgacaagcacatccctggcagccccttcacagccaagatcacagatgacagcaggcggtgctcccaggtgaagttgggctcagccgctgacttcctgctcgacatcagtgagactgacctcagcagcctgacggccagcattaaggccccatctggccgagacgagccctgtctcctgaagaggctgcccaacaaccacattggcatctccttcatcccccgggaagtgggcgaacatctggtcagcatcaagaaaaatggcaaccatgtggccaacagccccgtgtctatcatggtggtccagtcggagattggtgacgcccgccgagccagagtctatggccgcggcctgtcagaaggccggactttcgagatgtctgacttcatcgtggacacaagggatgcaggttatggtggcatatccttggcggtggaaggccccagcaaagtggacatccagacggaggacctggaagatggcacctgcaaagtctcctacttccctaccgtgcctggggtttatatcgtctccaccaaattcgctgacgagcacgtgcctgggagcccatttaccgtgaagatcagtggggagggaagagtcaaagagagcatcacccgcaccagtcgggccccgtccgtggccactgtcgggagcatttgtgacctgaacctgaaaatcccagaaatcaacagcagtgatatgtcggcccacgtcaccagcccctctggccgtgtgactgaggcagagattgtgcccatggggaagaactcacactgcgtccggtttgtgccccaggagatgggcgtgcacacggtcagcgtcaagtaccgtgggcagcacgtcaccggcagccccttccagttcaccgtggggccacttggtgaaggaggcgcccacaaggtgcgggcaggaggccctggcctggagagaggagaagcgggagtcccagctgagttcagcatttggacccgggaagcaggcgctggaggcctctccatcgctgttgagggccccagtaaggccgagattacattcgatgaccataaaaatgggtcgtgcggtgtatcttatattgcccaagagcctggtaactacgaggtgtccatcaagttcaatgatgagcacatcccggaaagcccctacctggtgccggtcatcgcaccctccgacgacgcccgccgcctcactgttatgagccttcaggaatcgggattaaaagttaaccagccagcatcctttgctataaggttgaatggcgcaaaaggcaagattgatgcaaaggtgcacagcccctctggagccgtggaggagtgccacgtgtctgagctggagccagataagtatgctgttcgcttcatccctcatgagaatggtgtccacaccatcgatgtcaagttcaatgggagccacgtggttggaagccccttcaaagtgcgcgttggggagcctggacaagcggggaaccctgccctggtgtccgcctatggcacgggactcgaagggggcaccacaggtatccagtcggaattctttattaacaccacccgagcaggtccagggacattatccgtcaccatcgaaggcccatccaaggttaaaatggattgccaggaaacacctgaagggtacaaagtcatgtacacccccatggctcctggtaactacctgatcagtgtcaaatacggtgggcccaaccacatcgtgggcagtcccttcaaggccaaggtgacaggccagcgtctagttagccctggctcagccaacgagacctcatccatcctggtggagtcagtgaccaggtcgtctacagagacctgctatagcgccattcccaaggcatcctcggacgccagcaaggtgacctctaagggggcagggctctcaaaggcctttgtgggccagaagagttccttcctggtggactgcagcaaagctggctccaacatgctgctgatcggggtccatgggcccaccaccccctgcgaggaggtctccatgaagcatgtaggcaaccagcaatacaacgtcacatacgtcgtcaaggagaggggcgattatgtgctggctgtgaagtggggggaggaacacatccctggcagcccttttcatgtcacagtgccttaaaacagttttctcaaatcctggagagagttcttgtggttgcctttgttgcttgtttgtaattcattttatacaaagccctccagcctgtttgtggggctgaaaccccatccctaaaatattgctgttgtaaaatgccttcagaaataagtcctagactggactcttgagggacatattggagaatcttaagaaatgcaagcttgttcagggggctgagaagatcctgagtacactaggtgcaaaccagaactcttggtggaacagaccagccactgcagcagacagaccaggaacacaatgagactgacatttcaaaaaaacaaaactggctagcctgagctgctggttcactcttcagcatttatgaaacaaggctaggggaagatgggcagagaaaaaggggacacctagtttggttgtcatttggcaaaggagatgacttaaaaatccgcttaatctcttccagtgtccgtgttaatgtatttggctattagatcactagcactgctttaccgctcctcatcgccaacacccccatgctctgtggccttcttacacttctcagagggcagagtggcagccgggcaccctacagaaactcagagggcagagtggcagccaggcccacatgtctctcaagtacctgtcccctcgctctggtgattatttcttgcagaatcaccacacgagaccatcccggcagtcatggttttgctttagttttccaagtccgtttcagtcccttccttggtctgaagaaattctgcagtggcgagcagtttcccacttgccaaagatcccttttaaccaacactagcccttgtttttaacacacgctccagcccttcatcagcctgggcagtcttaccaaaatgtttaaagtgatctcagaggggcccatggattaacgccctcatcccaaggtccgtcccatgacataacactccacacccgccccagccaacttcatgggtcactttttctggaaaataatgatctgtacagacaggacagaatgaaactcctgcggctctttggcctgaaagttgggaatggttgggggagagaagggcagcagcttattggtggtcttttcaccattggcagaaacagtgagagctgtgtggtgcagaaatccagaaatgaggtgtagggaattttgcctgccttcctgcagacctgagctggctttggaatgaggttaaagtgtcagggacgttgcctgagcccaaatgtgtagtgtggtctgggcaggcagacctttaggttttgctgcttagtcctgaggaagtggccactcttgtggcaggtgtagtatctggggcgagtgttgggggtaaaagcccaccctacagaaagtggaacagcccggagcctgatgtgaaaggaccacgggtgttgtaagctgggacacggaagccaaactggaatcaaacgccgactgtaaattgtatcttataacttattaaataaaacatttgctccgtaaaaaaaaaaaaa

SEQ ID NO: 4683 - DNA, 316 bp, Homo sapiens
  SIMILAR (2)..(316): 1001254mologous to Bos taurus VSGP/F-spondin,accession number AB051389,Smith-Waterman Score=575.
cgtgattctgaaggccagcatcgtacaaaaacgcattatttattttcaagatgagggctctctgaccaagaaactttgtgaacaagattccacatttgatggggtgactgacaaacccatcttagactgctgtgcctgcggaactgccaagtacagactcacattttatgggaattggtccgagaagacacacccaaaggattaccctcgtcgggccaaccactggtctgcgatcatcggaggatcccactccaagaattatgtactgtgggaatatggaggatatgccagcgaaggcgtcaaacaagttgcagaa

SEQ ID NO: 4684 - DNA, 420 bp, Homo sapiens
  SIMILAR (115)..(201): 891254mologous to Rattus norvegicus f-spondin,accession number M88469,Smith-Waterman Score=129.
tcacttttcttctcccgtgggcccactgtcttgggcttcctggatacttgttaactcttgaacatacctccatttcttgagacccaccactgtgcttgggtcttctttcttcacagggccagcatcgtacaaaaacgcattatttattttcaagatgagggctctctgaccaagaaactttgtgaacaaggtaagaccctgaaacacagtcaacaaatgtttttcaagtagacagaggcaagctgatccacttctctgctgttgttcacttctcgacccccaccaaaatggctcttgagtcttgacagtttctgcaatggcctccgcgttgtccgtgcacactccatcatcttgcacacattcctcagtatcgcagagggagctgaccactccctgattcctagaatattctcttctcat

SEQ ID NO: 4685 - DNA, 1045 bp, Homo sapiens
  SIMILAR (55)..(483): 741254mologous to Rattus norvegicus transcription factor,accession number L14610,Smith-Waterman Score=494.
atggagttagaatggaaagtaaatgtaaaagttaatagccaagataccaaccatcacggcagtttgcaacttgcacggggagaagctgcagctgtgaagtttgggaggatgtccaagaagcaaagggacagcctgtatgctgaggtgcagaagcaccagcagcggctgcaggaacagcggcagcagcagagtggggaggcagaagcccttgccagggtgtacagcagcagcattagcaacggcctgagcaacctgaacaacgagaccagcggcacttatgccaacgggcacgtcattgacctgcccaagtctgagggttattacaacgtcgattccggtcagccgtcccctgatcagtcaggacttgacatgacctggaatcaaacagataaagcaagaacctatctatgacctcacatccgtacccaacttgtttacctataggctctttcaacaattgggcagttagcaccagggataacccatgactgaaatcgaaattgttgctgctgagaaatttcccttgatttataagcagtcctttttgctcactgtgctctcttttggtggtggtggctctgtgatctgtggacctacctttgccaaggtctcatcatccagaagatttatacaccacggtgacaaaattcagcccagcatcaatgccttaggttggacctttatggaagagacaccccaaatcttcaaatgccgaacaaatactcatggaaaagaactcgaacatgatcttcctgaacacagttcaggtcaggggtctacaagaagaaaaagcagctgtttgagaagagataataatcctatgcttctctccggtgggcggttttatgagaaaattcacaattttataactggtacatttgatgttagaaaaatggaacatgcagagggtaaaactagtgatcttgttcatgtgggcttccaggccatcaagatgccctccagcctaaagcaggaagccagcaatggtttgatcaaattggaagaagcttcaggagcacgaatgaaaacagggcacataaagtga

SEQ ID NO: 4686 - DNA, 925 bp, Homo sapiens
  SIMILAR (54)..(509): 1001254mologous to Homo sapiens multilineage-colony stimulating factor precursor,accession number M17115,Smith-Waterman Score=783.
cagagccccacgaaggaccagaacaagacagagtgcctcctgccgatccaaacatgagccgcctgcccgtcctgctcctgctccaactcctggtccgccccggactccaagctcccatgacccagacaacgcccttgaagacaagctgggttaactgctctaacatgatcgatgaaattataacacacttaaagcagccacctttgcctttgctggacttcaacaacctcaatggggaagaccaagacattctgatggaaaataaccttcgaaggccaaacctggaggcattcaacagggctgtcaagagtttacagaacgcatcagcaattgagagcattcttaaaaatctcctgccatgtctgcccctggccacggccgcacccacgcgacatccaatccatatcaaggacggtgactggaatgaattccggaggaaactgacgttctatctgaaaacccttgagaatgcgcaggctcaacagacgactttgagcctcgcgatcttttgagtccaacgtccagctcgttctctgggccttctcaccacagagcctcgggacatcaaaaacagcagaacttctgaaacctctgggtcatctctcacacattccaggaccagaagcatttcaccttttcctgcggcatcagatgaattgttaattatctaatttctgaaatgtgcagctcccatttggccttgtgcggttgtgttctcatttttatcccattgagactatttatttatgtatgtatgtatttatttatttattgcctggagtgtgaactgtatttattttagcagaggagccatgtcctgctgcttctgcaaaaaactcagagtggggtggggagcatgttcatttgtacctcgagttttaaactggttcctagggatgtgtgagaataaactagactctgaaca

SEQ ID NO: 4687 - DNA, 1797 bp, Homo sapiens
  SIMILAR (847)..(1683): 981254mologous to Homo sapiens Amino acid sequence of protein PRO330,accession number Y13400,Smith-Waterman Score=1467.
atgaagggcgcgggcggccagctccggctccggctccggctccggctcccgcgaggccggacacttccctctgtgaccatgaaactctgggtgtctgcattgctgatggcctggtttggtgtcctgagctgtgtgcaggccgaattcttcacctctattgggcacatgactgacctgatttatgcagagaaagagctggtgcagtctctgaaagagtacatccttgtggaggaagccaagctttccaagattaagagctgggccaacaaaatggaagccttgactagcaagtcagctgctgatgctgagggctacctggctcaccctgtgaatgcctacaaactggtgaagcggctaaacacagactggcctgcgctggaggaccttgtcctgcaggactcagctgcaggttttatcgccaacctctctgtgcagcggcagttcttccccactgatgaggacgagataggagctgccaaagccctgatgagacttcaggacacatacaggctggacccaggcacaatttccagaggggaacttccaggaaccaagtaccaggcaatgctgagtgtggatgactgctttgggatgggccgctcggcctacaatgaaggggactattatcatacggtgttgtggatggagcaggtgctaaagcagcttgatgccggggaggaggccaccacaaccaagtcacaggtgctggactacctcagctatgctgtcttccagttgggtgatctgcaccgtgccctggagctcacccgccgcctgctctcccttggtaaggagattctaggggaagttacgaccaacgtactctggttagatgctgtggaaggtagaatgcagcatgcagacccaagccacgaacgagctggagggaatctgcggtactttgagcagttattggaggaagagagagaaaaaacgttaacaaatcagacagaagctgagctagcaaccccagaaggcatctatgagaggcctgtggactacctgcctgagagggatgtttacgagagcctctgtcgtggggagggtgtcaaactgacaccccgtagacagaagaggcttttctgtaggtaccaccatggcaacagggccccacagctgctcattgcccccttcaaagaggaggacgagtgggacagcccgcacatcgtcaggtactacgatgtcatgtctgatgaggaaatcgagaggatcaaggagatcgcaaaacctaaacttgcacgagccaccgttcgtgatcccaagacaggagtcctcactgtcgccagctaccgggtttccaaaagctcctggctagaggaagatgatgaccctgttgtggcccgagtaaatcgtcggatgcagcatatcacagggttaacagtaaagactgcagaattgttacaggttgcaaattatggagtgggaggacagtatgaaccgcacttcgacttctctaggcgaccttttgacagcggcctcaaaacagaggggaataggttagcgacgtttcttaactacatgagtgatgtagaagctggtggtgccaccgtcttccctgatctgggggctgcaatttggcctaagaagggtacagctgtgttctggtacaacctcttgcggagcggggaaggtgactaccgaacaagacatgctgcctgccctgtgcttgtgggctgcaagtggggtttttttctgctgttattaccatccagccatgtaatgtccatgcagctggtaaatgccaaggcagctggttggaaacactcagagatacacaggaagctgaagaaggcctga

SEQ ID NO: 4688 - DNA, 1797 bp, Homo sapiens
  SIMILAR (961)..(1797): 961254mologous to Homo sapiens prolyl 4-hydroxylase alpha (II) subunit,accession number U90441,Smith-Waterman Score=1441.
ggggaaggaacactgtaggggatagctgtccacggacgctgtctacaagaccctggagtgagataacgtgcctggtactgtgccctgcatgtgtaagatgcccagttgaccttcgcagcaggagcctggatcaggcacttcctgcctcaggtattgctggacagcccagacacttccctctgtgaccatgaaactctgggtgtctgcattgctgatggcctggtttggtgtcctgagctgtgtgcaggccgaattcttcacctctattgggcacatgactgacctgatttatgcagagaaagagctggtgcagtctctgaaagagtacatccttgtggaggaagccaagctttccaagattaagagctgggccaacaaaatggaagccttgactagcaagtcagctgctgatgctgagggctacctggctcaccctgtgaatgcctacaaactggtgaagcggctaaacacagactggcctgcgctggaggaccttgtcctgcaggactcagctgcaggttttatcgccaacctctctgtgcagcggcagttcttccccactgatgaggacgagataggagctgccaaagccctgatgagacttcaggacacatacaggctggacccaggcacaatttccagaggggaacttccaggaaccaagtaccaggcaatgctgagtgtggatgactgctttgggatgggccgctcggcctacaatgaaggggactattatcatacggtgttgtggatggagcaggtgctaaagcagcttgatgccggggaggaggccaccacaaccaagtcacaggtgctggactacctcagctatgctgtcttccagttgggtgatctgcaccgtgccctggagctcacccgccgccatgctctcccttgacccaagccacgaacgagctggagggaatcctgccggtactttgagcagttattggaggaagagagagaaaaaaccgttaacaaatcagacagaagcttgagctaacaaccccagaaggcatctatgagaggcctgtggactacctgcctgagagggatgtttacgagagcctctgtcgtggggagggtgtcaaactgacaccccgtagacagaagaggcttttctgtaggtaccaccatggcaacagggccccacagctgctcattgcccccttcaaagaggaggacgagtgggacagcccgcacatcgtcaggtactacgatgtcatgtctgatgaggaaatcgagaggatcaaggagatcgcaaaacctaaacttgcacgagccaccgttcgtgatcccaagacaggagtcctcactgtcgccagctaccgggtttccaaaagctcctggctagaggaagatgatgaccctgttgtggcccgagtaaatcgtcggatgcagcatatcacagggttaacagtaaagactgcagaattgttacaggttgcaaattatggagtgggaggacagtatgaaccgcacttcgacttctctaggaatgatgagcgagatactttcaagcatttagggacggggaatcgtgtggctactttcttaaactacatgagtgatgtagaagctggtggtgccaccgtcttccctgatctgggggctgcaatttggcctaagaagggtacagctgtgttctggtacaacctcttgcggagcggggaaggtgactaccgaacaagacatgctgcctgccctgtgcttgtgggctgcaagtgggtctccaataagtggttccatgaacgaggacaggagttcttgagaccttgtggatcaacagaagttgac

SEQ ID NO: 4689 - DNA, 2433 bp, Homo sapiens
  SIMILAR (13)..(150): 891254mologous to Homo sapiens human RAD50 G65 variant,accession number W22781,Smith-Waterman Score=219.
atgctaagcacaggaaccaagtaccaggcaatgctgagtgtggatgactgctttgggatgggccgctcggtctacaatgaagggggctattatcatacggtgttgtggatggagcaggtgctaaaggagcttgatgccgtggaggtggcaccacaaccaagaaaaggtgaaatgcttctggtcctggaatgtgtgagagatgacccagaggtttcagaagttctgctgtttttgatgtcccgaggctctgtgaagcagcatttttgcacagattatgaacttatttggcataaccggagctttccttcatcggccctcaaaccccgtctagggagcagtgtgttgggggcgttcagcgttcgggctgggggcttggtcctaagagagcttgcactgtggatgatgtccgccctctttgcgcccgcaaaacaaagacgagttctgagtttcaggagggacctggacgaggcaagcacagcactctgctttcggcgcctgtcgcctcgagtttggggacgagctgacgctagtctttggggctccctgcagccgacaaagcggcgccaaccccaggcctgccacctgaggactttgtgcccgcaactcttgcgggagcggaaagccgccgaggcagtgtcgcttccgccgagctttcctccagtgaaaaacagcgccggcagcttggtctgttaccttcgtaaatttgttgcaagcctgtgcaccaggaattgtactagatggggcccccgagatacaaacatccgtccaggttctctgggccaaacagtaaacagaatttcaataggtggtgaagtaactgccagccaaaatgttcaccgggaatgggcctgtgtcacaatctgtgaggggaaaagacggatcaatgtagccgccgcacgtctagccatcttgggcccggactctgggccatggcttgggagggctctgacctctggctggagtccccataggactcctccagtggaaaggggtggttactttgcccgggcctgtctctataagctggccaaaactggctggcttgaggtctatggctatttatcagcgaagcaagtaaggccaattctctgtcccatcagaattgtggcaggaccatggtgggcagccagcagatcggtcggctggtgtcaagtagtagtctatcagggtcaacaggaaatttccagctgtagtttctgtgatgtttttcaggacctggtttctgcttacaggaaagaaaaccttatggtagttagtaacacagggatacatgaccaagccctcatcttgctgtggccgttagattctggttttgagcaggtttgcccctctgaggttcggactacactcctatatgtagcccccagaagacaccaggagcttcaggctggctccagggctgttgctgcatccatctcagtggcacctggaacaccagcaagacagaacggttcactaccctggaaagggggcttaagccagggagccaagtggtctagctcagtgggtcccacccccatggaagcccgtaagtctagtgttaactctgtggacactgtaggctctcataggtcaacagcagaacttgaccgctttctgccggagggagagcagcttaaggctgcagctgctgtgccgcctgacctccagaggggggattcaggagaaacccttttttatatctcttttgtccctggtttcaaggcgtttcactactttgagctttttcatttcgatgggctagcggtcttgactatatcggcactgtgctctaaagttgcagaatccagaaataaagacaaatacttacagccaactgatcttcgacaaagcaaacaaaaatataagcaaatggtctccatgtctctgcctatgagtgtgggccttgtgctccctgtcccccaccccatgggaccaccagaagttagctctccgagtgcaaggggcctccaggtgatcagcatttcccaacttcctgaccccaagacaatggaaaatgctaggatagcaggaacagatatgggttcaaattctggttctgcggtcactgattgtgtggactgggctgaccactggtctcccagatctcaggtccccagagataacaagaaccctcatcaagggttggacagctaccacacagacatgtaccgctgccagatctgtctcctgtacatgcagactctgaaactccaaaacttcccgtgggcctcacgctctgaagatctgctcctttgtcccctgggtcctcaacttagccatgtggacagtgattctaactcctcttactcacattcaaagcacactttgccttgcatcccagaaaatgaagccgagttgattgtggtggataacctttctgatgtgctgctagatttggtttgccagtattttattgagggttttcgcattgatgttcatcagggatattag

SEQ ID NO: 4690 - DNA, 1081 bp, Homo sapiens
  SIMILAR (683)..(982): 541254mologous to Xenopus laevis transcription co-repressor Sin3,accession number AF154112,Smith-Waterman Score=280.
atgaacaccaggccgggtgtggtggctcacgcctgtaatcccagcactttgggaggccaaggcgaggaacaagattccctggacacctccagtgagatcaggtgtctggaggttgctgagcagcgcaagctcctatttacgggcctcgtgtcgggggtcgtccttgtgttccccctgaattccaggcaggacgtgatatgcattccccctcccgaggcccggaaagcaatcaactgcatgtccctgagcaagtgcgaggaccgcctggccatcgcctatgacaacatcgtcctggtgctggacatcacctccggggacccctgcccggtcatcgatgggccaagatacaccttttacactcagctgcccgagaccctctccagcgtggccattctgacggactaccgcgtggtctacagcatgaccaatggggacctcttttctttacgagtgtgcaaacttccaaagcgtttcccttggagacccacaggagccgagttgcctgtgtggaggtcagccacaaggagcagctggtgggtcaagcgggtctgaggatgccctgctgtgtctctgggacctgcaggcacgcaagtggaaattcgagatgagctacacgtcagggaacatcaggggttccagcttctgccagtttaagtcatcttttctggtgtatttcaaagccttactgaaatttcgagaactcttcgcccagttcaagtctttcatgggggaaaagaagctgtccttggcgccacccatgagcgacagttccggggatgggataatccggaaaattgattatgcttcgtgcaagcgcagtggcatccagtatccgggcactccccaaaacctaccagcagcccaagtactgaacgacacctgggtctccttcccttcctggtctgaggactccacgttcgtcagctccaagaagacaccgtacgaggagcagcttcaccgctgtgaggacgagcgcttcgaggaaatgaagacagcaggttttgcctcctttggggaacgatctaagacaggggtccccaacctccgggtcacagactggtaccggttggtggcctgttag

SEQ ID NO: 4691 - DNA, 427 bp, Homo sapiens
  SIMILAR (245)..(337): 1001254mologous to Oryctolagus cuniculus sarcolumenin precursor,accession number M25750,Smith-Waterman Score=159.
atggggctagctcagaagaagcagagggcgcctccgaggggccacggagccccaggaggctggggagccccaggaagccagggagcccaggaaggcggggatctgcaggaagccgaggagtcccaggaaggcggggaccccaggaagccgaggagccccaggaaggtggagcgccacaggaaggcgggagccccaggaagagacctggggaggccttctctgaccgtgctgctgagaccactgcgtgctgcagcggcttcggaagatctaccactcatccatcaagcctctggagcagtcctacaagtacaatgagctccggcagcatgagatcacaggccagcggtgcccctgctgtgaggagccgaaaccacagcaccaggaaagggccctgtttgtggttgtctcggagaaccggaacatctag

SEQ ID NO: 4692 - DNA, 1056 bp, Homo sapiens
  SIMILAR (1)..(1008): 991254mologous to Escherichia coli hisB protein,accession number X03416,Smith-Waterman Score=1758.
atgagtcagaagtatctttttatcgatcgcgatggaaccctgattagcgaaccgccgagtgattttcaggtggaccgttttgataaactcgcctttgaaccgggcgtgatcccggaactgctgaagctgcaaaaagcgggctacaagctggtgatgatcactaatcaggatggtcttggaacacaaagtttcccacaggcggatttcgatggcccgcacaacctgatgatgcagatcttcacctcgcaaggcgtacagtttgatgaagtgctgatttgtccgcacctgcccgccgatgagtgcgactgccgtaagccgaaagtaaaactggtggaacgttatctggctgagcaagcgatggatcgcgctaacagttatgtgattggcgatcgcgcgaccgacattcaactggcggaaaacatgggcattactggtttacgctacgaccgcgaaaccctgaactggccaatgattggcgagcaactcaccagacgtgaccgttacgctcacgtagtgcgtaataccaaagagacgcagattgacgttcaggtgtggctggatcgtgaaggtggcagcaagattaacaccggcgttggcttctttgatcatatgctggatcagatcgctacccacggcggtttccgcatggaaatcaacgtcaaaggcgacctctatatcgacgatcaccacaccgtcgaagataccggcctggcgctgggcgaagcgctaaaaatcgccctcggagacaaacgcggtattcgccgctttggttttgtgctaccgatggacgaatgctttgcccgctgcgcgctgaatatctctggtcgcccgcacctggaatataaagccgagtttacctaccagcgcgtgggcgatctcagcaccgaaatgatcgagcacttcttccgttcgctctcatacaccatgggcgtgacgctacacctgaaaaccaaaggtaaaaacgatcatcaccgtgtagagagtctgttcaaagcctttggtcgcacctgcgccagccatccgcgtggaggaccaggattactagatactgtgtaa

SEQ ID NO: 4693 - DNA, 511 bp, Homo sapiens
  SIMILAR (233)..(511): 361254mologous to Escherichia coli HisB bifunctional enzyme,accession number D90841,Smith-Waterman Score=80.
ctaagctttgccagctgctgctggatcacagctgctttctgttgtcattgctgttgtccctctgctacgttcctggtacagatcatttctcatgttgataatgtcatcagaaatcaaaccagatgtgacttctagtagatccctcacaagttgagaatgaaggtggatgattgctaagtgtaagacacgtagtgcgtaatacccaagagaccgcaaatgacgttcaagtgtggtggatcgtgaaggtggcagcaagattaaacaccggcgtttgctttcttgatcatatgctggatcagatcgccacggcggtttcccgcatggaaaatcaacgtcaaaggcgacctctatatcgacgatcaccacaccgttcgaagataccggcctgggcgctgggcgaagcgctaaaaatcgcccccggagacaaacccggtatttgccgctttggttttgtgctacccgatggacgaatgcctgagcctgcgcgctggatatctctggcggcccgcac

SEQ ID NO: 4694 - DNA, 852 bp, Homo sapiens
  SIMILAR (850)..(749): 941254mologous to Homo sapiens Human p50 or KBF1 protein,accession number R42088,Smith-Waterman Score=164.
agcggccgccctttttttttttttttgcttttccttttattataaaagtaaaataaaaaatagcatttataaatccaacattttttcctttaaagtatttgatctaaaaaacatatttacaatagcaaaatgcagaaaagggggaaaataccattttcagcaatgattgtaaccatgtttaaatattgacaagtattttttttttttttttttttgcaaatcagaaaaataaccacattagaaaaagcaatatgccttttttttttaaaaatggcaacatcaagtgactctcattttaaaatatctcttttcttaacccttaatttgaatgcaaaatgatgctgtggtcagaaggaaatgcccaggtggcgaccgtcgataccttttaatgacaataggaacgtaggcagagggacaacagcaatgacaacagaaagccagctgtgaatccagcagcagctgccaaaagcttaggtaaggcaacctcatccccaggatggcatccgctcaggccagtgttgtgattgctaggatactatctggtaaggtggaaccaaactaaaattcatttatgaaccaagaaaggaaggccaagttggaaaagggtctcgagtttaaatcgagaattgattcagggcgggccggctctctgagcacctttggatgcacttcagcttctgtcttgtggacaacgcagtggaattttagggctttggtttacacggtgtgggaaattgtcagcaggctaaattttgctttctagaggtccttcctgcccataatcatggggcattttgttgagagttagcagtgaggccccactggtcagagactcggtaaagctgagttgcg

SEQ ID NO: 4695 - DNA, 1647 bp, Homo sapiens
  SIMILAR (781)..(1599): 341254mologous to Danio rerio tolloid,accession number AF027596,Smith-Waterman Score=427.
atgaggcggctgcccgctgggtggcgccgatttcccggggaggtcccttctgggcccccggcggaggtgggagagagtcaggcaggagccgaggccggggagccctcttcgtcagctggtgctcactgcgccgcgccagcgccagccgggactcacccgcagctccatgcttgtgcccggttcgactcgtccatcctccaagaagaggcaggtacgtgccacctgtcggggatccgggagggaggattcggggatcagtgccggtttggagctcagaaaggagtttgtggtcagcgagtgggcccttgggggtcttgggctgtcacagggactccagaaagccatgcagagccttgtgccatgaaggacttctcagatgtcatcctctgcatggaggcaacagaatcgagcaagaccgagttctgcaatcctgccttcgagcctgagtctgggccaccctgccctcccccagttttcccagaggatgccagctacagcgtcccagctccctggcatggtcggcgtcctcgagggctacggccagactgccgcttctcctggctctgtgtcctcctgctctccagcctgctcctcctgctgcttgggctgctggtggccatcatcctggcccagctgcaggctgcacccccatctggggcgtcccatagcccactgcctgccggaggccttaccacgaccaccaccacccccaccatcaccacctctcaggcagctgggacccctaaagggcagcaggagtcaggcgtgagcccctccccacagtccacctgtggaggcctcctctctggcccaaggggcttcttcagcagccctaactacccagacccttacccccccaacacccactgcgtgtggcatatccaggtggccacagaccacgcaatacagctcaagatcgaagccctcagcatagagagtgtggcctcttgcctttttgatcgcttggaactctcccctgagcctgaaggccccctcctcagggtttgtggaagggtgcctccccccacgctcaacaccaatgccagccacctcctggtggtcttcgtctctgacagcagtgtggaaggatttggtttccatgcctggtaccaggctatggcccctgggcgcgggagctgtgcccatgatgagttccgctgtgaccagctcatctgcctgctacctgactcagtgtgtgatggttttgccaactgtgctgacggcagtgatgagaccaattgcagtgccaagttctcggggtgtggggggaatctgactggcctccagggcactttctctactcccagctacctgcagcagtaccctcaccaactgctctgcacctggcatatctcggtgcctgccggacacagcatagaactacagttccacaacttcagcctggaggctcaggacgagtgcaagtttgactacgtggaggtgtatgagaccagcagctcaggggccttcagcctcctgggcaggttctgtggagcagagccacccccccacctcgtctcctcgcaccatgagctggctgtgctgtttaggacagatcatggcatcagcagtggaggcttctcagccacctacctggccttcaatgccacggagaggctctgcctggtggaatccacaagttcctag

SEQ ID NO: 4696 - DNA, 550 bp, Homo sapiens
  SIMILAR (1)..(114): 941254mologous to Homo sapiens myoglobin,accession number X00371,Smith-Waterman Score=186.
ttcatctcggaatgcatcatcaggtttctgcagagcaagcatccgggggactttggtgctgatgcccagggggccatgaacaaggccctggagctgttccggaaggacatggccccacccatctgggccccgggttcaagagagagcggggtctgatctcgtgtagccatatagagtttgcttctgagtgtctgctttgtttagtagaggtgggcaggaggagctgaggggctggggctggggctcactgtgttctgcatggtttggatctgaattaattgtcctttcttctaaatcccaaccgaacttcttccaacctccaaactggctgtaaccccaaatccaagccattaactacacctgacagtagcaattgtctgattaatcactggccccttgaagacagcagaatgtccctttgcaatgaggaggagatctgggctgggcgggccagctggggaagcatttgactatctggaacttgtgtgtgcctcctcaggtatggcagtgactcacctggttttaataaaacaacctgcaacatctcaaa

SEQ ID NO: 4697 - DNA, 1175 bp, Homo sapiens
  SIMILAR (356)..(619): 401254mologous to Homo sapiens myoglobin,accession number X00371,Smith-Waterman Score=108.
ggtagccggccgcaattcccgggtcacacacgcgtccgagcgagcggctggcgaccatgcagtctcaaaccccagctgttggggccagtacacccagtgagcccatacttgctctttttgtcttcttcagactgcgccatggggctcatcgacggggaatggcagttggtgctgaacgtctgggggaaggtggaggctgacatcccaggccatgggcaggaagtcctcatcaggctctttaagggtcacccagagactctggagaagtttgacaagttcaagcacctgaagtcagaggacgagatgaaggcatctgaggacttaaagaagcatggtgccactgtgctcaccgcccctgggtggcatccttaagaagaaggggcatcatgaggcagagattaacgccccgtggcacagtcagcaatgccaccaagcacaagatccccgtgaaagtaacctggcgttcatctccggaatgcatcatcccaggttctgcagagcaagcatcccggggacttttggtgctgaatgcccagggggccatgaaacaaggccctgggagctgtttccggaaggacaattggcctccaacttacaaggaacttgggctttccagggctaagccccttgccggctttcccacccccaacccatcttgggcccccgggttcaagagagagcggggtctgatctccgtgtagccatattagagtttgcttcttgagtgtctgctttgtttaagtagaggtgggcaagaaggagctgaaggggcttggggcttggggtgtttgaagttggcttttcatgcccagccgatgcgcctcccctgtggattgtcatcaccctgggaaccgggaagtggcccttggctcaactgtgttcctgcatggtttggatctgaattaattgtcctttcttctaaatcccaaccgaacttcttccaacctccaaactggctgtaaccccaaatccaagccattaactacacctgacagtagcaattgtctgattaatcactggccccttgaagacagcagaatgtccctttgcaatgaggaggagatctgggctgggcgggccagctggggaagcatttgactatctggaacttgtgtgtgcctcctcaggtatggcagtgactcacctggttttaataaaacaacctgcaacatctc

SEQ ID NO: 4698 - DNA, 550 bp, Homo sapiens; identical to SEQ ID NO: 4696
  SIMILAR (1)..(114): 941254mologous to Homo sapiens myoglobin,accession number X00371,Smith-Waterman Score=186.

SEQ ID NO: 4699 - DNA, 1164 bp, Homo sapiens
  SIMILAR (369)..(614): 421254mologous to Homo sapiens myoglobin,accession number X00371,Smith-Waterman Score=114.
ggtagccggccgcaattcccgggtcacacacgcgtccgagcgagcggctggcgaccatgcagtctcaaaccccagctgttggggccagtacacccagtgagcccatacttgctctttttgtcttcttcagactgcgccatggggctcatcgacggggaatggcagttggtgctgaacgtctgggggaaggtggaggctgacatcccaggccatgggcaggaagtcctcatcaggctctttaagggtcacccagagactctggagaagtttgacaagttcaagcacctgaagtcagaggacgagatgaaggcatctgaggacttaaagaagcatggtgccactgtgctcaccgcccctgggtggcatccttaagaagaaggggcatcatgaggcagagattaacgccccgtggcacagtcagcaatgccaccaagcacaagatccccgtgaaagtaacctggcgttcatctccggaatgcatcaatccaggttctgcagagcaagcatcccggggacttttggtgctgaatgcccagggggccatgaaacaaggccctggaagctgttccggaaggacaatggcctccaactacaaggagctgggcttccagggctaggcccatgccgcatcccacccccacccatctgggccccgggttcaagagagagcggggtctgatctccgtgtagccatattagagtttgcttcctgagtgtctgctttgtttaagtagaggtgggcaagaaggagctgaaggggcttggggcttggggtgtttgaagttggcttttcatgcccagccgatgcgcctcccctgtggattgtcatcaccctgggaaccgggaagtggcccttggctcaactgtgttcctgcatggtttggatctgaattaattgtcctttcttctaaatcccaaccgaacttcttccaacctccaaactggctgtaaccccaaatccaagccattaactacacctgacagtagcaattgtctgattaatcactggccccttgaagacagcagaatgtccctttgcaatgaggaggagatctgggctgggcgggccagctggggaagcatttgactatctggaacttgtgtgtgcctcctcaggtatggcagtgactcacctggttttaataaaacaacctgcaacatctc

SEQ ID NO: 4700 - DNA, 532 bp, Homo sapiens
  SIMILAR (532)..(407): 611254mologous to Homo sapiens calcium and DAG-regulated guanine nucleotide exchange factor II,accession number AF081197,Smith-Waterman Score=150.
catccaccaggatgcaaaagaggaaagtcacttccagggaaaaagatgacggacgtaccactaaaggcagtgtggatgggaaggcggatgcctctggaggcctacctctgggagccctgccagagtctgacggcaggactcaggactgactgggggaagggagtgaggattataggagaccaagagatgtctaggaatccagcttggaggatgcagttgatggtgggtccatcaccgggcaggggaccgtatctgtttcccaggaagggtgtggggattcagtctgggtccaggcatggcgaagctggcacccagtctcaggctccagggatagcgtgtaggagtgattttcctcggagccacagctggcatggggagctggtgtggatgggacaggagctccggggggtcctgcatcgcccttggcccctggcctcttcttacattctaccttcacctggtctctgcagtgtttgtggcaacacagcccgcactcccgacagcggtagccttgcttggtgacaccccagag

SEQ ID NO: 4701 - DNA, 1065 bp, Homo sapiens
  SIMILAR (1)..(420): 921254mologous to Homo sapiens putative p150,accession number U93564,Smith-Waterman Score=676.
atgggcaaggacttcatgtctaaaacaccagaagcaatggcaacaaaagccaaaattgacaaatgggatctcattaaactaaagagcttctgcacagcaaaagaaactgccatcagagtgaacaggcaacctacaaaatgggagaaaatttttgcaacctactcatctgacaaagtgctaatatccagaatctacaacgaacttaaacaaatttacaagaaaaaaacaaacaaccccatcaaaaagtgggtgaaggatatgaacagacacttctcaatagaagatctttatgcagccaaaagacacatgaaaaaatactcatcatcactggccatcagagaaatgcaaatcaaaaccacaatgagataccatctcacaccagttagaatggcaatcattaaaaagtcaggaaacaacaggtctcgtataaacttctgtaaatgcgacccaggaggactaggcaggtcacacagtgaaggagggaaccagaaacttcacttgctaaagagacaccaggaaacccaactaatacaaacgccaagtttaagactagaggagcacgcatttcgcactactcctctgggaatggggaacgtctcccgagaactgtgtgttagcaccgggacacatgggcaaactgagcgacatgagggttgggaacactggtccggccccccgggatcccccgagacccacgggttcctcttcgccctcgcaccgacccgcagggacatagaaccaagccccaagccggcccagctacaggaccctctctgggtgccgcacgtccggaggaaaatggcggagtgggccgggcagcgcaagcgcagagaaaaaagctggttcccaaggtccttgatggtaacatcattggaagatgatttgatcttatatttggaaaaacctaaggactccaccaaaaaacgattagaactgatcaacaaattcagagtcacaggatacaaaatcaaactacaaaagtcagtagcatttctaaatgacaaaaatgaacaatctaaagaagaaaatcaagaatgtaatcccatttacaataactacaaataa

SEQ ID NO: 4702 - DNA, 6477 bp, Homo sapiens
  SIMILAR (931)..(6423): 271254mologous to Streptococcus parasanguinis fimbriae- associated protein Fap1,accession number AF100426,Smith-Waterman Score=729.
atgcctgcccagcctcaggaccgcctctgggttgagcacttccggaggacaatggtggagtgggcggggcagcgcatgagcagagagaaaaactggttcccaagatccttcatggtaacatcattggaaggtgacactacatttcccatgaggctctacgttcccctgttaggaacgcatgtcggacattctgctttgcccagctgtgatttgatcttatatttggaaaaacctaaggactccaccaaaaaactattagaactgatcaacaaattcagagtcacacgatacaaaatcaaactacaaaaatcagtagtatttctaaatgccaaaaatgaacaatctaaagaagaaaatcaagaactggggcaggtagctccaggtgccaacacgggcgccagctctccgcaaggctatggctggaccacgggcacctcaagcagcttccacagctggcacattgggaacacagtggaacccagaagcttggagataccaggaaccacagggccccaaagagggaatcacagccctggctcagggagctcccaggtcaaacattcagacacttgcaatgactataatgacagcagaagtcttcaggaatcctatgtgagggacaaacactcagaagccagctggagtgttctagaatcctatgtgagggacaaacattcagagcccagcagcagtgttctggaatcctatgtgagggacaaactttcagaccctcgtagcagggttctggaatcctatgtgaggggcaaacatttagaccctcgtagcactgttctggaatactattgttctggagtcctatgtgatgaacaaactttcagaccacagcaggagtcttctggaatcctatgtgagggtcaaacattcagaccccagcagtattgttctggaatcctatgtgaggacaaacattcagacccacgtggcagtgttctggaatcccatgtgagggacaaatattcagaccacaacaggagtgctctggaatcctatgtgaggggcaaacattcagaaccttgtagcagtgttctggaatcttatgtgagggagagacatttagaccctcgcagcagtgttctggtatcccatgtgagggacaaacattcagaccctcccagctgtgttctggaattctatgtgagggaaagacattcaaactccagcagcagttttctggaatccgatttgaggggcagacattcagaccccagcagcagtgttctggaatgctatatgggggacaaacattcagaccccagcagcaggcttctggaatcctatgtgggggacaaacattcagacaatggcagcagtgttctggaatcctatgtgagggacaaacactcagagcctcgtagcagtgctctggaatcctatgtgagggacaaacactcagagcctcatagcagtgttctggaatcctatcaggagtgttctggaatcctatgtgagggcaaacattcagatcacagcaggggtgttctggaatgctatgtgagggacaaatattcagacactagcatcaggcttctggaatcctacatgagggacaaatattcagacaacgacagcagtgttctggaatcctatgtgggggacaaacattcagagcctcgtagtgttgtggaatcctatgtgagagacagacatttaggccacagcagcagtgttctggaatcccatgtgagggacaaacattcagatccgaacaggagtgttctggaatcctatgtgagggacaaacatttagaccgtcttagcagtgttctggaatcctatgtgagggacaaacattcatatcctcgtagcattgttatggaatcctattgttctggaatcctatgtgagggacattcagaatttcatagcagtgttctggaatcctacgtgacggacaaacattcagaccacagcaggagtgttctggaatcctatgtgagggacaaaaattcagaccccagcatgaatcttctggaatcctatgtgagggacaaacattcagactctcatagcagtgttctggaatactgtgtgggggacaaacattcagaccacagcaggagtgttctggaatcctacgtgagggacaaacattcagaccctcgtggcagtgttctggaatcctatgtgagagacaaacattcagaccctcataacagttttccggaatcctatgagtgttctggaatcctatgtgagggcaaacattcagatcacagcaggagtgttctggaatgctatgtgagagacaaacattcagacactcgcagcaggcttgtggaatcctacgtgagggacaaatattcagacaacggcagcagtgtactggaatcctatgtgggggacaaacattcagagcctcgtagtgttgtgggatcctatgtgaggggcagacatttagaccacagcagcagtgttctagaatcccatgtgagagacaaacattcagacccgaacaggagtgttctggaatcctatgtgagggacaaatattcagaccctcttagcagtgttctggaatcctatgtgagggacaaacattcatatcctcgtagcagtgtcatggaatcctatgtgagggacaaacattcagaccttcgcagcagtgttctggaatcctatggatattcagagcccagccgcagtgttctggaatcctatgtgacagacaaacattcagaccacagtagcagcgttctggaatcctatgtgagggtcaaagtatcagaccgcagcaggagtgttctggaatcctatgtgagggacattcagaccattgcaggaatgttctggaatcctatggaccaacattcagaccctcgaagcagtgttctggagttctatgtgagagacaaacattcagaccctagtagcagtgttctggaatcctatgtcagggacattcagacaacagacacagtgttctggaattctgtgacagacaaacattccgaccacagcagaaatgttctggaatcctatagcaggagtgttctggaatcccatgagaggggaaaacattccgactccagcagcagtgtccttgaatgctatgtgagggacaaacattcagaccacagcaggagtgttctggagtcctatgtgagggagaaacattcagaacacagcaggagacttctggaaaccattgtgaaggacaaacatacagacctttgtagcagtgttctggaattctatgtgaggaaaaaacattcagaacacagcaggagtgttctgaaatcctatgtcagggacaaacattcaaaccacagcaggagtgttctggagtcctatgtgagtgtcaaatattccgacaacagcaggagtgttctggaatcctatgtgagggacaaacattcagaccctcgtagcagtgttctggaatcctatgtgagggaaaatcattcataccctcgtagcagtgttctggaatcctatgtgagggttaaaatctcagaatccaggagcagtgttctggaatcctatgtgagggacaaacattcagtccacagcagcagtgttctggaaagctatgtgagggacaaacattcagaccatagcaggagtgttctggaatcctatgtgagggacaaacattcagaccctggtagcagtgttctggaatcctatgtgagggaaaatcattcataccctcgtagcagtgttctggaatcctatgtgagggttaaaaactcagaatccaggagcagtgctctggaatcctatgtgagggacaaacattcagtccacagcagcagtgttctggaaagctatgtgagggacaaacattcagaccatagcaggagtgttctggaatcctatgtgagggacaaacattcagaccctcatagcagtgttctggaatcctatgtgagggaaaatcattcataccctcgtagcagtgttctggaatcctatgtgagggttaaaatctcagaatccaagagcagtgttctggaatcctatgtgagggacaaacattcagtccacagcagcagtgttctggaaagctatgtgagggacaaacattcagaccatagcaggagtgttatggaattctatgtgagagataaacattcagaccacagcgggagtgttctggaatgctatctgaagaacaaaattcagaacccagcagcagtgttctggaatcctatacaaacattcagaccctggtatcagcgttctgccatcctatatcagggacatacttaccccagccacagtgttctggaatcctatgtgacagacaaacatacaaacaacagcaggagtgttctggaatcctatgtgaggaacaaacattcagaccccagcagcagtgttctggaatcttatgtgagggaaaagcattcataccctcgtaggggtgttctagaatcctatgtgagggaaaagaaactcagaatccaggagcactgctctggaatcctttgtgagggacaaatattcagtccacagcagcagtgttctggaatgctattgagggacaaacattcagacaacaaaaggagtgtcctggagtcctatgtgagggacaagcactcagaagcccacagcagtgttatggaatcctatgtgagggacaaacatgcagacctcagcagcagtgttctgggatcctatgtgagggacaaacattcagaccccaggagcagtgttcttggatgccatgtgagagacaaatcttcagaccacagcaggaatgtgctcgaatcctatatgaaggacaagcattctgactcttgtagcagttttctggaatcctatgtgagggacaaaccttcagacctcagcagcagtgttctgggatcctatgtgagggacaaacattcagaccccaggagcagtgttcttggatgccatgtgagagacaaatcttcagaccacagcaggaatgtgctccaatcctatgtgaaggacaagcattctgactcttgtagcagttttctggaatcctatgtaagggagaaacattcagaccccagtagcagcgttgtgaaatcttatgtgagggacaaacattcagaccctcctagcagtgttctggaatcctatgtgagggacaaacattcagaccctcctagcagtgttctggaatcctatgtgagggacaaacattcagaccctcatagcagtgttctggaatcctatgtgaggaacaaacattcagacaactgtaggattgttctggaatcctatgtgagggagaaacgttcagaccctcgtaacagtgttctggaatcctatgtgagggacaaacattcagaccagagcaggagtgttctggaatcgcatgtgacgaaaaaactttcagagcacagtaggagtgttctggaatcctacgtgatggacaaacattcagaacccagcagcagtgttctggaatattatgtgaggggcaaaagctcagactccagcagcagtgttcttgaatgctatctcagagacaaacattcagaccacagttggagtgttctggagtcctatgtgagggacaaacattcagatcacagcaggagtgttctgaaatcctatgtgagggacaaacattcagatcacagcaggagtcttctggaatcccttgtgaaggacaaacattcagacacttgtggtagtgttctggaatcctatgtgagggacaagcatgcagaacactgcaggagtgttctgaaatcctattgttctggaattttatgtgaggcacattcagaccccagcagcagtgtttttgaatgctatgtgagggacaaacattcagaacccagcaacagtgttcttgaatgctatgtgagggacaaacattcagaacacagcagcagtgttctggaatcctatgtgagggacagacattcacacaacagcaggaatgttctggaatcccttgtgaaggagaaacattcagacccttgtagcagtgttctggaatcctatgcgagcgacagacattcagaacacagcaggagtgttctggagtcctatgtgagggtcaaacattcagaccctcgtaacagtgttctggaatcctatgtgaaggacaaacactcagactcgagcagcagttttctagaatcttatttcaggatcaaatattcggaccctcgtagcagtgttctggaatcctatgtgagggacaaacactcagaacccagcagcagtgttctggaatcctatgtgagggagaaacattcagacaacagcaggagtgtggtggaactgtgtgtgaggaacaagcattcagaccacagtaggagtgttcaggaatcctgtgtgagggacaaacattcagaccctcataacagtgttatagaatcccatatgagggacagacaacctagcagcagtgttctggaatcctatgtgagggtcaaacattcagaccacagcaggagtgttctggaaacctgtgtgaggacaaacattcagaccacagcaggagtgttctccaatcctatttga

SEQ ID NO: 4703 - DNA, 625 bp, Homo sapiens
  SIMILAR (1)..(138): 431254mologous to Homo sapiens bA145E8.1 (KIAA1074),accession number AL162272,Smith-Waterman Score=107.
atgagttctgatatttccgaagtagaagataagaatgagtttcttactgaacaactttctaaaccacaaattaaattcaataccttaaaagataagttccttaagacaagagatactctcaagaaaaaagtcattggctttagaaactgtacataacaacctaagccaaacacagcagcaaataaaggaaatgaaagagatgtatgaaaatgcagaagctaaagagaataattccactggaaagtggagctgtgtagaagagagaatatgtcaactccaacatgaaaatccgtgcattgaacagcaactagatgatgttcatcagaaagaatgtttaccatcgaggaaggagaagtttaagtctgaaccaccagctttcctcagtggaaatcaagtgaagtcatcatcttgcagtttacagaccctctttcctcctgatgatttgatcttatatttggaaaatcctaaggactccaccaaaaaactattagaactgatcaacaaattcagagtcacaggatacaaaatcaaactacaaaagtcagtagcatttctaaatgacaaaaatgaacaatctaaagaagaaaatcaagaatgtaatcccatttacaataactacaaataa

SEQ ID NO: 4704 - DNA, 3274 bp, Homo sapiens
  SIMILAR (5)..(2257): 321254mologous to Homo sapiens bA145E8.1 (KIAA1074),accession number AL162272,Smith-Waterman Score=818.
atgcaccttaaaacaagaaaatgaagaaaaaacaaatgttaatatgctgtacaaaaaaaatagagaagaattagaaaggaaagagaaacaatataagaaagaagttgaagcaaaacaacttgaaccaactcttcagtcactagagatgaaatcaaagactgcaagaaatactccaaatcgggattttcataatcatgaagaaatgaaaggtctgatggatgaaaattgcattttgaaggcagatattgctatactcagacaggaaatatgtacaatgaaaaatgacaacttggaaaaagaaaataaatatcttaaggacattaaaattgttaaagaaacaaatgctgcccttgaaaagtatataaaactcaatgaggaaatgataacagaaacagcattccggtatcaacaagagcttaatgatctcaaggctgagaatacaaggctcaatgccgaactgttgaaggaaaaagaaagcaagaaaagactggaagctgacattgaatcttatcagtctagactggctgctgctataagcaaacacagtgaaagtgtgaaaacagaaagaaacctaaaacttgctttagagagaacacgagatgtttctgtacaagtagaaatgagttctgctatttccaaagtaaaagctgagaatgagtttcttactgaacaactttctgaaacacaaattaaattcaataccttaaaagataagttccgtaagacaagagatagtctcagaaaaaagtcattggctttagaaactgtacaaaacgacctaacccaaacacagcagcaaacacaggaaatgaaagagatgtatcaaaatgcagaagctaaagtgaataattccactggaaagtggaactgtgtagaagagaggatatgtcacctccaacgtgaaaatgcgtggcttgtacagcaactagatgacgttcatcagaaagaggatcataaagagacagtaactaatatccaaagaggctttattgagagtggaaagaaagacctcgtgctagaagagaaaagtaagaagctaacgaatgaatgtgatcatttaaaagaaagtctctttcagtatgagagagagaaaacagaaggagtacctaaaaaagaaaatgaagaattaagaaaactttttgagttaatatcatcactgaaatataatgtgaatcgaataagaaagaaaaatgatgaattagaagaagaggcaactggatataagaaactcctggaaatgacaataaatatgttaaatgtatttggaaatgaagactttgattgccatggagacttaaaaacagatcaactgaaaatggatattctgattaagaagctaaaacagaagtttgatgatcttaccgcagagaaggaagctttatcttcaaaatgtgtcaatttggctaaagacaatcaagttcttcaacaggagtttttatctatgaaaaaagtacaacagcaatgtgaaaaacttgaggaggataaaaagatgttgaaagaagaaatattaaatcttaagacacatatggaaaacaatagggtagaacttagtaaactacaagaatataaattggagctagatgaaaaggcaatgcaggcagtagaaaaattagaagaaatccatttacaggaacaagcacaatatgaaaaacaattagagcagttaaacaaggataatatggcttcactaaataaaaaggaactcacacttaaagatgtggaatgtaaattctcagaaatgaaaactgcttatgaagaggttacaactgaattagaagaatataaggaagcctttgcagcagcattgaaagctaacaattccatgtcaaaaaaattaacgaaggcttcaaatcaacacactacttcctggggcacaaacctgccaagagggggaattcaacatgtggaagaggtggtcctacgctgtccactggaaaaggagggactcagggaaaagaaactcctacatgaggaaagatcattatggaggcgtcagcccatagtcactggggacgctctcaccagcacctgtgaattttggagacatttgaggatgtcctgtgcaaattgggatgttggaagttctgatgaatctgcagtcagaaaaaagtcattggctttagaaactgtacaaaacgacctaagccaaacacagcagcaaataaaggaaatgaaagagatgtatcaaagtgcagaagctaaagtcagtaaatccactggaaagtggaactgtgtggaagagaggatatgtcaactccaacgtgaaaatccgtggcttgaacagcaactagttgatgttcatcagaaagaggatcataaagagatagtaattaatatccaaagaggctttattgagagtagaaagaaagacctcatgctagaagagaaaaataagaagctaatgaatgaatatgatcatttaaaagaaagtctctttcaatatgagagacagaaagcagaaacagtaatagcacagcccctcaatctgagtgctcagcagagtgcttgtgaaggcagcaccacagcaacagttgctcagagggaacagattcaggagccttggtttagcaatagagtccagggttttcagctcagtgtctttagcctgtctctgctggtcatgtcagttatgtactattccatccaggaggcatctgactctgcatctccccgaggtttggagccccccatgcttcagagagctgctcaaagaatggcccggagtgcggaggccaggatgggaaggcgagcttggaagcagacggtgatgcgcctggggcagaacatctgtgttctctgttgtgagtggttaagacaagaagacagggcctggatgtcccagacagtcccccagggacttggtgggggcagcccctaccccagatcccagttagagagaacagcccagctcttggggctctgggcctggctgagccacctgggatctgggtaccctggtggtcggggaggggcacagactttaagtccagcagaagttgtttccggacagtctatgaaaagctctgctggccacggaggaagtaggcagctgacaaaaagttctgcaattgcctgtgccaaactgtgtaaagcaagtacttacatcaattgggaagataacgctgtcattttcctacttgttcagtccatggtggttgatcttaaggcagaagagcctcatcccattgctaccatcaccacaggcccatggggaataccgccaggctaccaccaatgttcccttaagattcaaggctctttagttcacttgtag

SEQ ID NO: 4705 - DNA, 582 bp, Homo sapiens
  SIMILAR (127)..(408): 881254mologous to Homo sapiens PAR3,accession number AF252293,Smith-Waterman Score=431.
atggatgtggaaatcaacatgcagatggtatttaaaaccatggaaatggacgatatcatcgagggagagaatggaagagaaagaagggctagttttgagcccttgggaatctcctgtgttgagagatcagtacagaagcgacaaggagcaaaggaaactgagatggggattcaagccaaaactcgagaatttagggaacgacaagctcgagagcgtgactatgctgaaattcaagattttcatcggacatttggctgtgatgatgagttaatgtatgggggagtttcttcttatgaaggttccatggctctcaacgctagacctcagagcccacgagaagggcatatgatggatgctttgtatgcccaagtcaagaagccgcggaattccaaaccctcacctgtagacagggtttggggcctgaccaagtgtggagcaaacgacagagcagaagcccatggagctcagctcatgaccaaagctgcagagtgtccagatgaaatggtgaacaccaagttcatgaggccagaggattccctgatgtgcacaaattcggacaaaagcttcagtacttggaattga

SEQ ID NO: 4706 - DNA, 510 bp, Homo sapiens
  SIMILAR (27)..(506): 931254mologous to Homo sapiens PAR3,accession number AF252293,Smith-Waterman Score=784.
acccatggccgcccacattcccgggtcgagaatttagggaacgacaagctcgagagcgtgactatgctgaaattctttattttcatcggacatttggctgtgatgatgagttaatgcatgggggagattcttcttatgaccgtgccatggctctcaacgctagacctcagagcccacgagaagggcatatgatggatgctttgtatgcccaagtcaagaagccgcggaattccaaaccctcacctgtagacactaacagatcaactcctagcaatcatgatcggatacagcgtctgaggcaagaatttcagcaagcaaagcaagatgaagatgtagaagatcgtcggcggacctatagttttgagcaaccctggccgaacgcacggccggcgacgcatagcgggcgacactcggtgtccgtggaggtgcagatgcatcggcagcggcaggaggagcgcgagagctcccagcaggcccagcgccagtacagctctctgcctcggcaaaggc

SEQ ID NO: 4707 - DNA, 1262 bp, Homo sapiens
  SIMILAR (639)..(677): 921254mologous to Rattus norvegicus atypical PKC specific binding protein,accession number AB005549,Smith-Waterman Score=63.
atggaggctgttgatactttcctggttttcaatgccctgaattttctactaacatcacaaactacggggtgctcctcctcctgtgaccctgggcatgggcttggacagggctctggaaatagatttcctatagcagctgcttctgcaaggactgcagaagaagcaaaatggttctttagcaacaaagactattcgaatgtgttacaactgcccgaccccaaaaaaacagaataccacatccatgaaaaacggtttagtgattccaggatattgtgttattatcctgagtttggtaaagtagaggaaatcatcttgacagccatgaaacatgattggtttggcaaacatcgaaaagatgacaagattgagaaaacgggtaaaataaaaatacaggaatcctttacatcagaagaggagaggatacgaatgaagcaggagcaggagaggattcaagccaaaactcgagaatttagggaaccgacaagctcgagagcgtgactatgctgaaattcaagattttcatcggacatttggctgtgatgatgagttaatgtatgggggagtttcttcttatgaaggttccatggctctcaacgctagacctcagagcccacgagaagggcatatgatggatgcctttgtatgcccaagtcaagaagccgcggaattccaaaccctcacctgtagacagcaagggtaaagttctgggggaagcagatcctgtttatccaagacggaatcctggaactgaaggcaatgcttcatcattgccttcagtctcattttctgagtctcctccagtcagagctgcttttgcaggatatcattatgttgcttttccctggctgcagaaactgatgagtggcacttctggaaaagatccagagaaagaagctgacttagctagagttgtaactctgagagttgtgacactgaggatagaaacacatgttaagacactcgcgttcacagcagccttattacaacagctagcgtgcatcgacgtgggaatggataaacaaaatgacgtatatacatacaataaaatactactcagcttcaaaaggaaggaaatcctgacacacactacaacacggatgagccttgaggacattatactaagtgaaatcaatcaatggcaagaagataaataccgattcggcttatatgaggtagctcaagtagtcaaactcatagagacagaaagtaaagtggtggtttccagggacgggggaagagggaactggggagatagcggctga

SEQ ID NO: 4708 - DNA, 2213 bp, Homo sapiens
  SIMILAR (37)..(2049): 1001254mologous to Homo sapiens cGMP-dependent protein kinase type I alpha,accession number D45864,Smith-Waterman Score=3511.
gccttctgattgacagcggaggggctcagtgaaaaaatgagcgagctagaggaagactttgccaagattctcatgctcaaggaggagaggatcaaagagctggagaagcggctgtcagagaaggaggaagaaattcaggagctgaagaggaaactccacaaatgccagtcggtgctcccagtgccctcgacccacatcggcccccggaccacccgggcgcagggcatctcggccgagccgcagacgtacaggtccttccacgacctccgacaggcattccggaagttcaccaagtccgaaaggtccaaggatcttataaaggaagctatccttgacaatgactttatgaagaacttggagctgtcgcagatccaggagattgtggattgtatgtacccggtggagtatggcaaggacagttgcatcatcaaagaaggagacgtggggtcactggtgtatgtcatggaagatggtaaggttgaagttacaaaagaaggtgtgaagttgtgtaccatgggtccaggaaaagtgtttggggaattggctattctttacaactgtacccggacagcgaccgtcaagactcttgtaaatgtaaaactctgggccattgatcgacaatgttttcaaacaataatgatgaggacaggactcatcaagcataccgagtatatggaatttttaaaaagcgttccaacattccagagccttcctgaagagatcctcagcaagcttgctgatgtccttgaagagacccactatgaaaatggagaatatattatcaggcaaggtgcaagaggggacaccttctttatcatcagcaaaggaacggtaaatgtcactcgtgaagactcaccgagtgaagacccagtctttcttagaactttaggaaaaggagactggtttggagagaaagccttgcagggggaagatgtgagaacagcaaacgtaattgctgcagaagctgtaacctgccttgtgattgacagagactcttttaaacatttgattggagggctggatgatgtttctaataaagcatatgaagatgcagaagctaaagcaaaatatgaagctgaagcggctttcttcgccaacctgaagctgtctgatttcaacatcattgatacccttggagttggaggtttcggacgagtagaactggtccagttgaaaagtgaagaatccaaaacgtttgcaatgaagattctcaagaaacgtcacattgtggacacaagacagcaggagcacatccgctcagagaagcagatcatgcagggggctcattccgatttcatagtgagactgtacagaacatttaaggacagcaaatatttgtatatgttgatggaagcttgtctaggtggagagctctggaccattctcagggatagaggttcgtttgaagattctacaaccagattttacacagcatgtgtggtagaagcttttgcctatctgcattccaaaggaatcatttacagggacctcaagccagaaaatctcatcctagatcaccgaggttatgccaaactggttgattttggctttgcaaagaaaataggatttggaaagaaaacatggactttttgtgggactccagagtatgtagccccagagatcatcctgaacaaaggccatgacatttcagccgactactggtcactgggaatcctaatgtatgaactcctgactggcagcccacctttctcaggcccagatcctatgaaaacctataacatcatattgagggggattgacatgatagaatttccaaagaagattgccaaaaatgctgctaatttaattaaaaaactatgcagggacaatccatcagaaagattagggaatttgaaaaatggagtaaaagacattcaaaagcacaaatggtttgagggctttaactgggaaggcttaagaaaaggtaccttgacacctcctataataccaagtgttgcatcacccacagacacaagtaattttgacagtttccctgaggacaacgatgaaccaccacctgatgacaactcaggatgggatatagacttctaatgtatttctcttacctgcttctgccttgctgaagacagctttttctgagacacagctgccagcaaacctgagggaaagagagaagattagtgctcggggtcaccatgatgcctttgatcgatgctgctccagtaactacagtggcattaggacttatcgct

SEQ ID NO: 4709 - DNA, 3740 bp, Homo sapiens
  SIMILAR (47)..(2116): 991254mologous to Chimeric - Homo sapiens Green fluorescent protein-PKG fusion product,accession number W85039,Smith-Waterman Score=3588.
aggaagcctcaagacgcggagcagcggcaggaaggagcccccggcagcccggaggagcatgggcaccttgcgggatttacagtacgcgctccaggagaagatcgaggagctgaggcagcgggatgctctcatcgacgagctggagctggagttggatcagaaggacgaactgatccagaagctgcagaacgagctggacaagtaccgctcggtgatccgaccagccacccagcaggcgcagaagcagagcgcgagcaccttgcagggcgagccgcgcaccaagcggcaggcgatctccgccgagcccaccgccttcgacatccaggatctcagccatgtgaccctgcccttctaccccaagagcccacagtccaaggatcttataaaggaagctatccttgacaatgactttatgaagaacttggagctgtcgcagatccaggagattgtggattgtatgtacccggtggagtatggcaaggacagttgcatcatcaaagaaggagacgtggggtcactggtgtatgtcatggaagatggtaaggttgaagttacaaaagaaggtgtgaagttgtgtaccatgggtccaggaaaagtgtttggggaattggctattctttacaactgtacccggacagcgaccgtcaagactcttgtaaatgtaaaactctgggccattgatcgacaatgttttcaaacaataatgatgaggacaggactcatcaagcataccgagtatatggaatttttaaaaagcgttccaacattccagagccttcctgaagagatcctcagcaagcttgctgatgtccttgaagagacccactatgaaaatggagaatatattatcaggcaaggtgcaagaggggacaccttctttatcatcagcaaaggaacggtaaatgtcactcgtgaagactcaccgagtgaagacccagtctttcttagaactttaggaaaaggagactggtttggagagaaagccttgcagggggaagatgtgagaacagcaaacgtaattgctgcagaagctgtaacctgccttgtgattgacagagactcttttaaacatttgattggagggctggatgatgtttctaataaagcatatgaagatgcagaagctaaagcaaaatatgaagctgaagcggctttcttcgccaacctgaagctgtctgatttcaacatcattgatacccttggagttggaggtttcggacgagtagaactggtccagttgaaaagtgaagaatccaaaacgtttgcaatgaagattctcaagaaacgtcacattgtggacacaagacagcaggagcacatccgctcagagaagcagatcatgcagggggctcattccgatttcatagtgagactgtacagaacatttaaggacagcaaatatttgtatatgttgatggaagcttgtctaggtggagagctctggaccattctcagggatagaggttcgtttgaagattctacaaccagattttacacagcatgtgtggtagaagcttttgcctatctgcattccaaaggaatcatttacagggacctcaagccagaaaatctcatcctagatcaccgaggttatgccaaactggttgattttggctttgcaaagaaaataggatttggaaagaaaacatggactttttgtgggactccagagtatgtagccccagagatcatcctgaacaaaggccatgacatttcagccgactactggtcactgggaatcctaatgtatgaactcctgactggcagcccacctttctcaggcccagatcctatgaaaacctataacatcatattgagggggattgacatgatagaatttccaaagaagattgccaaaaatgctgctaatttaattaaaaaactatgcagggacaatccatcagaaagattagggaatttgaaaaatggagtaaaagacattcaaaagcacaaatggtttgagggctttaactgggaaggcttaagaaaaggtaccttgacacctcctataataccaagtgttgcatcacccacagacacaagtaattttgacagtttccctgaggacaacgatgaaccaccacctgatgacaactcaggatgggatatagacttctaatgtatttctcttacctgcttctgccttgctgaagacagctttttctgagacacagctgccagcaaacctgagggaaagagagaagattagtgctcggggtcaccatgatgcctttgatcgatgctgctccagtaactacagtggcattaggacttatcgcttagatgacaatagtgctctttacatgttttctgtttgaacctaaaatagcagttgacatggtggtcctgaagcaaagcctttcaccagtaaagagatgttttctattgttgcaatgaccttgctttgctctgattataatttgaaagactgtaggaaacacttcaatgtagtataagagtctgtaccttgctggaatattcaagaagatgaaagaataatatattgggtacaatagattactatggtacagaaactgggctattccctttcttcaagtgaaggctgtgggatctattacagctgcaggccggtgtatataccatacaaaagaggaccacacatctgttggtcacagagttcatgtcacaccagtgctagaagtttcatgattttatttcccagcagtgctgatgacaagactgaatgttaccttttctttctgacagattttaaaaattgatatgataaaagcacaactgctatagattctgctgagacctctcatagtaggtatatatgagttttcacagaagactgaaaaataatgcatgatatttgtttgttttttttgataaattggcatgacagagtggggaaaaaaagcaattcacaaaaccatttcatattttttaaaatattgtgcttaaagatggtcctggaagtaaatgactagcagccaattggttttacttaacataccctcaaactgaggcttaaagtattcccttttataaaaataaatgcttggggtagggtggagtggggagggattaaaacccatccaaaaaataaataaaaactatataggtgctatgtatatctttcatctgtaaatgtcagtgtctgaacagcaacacaaattcaaatcattatacgtgtagccagaaactcaagcattttcactaaagttattaaaccaaactcctgtccaatttgacttatacaacatagtcagtctagagttgagagacaaaggtaattataaacctatttgaactagcttcttgtcttaggcctgaaccaaaaaacaacaaacaaacaaaaaacaagaatgaaaaacagaaataaaagaagtagaaaagacaaagaaagaaagcccaaagtcaaagttgttaatatttacaggtttaccagatctggaacattacttatttgaggtcagagaacaaaacaagaacctggccaggtgttgattaccttttagtgaataagctgagtccatatacttgtctaactaagaaagcagtacagaggaaaacaggaacctgatttttttaaaataaattttaaataaaatagaattactacaattctgcaatttcatactacctaaaaaagactagatttgaaaatgtcaagctgatttactttattcacatggagaaaagaatccacaaattaaactgagtccttcactggcatgccagttgactattattagctgtcataagtaaccccg

SEQ ID NO: 4710 - DNA, 861 bp, Homo sapiens
  SIMILAR (481)..(576): 1001254mologous to Homo sapiens cGMP-dependent protein kinase type I alpha,accession number D45864,Smith-Waterman Score=171.
atgtggaactcaaagacactggcagcatttcgcccctgccctaaagatccgttgaactttgaacttgagagagataatttagcgtatctggcagaagagattcctaagcagcaaagcattcagtatataacctggatgattctgaaagcttttagtcatatgcatttacaaagagataatttgaaattggaacttatgtttaaaaggaaagcaaagcataaaggtttgaaaaatttgcatcctgaccatgtaatagaaaagaaaaacctattttctgcggagaaattcaagccagctgcagaaatttacataagtaatgaggagccaaatgttaatagccaagacaatggaaaaaaatgtctccagggcatgtcagagatctttgcagcagcccctgccatcacagataacacctcagataaaactacattgatcaaggtctcctcgtggccctatattgctgacagaagatgccctcttgtaaatgtcactcgtgaagactcaccgagtgaagacccagtctttcttagaactttaggaaaaggagactggtttggagagaaagccttgcaggggtggggccttaatggggatccaccacgtttctgcccaggaacctgtctgcctcctgctgccattcatgacacccaggctgtaggtgccaggggcacctgcaggccagcaccaagctgccgtcagcccaccactggattccctcctatgctcattggcacccaaagcccagaggggggtgagttgtcaggggactggcatgccagcactgccctgagcatgtgcacacctggccggactgtgacagtgcctgggctcagtcccaactttcctccaaaatcagaatag

SEQ ID NO: 4711 - DNA, 471 bp, Homo sapiens
  SIMILAR (2)..(37): 641254mologous to Homo sapiens reverse transcriptase,accession number L27428,Smith-Waterman Score=45.
atgcagaagattgaagctggaccccggtccttacaccatatatcaaaaatcaactcaagaagtattaaagagttacatgtaaaactcaaaactataaataccctggaagacaatctaggcaataccatcctggacctaggaatgggcaaagatttcatgacaaagacaccaaaagcaattccaacaaaagcaaaaattgacaaatgggatctaattaaacttaagagcttctgcacagcaaaagaaactaccaacagagtaaatagacaacctaaagaatgggagaaaacatttgcaaactgtgcatctgacgaaggtctaatatccagcatctataaggaacttaaacaaatttacaagagaaaaacaaacaaccccattaaaacatgggcaaaggacatgaacagacacttttcaaaagaagacataaatgcaaccaaaaagcatataaaaaaagctcaatatcactga

SEQ ID NO: 4712 - DNA, 407 bp, Homo sapiens
  misc_feature (1)...(407): n = a,t,c or g
tcgcccacgcgtnnatcagcgctgccggcttgcagcgggctgtgagaggggccggcgccgctttgtcctatgaaacgggctgcgcgtttctctttttcactcttttccatttccaggaaggacttgtaaggacttctgaaacgctgttttcatactcgatcggggatacagtacatacaccgtctaccatctgaggctgggcctctgcctttgtgaagttgaagagccaggagctactcaacaacaattgatttttgaaacttaactcttttggggcaaaagcaaagagctggttttctttgctagcccaataaatgctatttatgaagatggacctgttgaactatcagtacttggacaagatgaacaacaatatcggcattctgtgctacgaaggcgaagctgct

SEQ ID NO: 4713 - DNA, 3827 bp, Homo sapiens
  SIMILAR (529)..(1053): 261254mologous to Homo sapiens mucin,accession number M74027,Smith-Waterman Score=112.
gtcatgccaagcatagccctcatgtcagcgctgccggcttgcagcgggctgtgagaggggccggcgccgctttgtcctaggaaacgggctgcgcgtttctctttttcactcttttccatttccaggaaggacttgtaaggacttctgaaacgctgttttcatactcgatcggggatacagtacatacaccgtctaccagtaagcccttgaagggtttcgtgtgagctcgatttttttgtgcctgatttttttttttttaaacttttgcatactttgttttgatagtctgaggctgggcctctgcctttgtgaagttgaagagccaggagctactcagcaacaattgatttttgaaacttaactcttttggggcaaaagcaaagagctggttttctttgctagcccaataaatgctatttatgaagatggacctgttgaactatcagtacttggacaagatgaacaacaatatcggcattctgtgctacgaaggcgaagctgctctcaggggagaacccagaatacagaccctgccggtggcctctgccctcagcagtcaccgcaccggccctcccccaatcagccccagcaagaggaagttcagcatggagccaggtgacgaggacctagactgtgacaacgaccacgtctccaaaatgagtcgcatcttcaacccccatctgaacaagactgccaatggagactgccgcagagacccccgggagcggagccgcagccccatcgagcgcgctgtggcccccaccgtgagcctgcacggcagccacctgtacacctccctccccagccttggcctggagcagcccctcgcactgaccaagaacagcctggacgccagcaggccagccggcctctcgcccacactgaccccgggggagcggcagcagaaccggccctccgtgatcacctgtgcctcggctggcgcccgcaactgcaacctctcgcactgccccatcgcgcacagcggctgtgccgcgcccgggcctgccagctaccggaggccaccgagcgccacctgtgtctgactgcctgccttcctgcttgcctgcagctgccaccacctgtgaccccgtggtggaggagcatttccgcaggagcctgggcaagaattacaaggagcccgagccggcacccaactccgtgtccatcacgggctccgtggacgaccactttgccaaagctctgggtgacacgtggctccagatcaaagcggccaaggacggagcatccagcagccctgagtccgcctctcgcaggggccagcccgccagcccctctgcccacatggtcagccacagtcactccccctctgtggtctcctgaagggagcgcctcctccaacaacacgtggatctgcatggtttgcctgagctttgaacagtcagtacttaaaaaaaaaaaaatcatgggggtggggtggggggaagggaagggatggtttatttgcaaaaaccatgttgttgggatttgtgttctgtttttgtacttgcttggtatccgtacaagggggccctcaaacatgatagcaggaactacgcgtggaacatctgtctaatgtagcatccttacttcctgcctcagttaccaaagaaacctctgatgcaggtctgctgccccgacggggccaggactccacagcgctttctcagtcacaagccatgatgaattggtgactcagacgctttgtgctttttcctttgcttcttgagaccggggtgtgtgtggctcagcttccacggcgtgtttggttcggtccatgtgtgtgcgtgtgtatacttgaagagaactgtcgtgtctgatttgcactattggaggaggactaaagttgcgtgacaactttatgtgttatgccagaactctgagggcaaactgctgaaaaacaaagggtttaaggatgacatttctgaccatttgtgtgtttgttgttgttactgtttttgttttttttaatgtagacaatacagctttggaaggggaagtctcatacaggttataggtctttctctctctagatttcaggtgcttgcaactggactgcagactctaccaatcacgggcattttatcttctctgaacactgcagtttgttagactagagctgaggttggaggattccatagtgctttaaacgtgatgcatgttttaatggagaaaaaatagctggtttctattaattatatagacagtaaacaaaaaccttaatacttactatcttcttttcagaattagtttatttttgtcagttacagtcctagatatacttactgctggtacagttgtactctaagattggtatttgatattcactttactcacaagtagtgcgggaggccagctcctggcaggccctcgcgatgagcagtgggtcagctgcggtgtgggatgctggagtttggctgcaggctgacatcatttatttttgcatccctgtctgctttgttacaagctcccaggggaggtggggtttgtgtcttccaacttccctacatgcagaaactgctccctttgaactctcttggctgaacagcagattactgacagacaatctgtgatatggtgttttatacgcttcctcgtacgctggggccaaggcagtatacattcctctgactttatactgttattactgcatttattatttgctatattaatagctactaactagaaattagatgaagcaagcatgacagacacagctgtggaggtcacagctgctcctttttggtcaatgagcgtttctatcccctccccctggggtgtgctgtgtcccacctggcccaccagaggctcacgacgatggcacctgaccaggtgacgtgggcgtggtcacctcacctgcaaggctttgtggactctgcacaccgtatgacccccggttttacagtttttagctgttgaattttggaaattggcactgggtgaaaaggtcggaggactggctcttgtagtcacagagtggctgcaggcctttgaaaagtggaggaaagaaaagcccttctccttgccccgcacacatttcactcccactgtactgggcttccaagctttggcattcaggcccctatattttctgtaggaaaaatcgttgagaacacttttctatatgggtgattttgagaccatcgttacgctgtgcgtaaagaatgtacagagaaatttgtaggtattttttgaagaacattaatttgttaatgatatgtagctatttaatttttccctttcctattgtaatcattcattttttttgttgttcggaaaaaaaaagttgatctttttttttgtcgtagatttgtctgtaaaagtgcaggaacagttattctatgagaacactgcatctgcattcatagccacgagtttgttattgctacaggctactgagcgtcgtaacaggaaaaccacccacagctgaccggctcggtggaggacactcctgggacaggtctctttgtcagtgaacaagggcgtcactctgggaggggtcggcggtgctggcggccgggtccctggtgcactgacctatctgggataggcagtaccctggaggggggcctggggcagaggaggcagcagaaaaccaaacatttcactgagaaagccccctccctgctctaagaaggggctccgtgaagttcttcccagagccgcgctgcctgcagtgcgctctgaccttctcttcatgtgtgtaaatctgtaatataccattctctgtggcctgtttttcctggaagaagaaaaaaaaaggtttggcaggccatctttttttgtacttaaaagtagccttaagaacaataataaagtgctcttaaacc

SEQ ID NO: 4714 - DNA, 423 bp, Homo sapiens
  SIMILAR (318)..(422): 971254mologous to Homo sapiens Human secretory protein of clone CS752-3,accession number W75858,Smith-Waterman Score=195.
attttctgcatagcatcagcaatgagtctgtacaactgtcttgctgcactaattcataagataccatatggacaatgcacgattgcatgtcgtggcaaaaacatggaagtgagacttatttttctctctggactgtgcatagcagtagctgttgtttgggctgtgtttcgaaatgaagacaggtgggcttggattttacaggatatcttggggattgctttctgtctgaatttaattaaaacactgaagttgcccaacttcaagaatggtgagagtatcatggttgaactcgcagctggaccttttggaaataatgaaaagttgccagtagtcatcagagtaccaaaactgatctatttctcagtaatgagtgtgtgcctcatgcctgtttcaatattgggttttggagacattattgtacca

SEQ ID NO: 4715 - DNA, 418 bp, Homo sapiens
  SIMILAR (223)..(369): 461254mologous to Cloning vector pSport1 beta-galactosidase alpha peptide,accession number U12390,Smith-Waterman Score=86.
  misc_feature (1)...(418): n = a,t,c or g
tggtgaacagattgtccagcaataatattatgtggaactgctataatgtgtcattgattttctacaaatagacttcgactttttaaattgacttttgaattgacaatctgaaagagtcttcaatgatatgcttgcaaaaatatatttttatgagctggtactgacagttacatcataaataactaaaacgctttgcttttaatgttnnnnnnnnnnnnnngggggggccgttttaaaggatccagttttacgtccccgggctggcaacgtaaaagtttttttatggggcccccaaaattaaattcctgggccggggtttaacaacggggggaggggaaaaacctgggggttccccaattaaatcccttgtggaaannnnnnnnnggnnnnnnnntntttttttttggggccccttnnc

SEQ ID NO: 4716 - DNA, 413 bp, Homo sapiens
ctaatgtttttttttttttttttttgagacagagtctcactttgtcacccaggctggagtgcagtggcgcgatctcggctcactgcaatctccacctcccgggttcacgccattctcctgcctcagcctcccaaggagccgggaccacaggcgcccgccaccacgcccggccaatcttttgcatttttagtagagatggggtttcaccatgttagccaggatggtctcgatctcctgacctcgtgatccgcccgcctcggcctcccaaagtgctgggaccacaggcgtgagccaccgcgcctggactttttgttttttgagacagagtcttgctctgtcgccagactggagtgcagtggcccgatctcagctcactgcaacctctgcctcctgggttcaagtgagtcgtcgac

SEQ ID NO: 4717 - DNA, 756 bp, Homo sapiens
  SIMILAR (90)..(458): 841254mologous to Homo sapiens Human secreted protein encoded by gene 7 clone HLTDE74,accession number Y41314,Smith-Waterman Score=507.
  misc_feature (1)...(756): n = a,t,c or g
atttttctctctggactgtgcatagcagtagctgttgtttggnctgtgttccgaaatgaagacaggtgngcttggattttacaggatatcttggggattgctttctgtctgaatttaattanancactaagnntgcccactcaaaagtcatgtgtgatactctaggccttctcctcctctatgatgtattttttgttttcataacaccattcatcacaaagaatggtgagagtatcatggttgaactcgcagctggaccttttggaaataatgaaaagttgccagtagtcatcagagtaccaaaactgatctatttctcagtaatgagtgtgtgcctcatgcctgtttcaatattgggttttggagacattattgtaccaggcctgttgattgcatactgtagaagatttgatgttcagactggttcttcttacatatactatgtttcgtctacagttgatgatggaccatttggattgtgcaacaaatgaagaaaaccctgtgatatctggtgaacagattgtccagcaataatattatgtggaactgctataatgtgtcattgattttctacaaatagacttcgactttttaaattgacttttgaattgacaatctgaaagagtcttcaatgatatgcttgcaaaaatatatttttatgagctggtactgacagttacatcataaataactaaaacgctttgcttttaatgttaaagttgtgccttcacattaaataaaacatttagtctgtgt

SEQ ID NO: 4718 - DNA, 548 bp, Homo sapiens
  SIMILAR (183)..(548): 891254mologous to Homo sapiens Human secreted protein encoded by gene 7 clone HLTDE74,accession number Y41314,Smith-Waterman Score=541.
gggattgctttctgtctgaatttaattaaaacactgaagttgcccaacttcaagtcatgtgtgatacttctaggccttctcctcctctatgatgtatttttgttttcataacaccattcatcacaaagaatggtgagagtatcatggttgaactcgcagctggaccttttggaaataatgaaaagaatgatggaaacttggtggaagccactggtcaaccctcagctccccatgagaaattgccagtagtcatcagagtaccaaaactgatctatttctcagtaatgagtgtgtgcctcatgcctgtttcaatattgggttttggagacattattgtaccaggcctgttgattgcatactgtagaagatttgatgttcagactggttcttcttacatatactatgtttcgtctacagttgcctatgctattggcatgatacttacatttgttgttctggtgctgatgaaaaaggggcaacctgctctcctctatttagtaccttgcacacttattactgcctcagttgttgcctggagacgtaaggaa

SEQ ID NO: 4719 - DNA, 3591 bp, Homo sapiens
tcaacaagatggtgaattgactagtgggtagatccacaggacgggtgtggtcgccatgatcgcgtagtcgatagtggctccaagtagcgaagcgagcaggactgggcggcggccaaagcggtcggacagtgctccgagaacgggtgcgcatagaaattgcatcaacgcatatagcgctagcagcacgccatagtgactggcgatgctgtcggaatggacgatatcccgcaagaggcccggcagtaccggcataaccaagcctatgcctacagcatccagggtgacggtgccgaggatgacgatgagcgcattgttagatttcatacacggtgcagcagcagaggggaagagcaatccgactaggaagttggaggtccagttggagcagccggccactgccatcgcagctgggcgggggccctggctgaagagttcggccacaataaaccagggaatggggcctggtccaatttcaaaacaggccacaaagaccaagatagccccaatacagacaaagctcatcccattatagtgattagaaagtaaagtgaagatagtattaaccacacccgcgctgatggtggcatagatgggctgttgaacacctgcatccttgaagattcctgttgagtaatagaacaccttgttagccaagatggtctcgatttcctgacctcgtgatctgcccgcctcggcctcccaaagtgctgggattacaggcgtgagccaccacgcccggccccaaacgggtagatttcttttgtttttgttttttttttttgagacagagtctcgctctgtggccgtggcccaggctggagtgcagtggcacaatctcggctcactgcaagctctgccctccccgggttcgcaccattctcctgcctcagcctcccaattagcttgggaccgcaggcgcccgccaccacgcccagctaactttttttttttttgtatttttttagtagagacggagatgatgtttcaccgtgttagtcaagatggtctcgatctcctgacctcgtggatccgcccgcctcggcctcccaaagtgctgggattacaggtgtgagccaccgtgcccggcagggaccacacaatttattaaccaaccaggttaataaattcttttttttttttttggagacggagtctcactcttgtcacccaggctggagtgcagtgacacgatctcggctcactgcaatctccgcctcctgggctcaagcgattctcctgcctcagcctcctgagtagctaggattacaggctcctgccaccacaccccacacattttttgtatttttagtagagaacgggaattcgccatgttggccaggctggtcttgaactcctgatctcaggtgatccgcccgcctcggcctccctaagtgttgggactacaggcgtgagccaccatgcctggccccaaccagaacacttctgagcgtggaagaggatgctgttaattactcaagaccaaaaggcataaaaggagacatatgtccacccaagtgataaggcagtttgggaaactacatttcccagtatgccctgccccttgaaagttaaaaatcttaactggcacagagcaccctgggacacctgtggttagcaccatttaagaagtaaaaggtatagggttgggttctgacgtgaaggctttccccttccatgggacacttaaccagacacaggacacaacacctgaggtgaaatttcaatgggtattaagtctggggtagagcttctctctccccaaatctagcttccaaagatgtggagctggtggagctgtccattggtccactgccctgtttctcctgggtgctgcctctgcctcctcatatcaccagcgtccccactgccactagtctgtagggggattccgggctaggtgctcttcccactcgacttcaaccaacttatatagctccatggtggcctgggcatcttccacagaggaatgtccgctcttcccaacctggatatcccggtttagcagcttcttggtgagatgcttcagagacatggtggcattctccgggcagtcagccttccggttgaggggggggatatgggaggtgtcacgggtgagggacttggggtgaaagtactgaagggctttgaagtcgttgtggatggcatgccccaccactatcttccctgtgagtatcttcaagatctctccatccttgaaatgctcactcccacaagttttctttcttctggaatccaccttcctcttccacaggtgatttccatggtataccctgtttggactcatactgccagtggctccttaccttcttattgatctccaccccatgacattaatttgccttcagtcctaaatgacactcatgtttgagatgtccatgtatttagttcagttctggcttgctacatgaagtcctttaactattaccattatgttggccttagacacatggctgggacccgggctccagggaggctaacaaaagcccaaaattacatgcaattagatgtgtatgggtactagaggaagagaatctgtggctttcatcaaattctcagagtctacaaaccgtaaaaaattaagaatcacatataaactaaagttgcagaagcaaccttattcacactagttttggaaccaagtaaaataaaaataacttctcaatatttcaggaaactgttttttttttttgagatggagtcttgctctgttgcccaggctggagtgtactggcgcgatcttggctcactacaacctccgcctcccgggttcaagcgtttctcctgcctcagcctcccaagtagctgggactactggcacctgccaccatgcctggctaagttttgtatttttagtagagacggagtttcaccatatgggccaggctggtcttgaactcctgatcttgtgatctgcccgcttcaggctcccaaagtgctgggattacaggtgtgagccaccacacctggccttcaggtaacttattttttaaaagagatgaggtcttgctatttttcccaggttggctggcctcaaactcctgggctcaagcaatgctctcacctcaaactcctgagtagctgggattacagacacatgtcaccacacctagccatttcaggctcttgaagtaggaggacatgctaccaatgaggacaaccgaagaacacaccacaggctctgaaggccattcccaaatgaggttccaaacaggttttcaacaaaagtgacagtcctgcatagcctcccaaagggaccccctctgaaggggctaggctcatctggacataccttagtctcataaccccagcttggcactggggaagtgctttatgatgaaaaccagacgtagtcccgtgaactagatatttcgttactcctgacttcacctacttactgtccaccaccaccttcacttcttattaacctcgacatatagccctcatcaaagctgggcagatttgctgtctcagacccgtcccatcttctgcctctcctatgcctttgcttggctgcgcccctttgtgcacaagatgtttaactcttctttccgtcttttctaaaatagtcagtcacctcacctctaacgc

SEQ ID NO: 4720 - DNA, 445 bp, Homo sapiens
  SIMILAR (378)..(202): 861254mologous to Homo sapiens dJ449O17.1 (novel protein similar to TPTE (transmembrane phosphatase with tensin homology)),accession number Z98749,Smith-Waterman Score=233.
  misc_feature (1)...(445): n = a,t,c or g
cgacttcctcaccagaggcgatgttggcacccaggtagatatctccgaaggacccgctcccgatcttccgtcccaggcggtacttgttccccacacgtagctccatggctcactcttgctggagtaagggatgccctccgagggatgaggagcctccgaaaggcctgtttccttctcctcgcagcccactctacttctctccggcccgctccaacacccttttacaaatactcgaagaagaacatccatgagaaaaaataaggcaatggctagagaaatagaacgatactccaaaggaatataaagtttgctgtcagtgaaaattaggtcggcaagcccgagagtgacatccagtaagacgaggaaaaaaacaaatagtcttttactgataggtgaccccagggctgctccgctcgtgtcncgttatccgtattggggtgaccgc

SEQ ID NO: 4721 - DNA, 786 bp, Homo sapiens
  SIMILAR (724)..(774): 291254mologous to Homo sapiens ALR-like protein,accession number AF264750,Smith-Waterman Score=39.
atggggccttcacaggctgcagtgggtcccgagcccccagggctgtgcccgctggtcctgaccaagatcgcggctgccgaggggcatttggacgctgtggggaagtcgcggtctggggatattgggtccagccttcgggtagaagcaggtgataaacgcactcaggccagcccggagcgtcagccacactgcggtgcccacgatgcccaggacccacccaagacttatacccaggatgatgtgtgtttgattgaatcagggatgactcagttacagagcctcacagttacagttccaagaagaaaactgtcaaaaccaaaactgaaattgaagattataaatcagaatagcgtggccgtccttcagacccctccagacatccaatcagaacattcaagggatggtgatatggatgatagtcgagaaggagaacttatggattgtgatggaaaatcagaatctagtcctgagcgggaagctgtgaatgatgaaactaagggagtggaaggaacagatggtgtcaaaaagagaaaaaggaaaccatacagaccagccgctcctctagggcgccccctccccagctggctcctgcgcttccgcccacgggaaggtgcgggcgatcccgggctgcatccgctcttggccgtcacactcacgctgcacgatttagaagggcttggggggcagctggttgccctaatgttggatgctctgttcaaggatgagttatggattcactaccagattctactgtatgctcttgacaactatgaccacaatgggtga

SEQ ID NO: 4722 - DNA, 426 bp, Homo sapiens
  SIMILAR (146)..(3): 291254mologous to Homo sapiens ALR,accession number AF010404,Smith-Waterman Score=45.
ctgcagaataagatcttttctctatagtttcgatagcagactggacaggaagataagcttgcacaaggagcgcactgtgtgtaattgttctgccattcacatcttagacctgcagatgttgctccacagtgtctgcaccaaacacaccatttgcacttccagcctcctttgggaactgtctgcaaatggagggtctaggcagtaggtgtgataacttatgtcacagtcatcacacagcaggagtcttcctgggtcagttgccttcccacaggcctcacacacagtgcactcaagacacctccaacctttgctaagaaccactttagtgatcttaatactgacacagtatggatggtaacactgaccacactgagaacaggcaagtaatcttccttctgctccttggccaaaactgccacaaactac

SEQ ID NO: 4723 - DNA, 619 bp, Homo sapiens
  SIMILAR (220)..(453): 891254mologous to Homo sapiens dJ449O17.1 (novel protein similar to TPTE (transmembrane phosphatase with tensin homology)),accession number Z98749,Smith-Waterman Score=352.
cgaattcccggggcgacgatttcgtagcagctgctccctgaacactttctgatccatcagtcccccagcgccggacgcgccgcgccctggcggctctagggaccccccccgcgcctgcacttagccccgcgcccgagtccacagacaaacgaatttaaaggagcaaccgaggaggcacctgcgaaagaaagcccacacacaggtgaatttaaaggagcagccctggtgtcacctatcagtaaaagactatttggagttttcctcgtcttactggatgtcactctcgtccttgccgacctaattttcactgacagcaaactttatattcctttggagtatcgttctatttctctagctattgccttattttttctcatgggtgttcttcttcgagtatttgtagaagggtcaacgccaccgcctctgcactgccttcctggccatcatcccaggtagagctgccctcttccttctccgcagcttttctcatcctgcaaagcaagggtgttggagcgggccggagagaagtagagtgggctgcgaggagaaggaaacaggcctttcggagactcctcatccctcggaggtcatcccttactccaggtgatctgaacctgaa

SEQ ID NO: 4724 - DNA, 1161 bp, Homo sapiens
  SIMILAR (509)..(700): 861254mologous to Homo sapiens ALR-like protein,accession number AF264750,Smith-Waterman Score=302.
ggcacgagcaaaaattggcatgggtaaaccagctattactaagagaaaattttctcctggtagacctcggtccaaacagggggcttggagtacccataatacagtgagcccaccttcctggtccccagacatttcagaaggtcgggaaatttttaaacccaggcagcttcctggcagtgccatttggagcatcaaagtgggccgtgggtctggatttccaggaaagcggagacctcgaggtgcaggactgtcggggcgaggtggccgaggcaggtcaaagctgaaaagtggaatcggagctgttgtattacctggggtgtctactgcagatatttcatcaaataaggatgatgaagaaaactctatgcacaatacagttgtgttgttttctagcagtgacaagttcactttgaatcagtttgtggcagttttggccaaggagcagaaggaagattacttgcctgttctcagtgtggtcagtgttaccatccatactgtgtcagtattaagatggatgcatgcagtttgtcagaacttaaatactgaggaagaagtggaaaatgtagcagacattggttttgattgtagcatgtgcagaccctatatgcctgcgtctaatgtgccttcctcagactgctgtgaatcttcacttgtagcacaaattgtccacaaaagtaaaagagctagacccacccaagacttatacccaggatggtgtgtgtttgacctgaatcagggatgactcagttacagagcctcacagttacagttccaagaagaaaacggtcaaaaccaaaattgaaattgaagattataaatcagaatagcgtggccgtccttcagacccctccagacatccaatcagagcattcaagggatggtgaaatggatgatagtcgagaaggagaacttatggattgtgatggaaaatcagaatctagtcctgagcgggaagctgtggatgatgaaactaagggagtggaaggaacagatggtgtcaaaaagagaaaaaggaaaccatacagaccaggctggagtgagcagttaccagatactttagttgatgaatctgtttctgttactgaaagcactgaaaaaataaagaagagataccgaaaaaggaaaaataagcttgaagaaactttccctgcctatttacaa

SEQ ID NO: 4725 - DNA, 3493 bp, Homo sapiens
  SIMILAR (2056)..(2463): 851254mologous to Homo sapiens ALR-like protein,accession number AF264750,Smith-Waterman Score=583.
atgttaagcactattaaagtcttccaaatctaccagttacggagttattggtcttggactaacactcctgaaaagaaaaaaaccaaacaaaataagacaatacctaaaaacctggataaaatggcctaccgtgggcactggcaatgcatccaagcaggccttcggtttcctcacctacaagatgagagggctggaccagatggaaattcagggggtaaggggatgtcctcacgcagcccacccccacccccacgggaccctggagcctccatcccagttcccaccacgcacccgctccacaaatcctgcccaaggacgccagtagagctggcagccgagtctgccgctcccgccctcagagccgtggcggcggggacaaaaatcctcggcggcgggggcaaaacgccgcggcggcgaaaaagtcgctgcggcagggggacaaaaagccgtgacagcggggcgcaaaaagccgcggcgggtaaaaggccgtggcgagtaaaaagccgcgatggcaaaaagccgcggcgggcaaaaagccacggcggcggtggggcaaaaagcagcggcggtggcggaggggcaaaaagccgcggcagcgagggggcagaaagccgcggcggcaaaaagccaaggtggcgagtgtgcaaaaagctgtgtcggcggtggggcaaaaagccgcggcggcagaggggcaaaaagccgcggcggcgggggggaaaaatccacggcgggaaaaagccgcggcggcgagggggcaaaaagctgcggggatgccaaaagcggcggggtgcaaaaggcggcggggggcaaaaggcggcggggggcaaaaagccgcagcggcggggggcgggcaaaaagccgcggcgacaaaattcgcaacggcgaggggtcaaaaagccggggcggactaaaagccctggcgccgggggggcacaaagccgcggcggcggtggggcaaaaagccgcagcggcgggtgggggcagaaagccgcagcggcgatggggcaaaaagccacggcggcggggagccatggggccttcacaggctgcagtgggtcccgagcccccagggctgtgcctgctggtcctgaccaagatcgcggctgccgaggtcagtccagcgccaagggcacagggccagggcaggcggggcagggctacccgaagcgcatagaggctgctggtgtcaacgagtggaagccgctgatgaagtcaaagctgcctcctccttcaggaagactttgctcccatagctggcgaacaggaagcggagcagcaccaggaggatctgcgggcgctgctgagggcttctttgcagggacagtgcagcaggcagccagggacaagactgcacggcagcgccccatggccaggggaagctcagaaccggagtcgcccgctgcccggcgattctccatccctggatcggtacaggggcatttggacgctgtggggaagtcgcggtctggggatattgggtccagccttcgggtagaagcaggtgataaacgcactcaggccagcccggagcgtcagccacactgcggtgcccacgatgcccaggacatttcaggaggtcgggaaatttttaaacccaggcagcttcctggcagtgccatttggagcatcaaagtgggccatgggtctggatttccaggaaagcggagacctcgaggtgcaggactgtcggggcgaggtggccgaggcaggtcaaagctgaaaagtggaatcggagctgttgtattgcctggggtgtctactgcagatatttcatcaaataaggatgatgaagaaaactctgtgctcgatatggttgtgttgttttctagcagtgacaaattcactttgaatcagtttgtggcagttttggccaaggagcagaaggaagattacttgcctgttctcagtgtggtcagtgttaccatccatactgtgtcagtattaagatggatgcatgcagttcgtcagaacttaaatactgaggaagaagtggaaaatgtagcagacattggttttgattgtaacatgtgcagaccctatatgcctgcgtctaatgacccacccaagacttatacccaggatggtgtgtgtttgactgaatcagggatgactcagttacagagcctcacagttacagttccaagaagaaaactgtcaaaaccaaaactgagattgaagattataaatcagaatagcgtggccgtccttcagacccctccagacatccaatcagaacattcaagggatggtgatatggatgatagtcgagaaggagaacttatggattgtgatggaaaatcagaatctagtcctgagcgggaagctgtgaatgatgaaactaagggagtggaaggaacagatggtgtcaaaaagagaaaaaggaaaccatacagaccagccgctcctctagggcgccccctccccagctggctcctgcgcttccgcccacgggaaggtgcgggcgatcccgggctgcatccgctcttggccgtcacactcacgctgcacgatttagaagggcttggggtgcggggttccctgagtctccgccgggagcgggggtccgggggtctgcggggggaccttacagagtccccttaccctcacggtactgggggacaacccgtgggtgggcagctggttgccctaatgttggatgctctgttcaaggatgagttatggattcactaccagattctactgtatgctcttgacaactatgaccacaatggtcctgatccgactgacctggcgggagtcatcattgagctcggccccaatgacagtccacagacaagtgaatttaaaggagcaaccgaggaggcacctgcgaaagaaagtgctgctgactgtattcttttatcatcctctagcccacacacaagtgaatttaaaggagcagcccgggtgtcacctatcagtgaaagactatttggagttttcctggtcttactggatgtcactctcatccttgccgacctaattttcactgacagcaaactttatattcctttggagtatcgttctatttctctagctattgccttattttttctcatggatgttcttcttcgagtatttgtagaaagacaccaaagaacatctgctagcatcaacactatccaggaaaacatgacctcaccaaatgaactaaataagacaccaggggccaatcctgtagaaacagagatatgtgacctttcagacaaagaaatcaaaataactgtgttgaggaaggaaactcaaagaaattcaagataacacagagaagaaatttagaattctatcagcctgctttctggattcagctctatccggagaaatcagtcgggggacactcctcagctggcagcaggctgaagcacacaccacagagggacctggggacgcccgttggtcagggctttcctggccagctgtgaccagggtcaagccctgctgcaccgagtctcatactgagactgagcgtggagatgtgggaatccccgtgtga

SEQ ID NO: 4726 - DNA, 603 bp, Homo sapiens
  SIMILAR (217)..(585): 871254mologous to Gallus gallus capping protein alpha 2 isoform,accession number M80589,Smith-Waterman Score=579.
atggccaacttcaatgattgtgtgttggataaggagaaggtatgcatagctgctaaattcatcactcatgcacccgcaggagaatttaatgaagtattcagtgatattcggctactatgtaataatgacagtctcctcagggaaagggcagcacgtgcatttgcccattataacatggatcagttcacacccgtgaagatggaaggatgtgaagatcagactattattgcatgtattgaaagccatgagtgtcagcctaaaaacttctggaatggtcgttggagatcagagtggaagtttaccatcacaccacctacagcccaggtggttggagtgcttaagattcaggttcactattacgaagatggcagtgttcagttggttagtcataaagatgtacaggattcgctaactgtttcgaatgacgcacaaactgccaaggagtttattaaaatcatagagaatgcagaaaatgaatatcagacagcaattagtgaaaactgtcaaacaatgtcagataccacattcaaggtcttgcgccggcagcttccggttacccgcaccaaaattgactggaacaagattactcagctacaacattag

SEQ ID NO: 4727 - DNA, 2379 bp, Homo sapiens
  SIMILAR (1)..(567): 741254mologous to Homo sapiens capping protein alpha subunit isoform 1,accession number U56637,Smith-Waterman Score=682.
atggccgacttcgatgatcgtgtgtcggatgaggagaaggtacgcatagctgctaaattcatcactcatgcacccccaggggaatttaatgaagtattcaatgacgttcggctactacttaataatgacaatctcctcagggaaggggcagcacatgcatttgcccagtataacatggatcagttccacgctgtgaaagatagaaggatatgaagatcaggtcttaattacagagcatgggggacctgggtaatagcagagttttagatccaagaaacaaaatttccttttaaatttgaccacttacggaaagaagcaagtgacccccagccagaagaagcagatggaggtctgaagtcttggagagaatcctgtgacagtgctttaagagcctatgtgaaagaccattattccaacggcttctgtactgtttatgctaaaactatcgatgggcaacagactattattgcatgtattgaaagccaccaggtttcagcctaaaaacttctggaatggtcgtttggagatcagagtggaaggtcccccatcacaccaccttcagcccaaggtggttggcgtgcttaagattcaggttcactattatgaagatggcaatgttcagttggttagtcataaagatgtacaggattcactaactgtttcgaatgaagcccaaactgtccaaggagtttatttaaaatcatagagaatgcagaaaatgagtatcagacagccatttgtggaaactatcaaacaatgtcagataccacattcaaggcccttcgccggcagcttccagttacccgcaccaaaatcgactggaacaagatactcagctacaagattggcaaagaaatgcagaatgcttaaaggctgaatgtagggttcttccagtatgtgggaaagacaagggtttcaacgtgtgggtcatatgataaataagtgatttataaacaagagtgatattttgctagggctttcaaagttaaccggttttctagcctcatggaatactgttgaacctatagcgttgtcttgattcttttgtgttctctgccttgtaattttctgttactgctatatctacgtgtaaatctttttttctttttttttttttttttttttcttttttggttaattctgccacatttaatgttggtgagagagtgatctatcctaatgacatttactgtttaaaaaagtttcctagccatgaagccctgctactgatttagacaaggtattatggtcattactttgtacccctatccttccaagcacttctggtacttcagtcgtttttactgatccaccaacacctaaagaggctatgctacagtctctagctaaatggaagacacattcatccttctccctctgactgctttgatcatcatttattgcatcgtcatatcatatttatcgcatctcataactaactttctaaagtttggattgggacttttcaggtcctttttggagggcaaaggaagttccagcttctctggggaacttgtttttaaatccaaagacttgaaccacattccctgcacatgaacatgtttgcttttatcccttctctcattggctccttcccatcttagtaccattgtagttatacatctgcattttttagaagcattttacccatttatttttttaaacattcaagaactgctgacgtactgtggatgtagagtataaaacttgaaaaatgcagatgttgaaggaataataggtatcttgtgctttaatactttatggcaggattgtactataagcaaatgaattaaacagctatgtaaatcataaagaaaaactaaaaatgaaccaaagtgaaaggataacttccaggcagtatctttctattgtaacctgttatttaaggaaatactagtgatttcttctaaataggatgtaaacttctttcaaattactcttcctcagtctgcctgccaagaactcaagtgtaactgtgataaaataacctttcccaggtatattcggcaggtatgtgtgtaatctcagaatacacaggtgacatagatatgatatgacaactggtaatggtggattcatttacattgtttacacttctatgaccaggccttaagggaaggtcagttttttaaaaaaccaagtagtgtcttcctacctatctccagatacatgtcaaaaagaaaaggtgtttgtgctccgttttgtttctgctcagtaatatagtcaagcaagtttgttccaggtgacccattgagctgtgtatgcatttttgtttatttcaataaaatatatttgtattatttgtccttcatactatccatccataccacactatcttctgtatcaggtagtctaatagaaatatacctgttttgttct

SEQ ID NO: 4728 - DNA, 693 bp, Homo sapiens
  SIMILAR (11)..(328): 351254mologous to Homo sapiens alpha1 (III) collagen,accession number X06700,Smith-Waterman Score=101.
atggccatcagggtccgcctcgcggccgcgccacctgagagcccccgagccagtggtgcaaggctgggaagaacaaaggagcaggactcaccccagcagcggaacgtcgggctgcgctggacgcgccgagagccgcggcccgcccaccgggtcacatggctcagagccgagcagaggatcaaaggggctttgtggtcgcggaacaaggagcctcccagagcgcggggcagaggtgctcccccacctacctgctcagacatcgccacagctgggctctcagggagcatggccagccaccccagaaagccattcagacctgcagccagggctggaacacagccacctgggtttgtcccctctaccccagcacttctcaaagttctctaccgctcagcacacactcagcattcaggtagagcagccccagagccttctcggctggccctcggtccaaccctccagcagaaacggcacatgggccacagacgcaaccttacattttccagcacctacaataaaaaatgtggatttggctgggctgtggagatgcgcttctcagcccttctagatgttaccaccacgccctcccgagtggccttctggggcagtcgggggccccctctaggaatggagcgccagctccagctcctgtcaggctacagcccagatggttggctgagcacgagcatgtga

SEQ ID NO: 4729 - DNA, 654 bp, Homo sapiens
  SIMILAR (299)..(553): 221254mologous to Plasmodium falciparum glutamic acid-rich protein,accession number J03998,Smith-Waterman Score=135.
atggacacaaggataggaacaacagacactgggacctatgggaaggtggagggtgcaaggaggatgaggctcaaaaagttacctattgagtattatgcttattacctggatgatgaaataatctgcacatcaaatccctgtgagtttccagggtatggaatagaaagggagtacccgtgtgaaaccagcggacctcttgagttgacagtccaggaagaccaaggtgaagaaccacagagagaagaacttactagaaagaaaacttcaaaggtctgccgtgggtcccccttagcctgggcaacaggagtgaaaccctgtctcaaaaaaaagaggaggagaagaaaagaagaaagaagaaagaagaaagaagaaggagaaggagaaggagaagaagaagaagaagaagaagaagaagaggaggaggaggaggaggaggaggaggaggaggaggaggaggaggaggaggaggaggagaagaagaagaagaagaagaagaagaagaagaagaagaagaagaagaagaagaagaagaagaagaagaagaagaagaaagtgatccctgtacatcatggaatactagtcagccataaaaaaggaatgaaatctggcctttgcagcaacatgaatgcagctggaggccgttatcctaagtga

SEQ ID NO: 4730 - DNA, 291 bp, Homo sapiens
  SIMILAR (10)..(234): 851254mologous to Homo sapiens Human thyrotropin GPR N- terminal sequence,accession number W03626,Smith-Waterman Score=311.
atggggttttgccatattggccaggctagtctcgaactcctgacctcaggggaggaagaggaggaagaggaggaagaggaggaggaagaggaagaggaggaagaggaggaagaggaggaggaagaggaagaggaggaagaggaggaggaagaggaagaagaagaagaagaagaagaagaagaagaagaagaagaagaagaagaagaggaagaggaagaagaagaagaagaagaaatagctttaggcggagatcaaatcctaacaggaaaacacatggcatttttgaaataa

SEQ ID NO: 4731 - DNA, 237 bp, Homo sapiens
  SIMILAR (57)..(215): 421254mologous to Gallus gallus winged-helix transcription factor,accession number Y17794,Smith-Waterman Score=97.
atgagaagttcagttataggcccaaggtcacatatcccgagccagcgtaaaagtggaatccaggaggaggaggaggaggaggagcaggaggaggaggaggaggaggaggaggaggaggagaagaagaagaagaagaagaagaagaagaagaagaagaagaagagaaaggattactggaccaagaagctgccagacatttggttctcccagcagcaacccaatgcaaaccaaaaatga

SEQ ID NO: 4732 - DNA, 819 bp, Homo sapiens
  SIMILAR (432)..(761): 581254mologous to Homo sapiens Human thyrotropin GPR N- terminal sequence,accession number W03626,Smith-Waterman Score=268.
atggccagccattcttcacccatgggcagccaatactactatggattccctgggccagactctgcaatgcatgctttgaacacagtggtgagcgagaaagacctcacgcttgacctctcagggcttgtggcccgcaacaaacgctgtgggccccactcatattccctcaacactcaccttctccatgcgtgcctacggcttcctactcagagagagaacacaacactcaagacttttattccccaaggctgggagatccatacagaccaggtggaaagggaggcagaatgccagccaggccggctgaagatttgtgtgcatgatacagctcaggaacttccacttgctagcacagcacgcaatgctcttcttggcaggaatctttgccccttccggcagagcagtaccactcagatgccagatgaaatccccatcagcctggatgacagaatgaggcccccatctctgaagaagaagaaggagtgggagaagaggaagaggaagaggaatgagaaggagaaggaggaggaggaggaggaggagaaggagaagaagaagaagaagaagaagaagaagaagaagaagaagaagaagaagaagaagaagaagaagaagaaggaggaggaggaggagtgggagaagaggaagaggaagaggaaggagaaggagaaggaggaggaggagaagaagacgaagaagaataagaagaagaagaagaagaacagaagaagaaggagaagaagaagaaagaacaagaagaaggaggaggagaaggagggatggagaagaaatgaatatttcaggctgggtagtttatga

SEQ ID NO: 4733 - DNA, 380 bp, Homo sapiens
  SIMILAR (17)..(121): 301254mologous to Homo sapiens JM24 protein,accession number AF196972,Smith-Waterman Score=36.
tggacactgatcaggccctgctggccaggtccctgtgcgcatgccatgcgaggggtcagggccgctccctagggtccctcctgcccaacatgtggaggtggctggttcccatgaacgtggttgtcagaggcgggggacagcagaggctgcagactggcccacttccctcctccccagggatgccaagcttggatcatggccctaatcccaaccccaaccccatgggaggaggaggaggaggaagaagaggaggaggaggaggaggaggaggaggaggaggaggaggccaggtcctggtggagcctttgcccagcccagtcctctctgcctcctcctggctgaagctgtttgtcaggattaccctcgggctaaagaggaaa

SEQ ID NO: 4734 - DNA, 654 bp, Homo sapiens
  SIMILAR (226)..(387): 811254mologous to Homo sapiens Human thyrotropin GPR N- terminal sequence,accession number W03626,Smith-Waterman Score=225.
caagggctgaaaaatgaagcgtctactctgctggctacgcttgagatgctcccatgctatcaggacactcagcatattgactttggaagcaaggaagccacctccaattcacagagctggtgcctctgcctcattcatgaaaggacccaccaaaacctgatccagttatcaggttcatcaggccttgggagggttgcattagaacttcagaaaacacagcccagagccacgccgccatctgagcatctggggaaaaggcaggaggaggaggaggaggaggaggaggaagaggaggaggaggaggaggaggaggaggaggaggaggaggaagaggaagaagaagaagaagaagaagaagaagaagaagaagaagaagaagaagaagatttattatataatttcatttatataatattctcaaaaatgcccactaagctcaagatttgtaaacacaccaatcagcaccctgtgtctagctcagggtttgtgaatgcaccaatcgaagctctgtatctagctaatctagtggggacgtggagaacctttgtgtctagctcagggattgtaaaggcaccaatcagtgccccgtcaaaacagaccactcggctctctgtaaaatggaccaatcagcaggatgtgggtggggccagataa

SEQ ID NO: 4735 - DNA, 621 bp, Homo sapiens
  SIMILAR (319)..(441): 1001254mologous to Arabidopsis thaliana putative protein,accession number AL162506,Smith-Waterman Score=206.
atgaggaaccccaagggatccctagatcaccctttgagaatcactgatgtagaacactccctgtcagagagtatatggcagggctgtaactgccaagaaagtgactccttaagacttccaaaacttgtacataaagggttatacaacttctttctggtcctcttggaacactggctcctggaacgtagtccctatgccataaggaagctgaaggaggccatggaaaggcccatgtggaaggaaagagagccccctccaatctgcaaccctcggccccagctgagctttcaggaaacaatagcattagctttcaatcatgaggaggaggaggaggaggaggaggaagaggaggaggaggaggaggaggaggaggaagaagaagaagaagaagaagaagaagaagaagaagaagaagaagaagaagaagaagaagaagaagatttattatataatttcatttatataatattctcaaaaatgccaactaaggtaccaagtctatgggactctaaattaggagcagagcaggccgctccagaagagaataataaaaaggagcaacaggaggaatatcaaggaaagagtttctcctttctgaatcttactgaatgctggccctaa

SEQ ID NO: 4736 - DNA, 417 bp, Homo sapiens
  SIMILAR (31)..(96): 651254mologous to Alcelaphine herpesvirus 1 putative immediate early protein,accession number AF005370,Smith-Waterman Score=68.
atgaagggaagaagaaggaaaaagaaggaaggagaaggaggaggaggagaatcggaaagaggaggaggaggaggagaaggagaaggagaaggagaagaagaagaagaagaagaagaagaagaagaagaagaagaagaagaagaagaagaagaagaagaaaaagaagaagaagaagaagaagaagaagaacaagaagaagaagaagacgacgaagaagaagaggaagaaaaatcctgtagtgtcaatgtctcactgatagaattaccctgggaccccaaggcctacagcaggctagctcctctatcctcacagcctggccctgctgtcaaggtgcccactgagcacctcattgcaaaactcgaggactgtgtccagggcttcacttacttgaccgtggaaaagcgttgggcccggtga

SEQ ID NO: 4737 - DNA, 692 bp, Homo sapiens
  SIMILAR (319)..(444): 1001254mologous to Arabidopsis thaliana putative protein,accession number AL162506,Smith-Waterman Score=211.
atgaggaaccccaagggatccctagatcaccctttgagaatcactgatgtagaacactccctgtcagagagtatatggcagggctgtaactgccaagaaagtgactccttaagacttccaaaacttgtacataaagggttatacaacttctttctggtcctcttggaacactggctcctggaacgtagtccctatgccataaggaagctgaaggaggccatggaaaggcccatgtggaaggaaagagagccccctccaatctgcaaccctcggccccagctgagctttcaggaaacaatagcattagctttcaatcatgaggaggaggaggaggaggaggaggaagaggaggaggaggaggaggaggaggaggaggaggaggaggaagaggaagaagaagaagaagaagaagaagaagaagaagaagaagaagaagaagaagatttattatataatttcatttatataatattctcaaaaatgccaactaaggccatgagcatttccagcatgttcaagtttgccaccaagattagaatgactgtgactccaaatcccaagtgttgttggattcctgtgtttcctgcatacctctccacatctaaagctgccaaatgtatgcaccatacagctcatcatggtcaggagaagtcagatcactgcatttcaccttcccccatccctgctccagg

SEQ ID NO: 4738 - DNA, 3817 bp, Homo sapiens
  SIMILAR (17)..(3814): 1001254mologous to Homo sapiens erbb2-interacting protein ERBIN,accession number AF263744,Smith-Waterman Score=6549.
tcgacccacgcgtccggagtttccagaaaatataaaaaattgtaaagttttgacaattgtggaggccagtgtaaaccctatttccaagctccctgatggattttctcagctgttaaacctaacccagttgtatctgaatgatgcttttcttgagttcttgccagcaaattttggcagattaactaaactccaaatattagagcttagagaaaaccagttaaaaatgttgcctaaaactatgaatagactgacccagctggaaagattggatttgggaagtaacgaattcacggaagtgcctgaagtacttgagcaactaagtggattgaaagagttttggatggatgctaatagactgacttttattccagggtttattggtagtttgaaacagctcacatatttggatgtttctaaaaataatattgaaatggttgaagaaggaatttcaacatgtgaaaaccttcaagacctcctattatcaagcaattcacttcagcagcttcctgagactattggttcgttgaagaatataacaacgcttaaaatagatgaaaaccagttaatgtatctgccagactctataggagggttaatatcagtagaagaactggattgtagtttcaatgaagttgaagctttgccttcatctattgggcagcttactaacttaagaacttttgctgctgatcataattacttacagcagttgcccccagagattggaagctggaaaaatataactgtgctgtttctccattccaataaacttgagacacttccagaggaaatgggtgatatgcaaaaattaaaagtcattaatttaagtgataatagattaaagaatttaccctttagctttacaaagctacagcaattgacagctatgtggctctcagataatcagtccaaacccctgatacctcttcaaaaagaaactgattcagagacccagaaaatggtgcttaccaactacatgttccctcaacagccaaggactgaggatgttatgtttatatcagataatgaaagttttaacccttcattgtgggaggaacagaggaaacagcgggctcaagttgcatttgaatgtgatgaagacaaagatgaaagggaggcacctcccagggagggaaatttaaaaagatatccaacaccatacccagatgagcttaagaatatggtcaaaactgttcaaaccattgtacatagattaaaagatgaagagaccaatgaagactcaggaagagatttgaaaccacatgaagatcaacaagatataaataaagatgtgggtgtgaagacctcagaaagtactactacagtaaaaagcaaagttgatgaaagagaaaaatatatgataggaaactctgtacagaagatcagtgaacctgaagctgagattagtcctgggagtttaccagtgactgcaaatatgaaagcctctgagaacttgaagcatattgttaaccatgatgatgtttttgaggaatctgaagaactttcttctgatgaagagatgaaaatggcggagatgcgaccaccattaattgaaacctctattaaccagccaaaagtcgtagcacttagtaataacaaaaaagatgatacaaaggaaacagattctttatcagatgaagttacacacaatagcaatcagaataacagcaattgttcttctccatctcggatgtctgattcagtttctcttaatactgatagtagtcaagacacctcactctgctctccagtgaaacaaactcatattgatattaattccaaaatcaggcaagaagatgaaaattttaacagccttttacaaaatggagatattttaaacagttcaacagaggaaaagttcaaagctcatgataaaaaagattttaacttacctgaatatgatttgaatgttgaagagcgattagttctaattgagaaaagtgttgactcaacagccacagctgatgacactcacaaattagatcatatcaatatgaatcttaataaacttataactaatgatacatttcaaccagagatcatggaaagatcaaaaacacaggatattgtgcttggaacaagctttttaagcattaattctaaagaggaaactgagcacttggaaaatggaaacaagtatcctaatttggaatccgtaaataaggtaaatggacattctgaggaaacttcccagtctcctaataggactgaaccacatgacagtgattgttctgttgacttaggtatttccaaaagcactgaagatctctcccctcagaaaagtggtccagttggatctgttgtgaaatctcatagcataactaatatggagattggagggctaaaaatctatgatattcttagtgataatggacctcagcagccaagtacaaccgttaaaatcacatctgctgttgatggaaaaaatatagtcaggagcaagtctgccacactgttgtatgatcaaccattgcaggtatttactggttcttcctcatcttctgatttaatatcaggaacaaaggcaattttcaagtttgattcaaatcataatcccgaagagccaaatataataagaggccccacaagtggcccacaatctgcacctcaaatatatggtcctccacagtataatatccaatacagtagcagtgctgcagtcaaagacactttgtggcactccaaacaaaatccccaaatagaccatgccagttttcctcctcagctccttcctagatcagagagcacagaaaatcaaagttatgctaaacattctgccaatatgaatttctctaatcataacaatgttcgagctaatactgcataccatttacatcagagacttggcccagcaagacatggggaaatgtgggccatctcaccaaacgaccgacttattcctgcagtaactcgaagtacaatccagcgacaaagtagtgtgtcctccacagcctctgtaaatcttggtgatccaggctctacaaggcgggctcagattcctgaaggagattatttatcatacagagagttccactcagcgggaagaactcctccaatgatgccaggatcacagagacccctttctgcacgaacatacagcatagatggtccaaatgcatcaagacctcagagtgctcgaccctctattaatgaaataccagagagaactatgtcagttagtgatttcaattattcacggactagtccttcaaaaagaccaaatgcaagggttggttctgagcattctttattagatcctccaggaaaaagtaaagttcctcgtgactggagagaacaagtacttcgacatattgaagccaaaaagttagaaaagatgcctttgagtaatggacagatgggccagcctctcaggcctcaggcaaattatagtcaaatacatcacccccctcaggcatctgtggcaaggcatccctctagagaacaactaattgattacttgatgctgaaagtggcccaccagcctccatatacacagccccattgttctcctagacaaggccatgaactggcaaaacaagagattcgagtgagggttgaaaaggatccagaacttggatttagcatatcaggtggtgtcgggggtagaggaaacccattcagacctgatgatgatggtatatttgtaacaagggtacaacctgaaggaccagcatcaaaattactgcagccaggtgataaaattattcaggctaatggctacagttttataaatattgaacatggacaagcagtgtccttgctaaaaactttccagaatacagttgaactcatcattgtacgagaagtttcctcataa

SEQ ID NO: 4739 - DNA, 2451 bp, Homo sapiens
  SIMILAR (538)..(1746): 541254mologous to Mus musculus endonuclease/reverse transcriptase,accession number AF016099,Smith-Waterman Score=1122.
atggagaatgactttgacgagttgagagaggaaggcttcagaagatcaaactactccgagctaaaggaggaagttcaatccaatggcaaagaagttaaaaactttgaaaaaaaattagacgaatggctaactagaataaccaatgcagagaagttcttaaaggacctgatggagctgaaagccacggcacgagaactacgtgacgaatgcacaagcctcagtagccgatgcgatcaactggaagaaagggtatcagcgatggaagacaaaatgaatgaaatgaagcgtgaagagaagtttagagaaaaaagaataaaaagaaacgaacaaagcctccaagaaatatgggactatgtgaaaagaccaaatctacgtctcattggtgtacctgaaagtgatggggagaatggaaccaagttggaaaacactctgcaggatattatccaggagaacttccccaatctagcaaggaaggccaacattcaaattcaggaaatacagagaacgccacaaagatactcctcgagaagagcaactaactccaagacacactttaaaccaacaaagatcaaaagagacaaagaaggccattacataatggtaaagggatcaattcaacaagaagagctaactatcctaaatatatatgcacccaatagaggagcacccagattcataaagcaagtcctgagtgacctacaaagagacttagactcccacacaataataatgggagactttaacaccccactgtcaacattagacagatcaatgagacagaaagttaacaaggatatccaggaattgaactcagctctgcaccaagcagacctaatagacatctacagaattccccaccccaaatcaacagaatatacattcttttcagcaccacaccacacctattccaaaattgaccacatagttggaagtaaagcactcctcagcaaatgtaaaagaacagaaattataacaaactgtctcttagaccacagtgcaatccaactagaactcaggattaagaaactcactcaaaaccactcaactacatggaaactgaacaaccttctcctgaatgactactgggtacataacgaaatgaaggcagacataaagctgtactttgaaaccaatgagaaaaaagacacaacataccagaatctctgggacacattcaaagcagtgtgtagagggaaatttatagcactaaatgcccacaagagaaagcaggaaagatctaaaattgacaccctaacatcacaattaaaagaactagagaagcaagagcaaacacattcaaaagctggcagaaggcaagaaataactaagatcagagcagaattgaaggagatagagacacaaaaaacccttcaaaaaatcaatgaatccaggagctggttttttgaaaggatcaacaaaattgatagactgctagcaagacaaacaaagaagaaaagagagaagaatcaaatagacgcaataaaaaatgttaaaagggatatcaccaccaatcccacagaaatacaaactaccatcagagaatactataaacacctctatgcaaataaactagaaaatctaaaagaaatggataaattcctggacacatacactctcccaagactaaaccaggaagaagttgaatctctgaatagaccaataacaggctctgaaattgaggcaataattaatagcttaccaactaaaaaaaaaaaagatggaatctttcctaactcattttatgaggccagcatcatcctgataccaaagcctggcagagacacaaccagaaaagagaattttagaccaatatccctgatgaacattgatgcaaaactcctcaataaaattctggcaaaccgaatccagcaacacatcaaaaagcttatccaccatgatcaagtgggcttcatccctgggatgcaaggctggttccacatgcaaaaatcaataaacgtaatccagcatataaacagaaccaaagacaaaaaacacatgattatctcaatagatgcagaaaaggcctttgataaaattcaacaacacttcatgctaaaaactctcaataaattagatattgatggaacgtatctcaaaataataagagctatctatgacaaacccacagccagtatcatactgaatgggcaaaaactggaagcattccctttgaaaactggcacaagaaagggatgccctctctcaccacaactattcaccatagtgttggaagttctggccagggcagttaagcaggagaaggaaataaagggtattcagttaggaaaagaggaagccaaattgtccctgtttgcagatgacatgattgtatatctagaaaaccccattgtctcagcccaaaatctccttaagctgataagcaacttcagcaaagtctcaggatacaaaatcaatgtgcaaaactcaacaagcattcttatacaccaataa

SEQ ID NO: 4740 - DNA, 4965 bp, Homo sapiens
  SIMILAR (3025)..(4347): 1001254mologous to Homo sapiens erbb2-interacting protein ERBIN,accession number AF263744,Smith-Waterman Score=2293.
atgctctccacactccgccgcactctatttgcgctgctggcttgtgcgtcttttatcgtccatgccgctgcaccagatgaaatcaccaccgcctggccggtgaatgtcgggccactaaacccgcacctttacacgcctaaccagatgttcgcccagagcatggtttatgaaccattggtgaaatatcaggcagacggttcggtgatcccgtggctggcaaaaagctggactcattcagaagatggtaaaacctggaccttcaccctgcgtgatgacgtgaaattctccaacggtgaaccgttcgatgccgaggcggcggcagaaaacttccgcgcagtgctcgataaccgtcaacgtcacgcctggctggagctggcaaaccagattgttgatgttaaagcactcagtaaaacagagctgcaaattaccctgaaaagcgcctactatcctttcctgcaagaactggccctgccccgtcctttccgttttatcgctccctcgcagtttaaaaaccatgaaaccatgaacggaattaaagcgccgattggcaccggaccgtggattttgcaggaatcgaaactgaatcagtacgatgtcttcgtccgtaacgaaaactactggggcgaaaagccagcgattaaaaagatcacctttaacgtcatcccggacccgactacccgcgcggtggcgtttgaaactggcgatatcgacctgctgtacggaaacgaagggttattaccgctcgataccttcgcccgctttagcccagaatccggcttaccacacccaactgtcacagccgatcgaaaccgtgatgctggcgctcaataccgccaaagggagccaccccgggcccggcccaacaggaggcccctggccacggggctccccatcggggctcccgggagcctgaagggcccaccggagataagagctgctggaaagccatggagggaaaacccaggtttccacgggacatcaaaggacaggagctccaccaacactgacagctcagggctaacttattctccaggaattatcccaattgcctgcaatgcaacacagctgcctctgcaggagaccctttccctttccacagggacagcctccatcctgtgcaaagagcggaaaggtctggcctcctggcctccagatagaacaacactgagttcagaactccctgtgggatctgaaccaggcttaggatttgcctgtgagaaaggagatcctggaggcggtagaggagaccatggtcctgcgcgctgcccggtctcagccctccctctgtcccctggagccagctcctgcagctgtggcagagaagctggacctcagtgtgcctccctgggttttggctccagcaataatcaggaacaagcccagccagcccagagtgtgacggtgtggccaggggaaccaggccagagtgtgacggtgtgggcccatgggtggaccccatgtcccaaaaacgtggccaggaagtatgcagtcactgttagctacctcaccccaccagggctgagcctcacagggctctcagccacagcagtggaggctcctctgagaagcctgtgcagggctgaaatctggcggggagcagggaaggggtgggagagctgtcagacagggacgtttaagtctgcagaagttgtctgctgccttttgttcagctatgccctgcccccagaggtggagtctacacaggcagatgatacaaaggaaacagattctttatcagatgaagttacacacaatagcaatcagaataacagcaattgttcttctccatctcggatgtctgattcagtttctcttaatactgatagtagtcaagacacctcactctgctctccagtgaaacaaactcatattgatattaattccaaaatcaggctcttgagaaattggttgtctataatgttggcagtgggtttgaacgggaatagaagaggcattgagatgtcctctaaagaaaggatggttaatatcactcaatacgctatggaatctgaagaactttcttctgatgaagagatgaaaatggcggagatgcgaccaccattaattgaaacctctattaaccagccaaaagtcgtagcacttagtaataacaaaaaagaaatacaaactaccatcagagaacactataaacacctctatgtaaataaactagaaaatctagaagaaatggataaattcctggacacatacaccctcccaagactaaaccaggaagaagctgaattgctgaatagaccaataacaggctctgaaattgaggcaataattaatagcctaccaaccgaaaaaagtccaggaccagacggattcacagccgaattctaccagagaaccaaagacaaaaaccacatgattatctcaatagatggaggaaaggccttcgacaaaattcaacagcccttcatgctaaaaactctcaataaactgggtattgatggaacatatctcaaaagaataagagctatttttgacaaacccacagccaatatcatactgaatgggcaaaaactggaagcattccctttgaaaactggcacaagacagggatgccctctctcaccactcctattcaacatagtgttggaagttctggccagggtaatcaggcaagagaaagaaataaagggtattcaattcggaaaagaggaagtaaaattgtccctatttgcagatgacatgactgtatatttagaaaaccccatcttctcagcccaaaatctccttaagctgataagcaacttcagcaacgtctcaggatacaaaatcaatgtgcaaaaatcacaagcatttttatacaccaataacagccaaatcatgagtgaactcccattcacaattgctacaaagagaataacatatctaggaatccaacttgcaagggatgtgaaggacctcttcaaggagaactacaaaccactgctcaatgaaataaaagaggatacaaacaaatggaagaacattccatgctcacagataggaagaatcctatggccatactgcccaaggcaagaagatgaaaattttaacagccttttacaaaatggagatattttaaacagttcaacagaggaaaagttcaaagctcatgataaaaaagattttaacttacctgaatatgatttgaatgttgaagagcgattagttctaattgagaaaagtgttgactcaacagccacagctgatgacactcacaaattagatcatatcaatatgaatcttaataaacttataactaatgatacatttcaaccagagatcatggaaagatcaaaaacacaggatattgtgcttggaacaagctttttaagcattaattctaaagaggaaactgagcacttggaaaatggaaacaagtatcctaatttggaatccgtaaataaggtaaatggacattctgaggaaacttcccagtctcctaataggactgaaccacatgacagtgattgttctgttgacttaggtatttccaaaagcactgaagatctctcccctcagaaaagtggtccagttggatctgttgtgaaatctcatagcataactaatatggagattggagggctaaaaatctatgatattcttagtgataatggacctcagcagccaagtacaaccgttaaaatcacatctgctgttgatggaaaaaatatagtcaggagcaagtctgccacactgttgtatgatcaaccattgcaggtatttactggttcttcctcatcttctgatttaatatcaggaacaaaggcaattttcaagtttgattcaaatcataatcccgaagagccaaatataataagaggccccacaagtggcccacaatctgcacctcaaatatatggtcctccacagtataatatccaatacagtagcagtgctgcagtcaaagacactttgtggcactccaaacaaaatccccaaatagaccatgccagttttcctcctcagctccttcctagatcagagagcacagaaaatcaaagttatgctaaacattctgccaatatgaatttctctaatcataacaatgttcgagctaatactgcataccatttacatcagagacttggcccagcaagacatggggaaatgtgggccatctcaccaaacgaccgacttattcctgcagtaactcgaagtacaatccagcgacaaagtagtgtgtcctccacagcctctgtaaatcttggtgatccaggctctacaaggcgggctcagattcctgaaggagattatttatcatacagagagttccactcagcgggaagaactcctccaatgatgccaggatcacagagacccctttctgcacgaacatacagcatagatggatatcttctatacagtgaaagcctgcaggaagaagaaagtcaagtctctgtcagcatcccatttttatcaccaaaaactgtcaagaactgtgaagggtctgggagtttaccttacttattaaagaatttaccctttagctttacaaagctacagcaattgacagctatgtggctctcagataatcagaagtctgggataatattaagaataatcggtgttactgaggaagaagacaattctaaaagcttggaaaacatctttggtggaataatcgaggaaaacttccctggccttgttagagacctagacatacaaatacaagaagcacaaagaatacctgggaaattcatcgcaaaaagatcttcacctaaacacattgtcatcaggttatccaaagttaagacaaaggaaaaaagtcttaagagctgtgaaacagaagcaccagtcacaaccctcagctgcaggtctgttggagttgactggaggtccactccagaccctgtttgcctgggtatcagcagcactggctgcagaacagcggatattggtgaaccgcaaatgctgctgcctgatcattcctctggaagttttgtctcagaggagtacctggccgtgtga

SEQ ID NO: 4741 - DNA, 3753 bp, Homo sapiens
  SIMILAR (2732)..(2806): 921254mologous to Homo sapiens Lipoprotein Receptor Related Protein 5,accession number AB017498,Smith-Waterman Score=109.
cccagtcgtcctggtccgcggcgcccaacggggaagacgaagatgcagggacacgcgcgaggagccgccgcagccgccgccgccgcgctgtggagcccgagtgagcgcggcgccagcccgtccggccgctggacaacatggaggctgcactgcccgggccgccgtggcaggtaggtgggcgcgggccgacccgggaccgcgggctgctagtacaatggcccgggcggccccgcgaccaagtgcacgggcgccaccgccgccttggaagcgagttgggggcgagttggggcgcgcaccggggatccccccgccggacccactggctggctccagctgctctctgcattctcttcagctctggagagctgtgtgccggccctcagcctgagtttcctcatctgcaaaattgggacgatggtgtccagagtagtccccagtgcggcgttgcctgtccctgtggagcaggtgactacctggctgcgagtggaacagcaggccatggctctcgtagtggtctgtgacagcatatcaccctgtgggacagacccccgggacctagtgggctgggacagtaaaaaaatttccatctattttgaaaagttttctcctcttaaggaaatgacgtttactaagcaacagccccttctgctcatcgtccagccgtgctcgctggcagagcagaggctggtgggattccacctgttccgcaccggggggtgccacttggcttctcagtgtcgaaggcccttcttggacccagtacatctccacagcccccttgggctgtgggtccctgggttgggcatgactctctggactcctgtgccctgcacagcccggttctgaccacagacctcctgcatcagggtggactgtagcccagggcgggacaccaccacacccggtcccccactgactgacacccctgagtcagtctccaccccaggactgtttctttcactctttgccatggccttgggccacttccgggggcttggcaaggcaggaggcgtggaaccaagatggtatataatcagaatgctgtattttctgtgttagctgcttctcctcttgccctgcccccgtcacaggtacatgtactgggcagattggggtgagacgccctggatcgagcaggtggggatggacgacagcacccagaagatcattgtggacttggacatttactggcccaatagactgaccatcgacctgggggagaagaagctctactgggctgacactaaggaccctcctgatggctctctaccccgcctccctgactgcaggcagaaggtggtgaagggcagcctgacgcaccccttcaccctgacactctccggggacactctgcactggatggactggctgacgtgctccatccatgcctgcaacaggaacactgcggggaagagggacaatggtggctgctcccacctgtgtctgctgtccctaagggaggctttctacatgtgcggggcaacatgaagaaaatgtgaaattctgttgcttgttgtagctgacagcacgactctgaggtcccggtgggcagaggcctcgtgcagggcacctcaccagccggatgtcagagcttgccggaaggcgcagtgcccgtggagggctgccagtgcccagggagccttccgaggtgtcacgttgggcagtggaattcagagtcaggcagatccccattggtaaaaggggtgattatgctccccactacacagggtttggaggatggccggctcagtgggaccacggcggctgcaatgctgctctctgcagctcagagtcactctcatcgccagcagtcgagtgcagagcctgggccccccggcctccccagcccctccacaccaccccaggatttacatgctgctgggcctgagcagcaggaccccgtccacagctgatccctgggccctgctgctcagctgctctcttgagtgttgctgtggctgccgagagagcctgagtgtccccacaggagccaaggaggtcctgctgctggcccggtagacggaccaatggagggtctcgctggacacaccggacttcaccgacatcgtgctgcagctggacgacatccagcatgccatcgccatcaactatgacccaatggagggccacgtctactggacggatgacgaggtgtgggccatccgcagggcatacctggatgggtctggggcgcagacgctgatcaacaccaagatcaacgaccccgatgacatcgcagtcaactgggtggcccgaagcctctattggacccacacaggcactgaacacatcgaggtgacgtgcctcaacagcacctcccacaagatcctggtgtcagaggatagacagatgcatggggtcatggacttctgcttcttctccagcctcacgtactggatagactggggagagaaccctgaaatcaagcgtgccaacctggacaggcaggagctgcgcgtgctggtcaatgcttccctcgggtggcccaacggcctggccctggacctgcaggaatggccctggcccatccagacctgtatctttgccattctgcaggcgatcagtgtcgatgagacgaagaggcagaccctcctgaaggacaagctcccacacattttcaggttcaccctgctgggggacttcatctactggaccgcctggcagcaccacagcatcaagcgggtacacaaggtcaaggccaaccgggacgtcatcattgaccagctgcccggtcttcaccagtagagccgccatccacaggatctccctcgagaccaacaacaacgatgtggccatcctgctctcggcgtcaaggaggcctcggccctggactttgatgtgtccagcaaccacatctactggatgcaccaggcaccctcccagtcttgggcgccctggtgtgcaggctgcagccatggcggtgcctgcccctgggaggagggggcggtgtgggggggtcccagcggccaccaggaggaggcggaggcaatggcggcaggaactggggctgagctgtccccgctgcgtgcctgcgacagtgacccagccagccccggagcacagtcccggaaggatgataaatttgggtgtgacctcctttaaaaggaaatatccagatttagagcgagatttgtctcacaaggagaaactctacctgagagagctaaagtcattactgaaactcagtgcatgctaggtataacagcattgcgcagtgatgaagtgattgatttaatgataaaagaatatccagccaaacatgctgagtattctgttattctacaagaaaatgaatgtcagcgaattacagaccattataaagagtattcccaaatgcaacaacagaatactcagaaagttgaagccagtaaagtgcctgaggatagagaagaaggcttcagatgatcaaactactcggagctaaaggaggaagttcgaacccatggcaaagaagttaaaaaccttgaaaaaagattagatgaatggctaactagaataaccaatgcagagaagtccttaaaggacctgatggagctgaaaaccacagcacgagaactacgtgacgaatgcacaagcctcagtagccaattcgatcaactggaacaaagggtatcagtgatggaagatcaaatgaatgaaatgaagcgagaagagaagtttagagaaaaaagaataaaaagaaatgaacaaagcctccaagaaatttgggactatgtgaaaagaccaaatctacgtctgattggtgtacctgaa
